United States Patent Application Publication US 2018/0305689 A1 - sequence listing, part 85

SEQ ID NO: 1241873 - DNA, 4001 bp, Homo sapiens
aactaagtctcctcactagtctccacgacttcaaatccctgattccacagcctcccgctcctgccagctctgaacctgagactggtacaactggtcttacagaaggaagtgaaattcagccctctccctgtgacctcactcactgcctatactgctgaagttattgatatgagtttcttggtgataaagaagttcctcttgctccacctgatggctcttgaaagtctgagcttggagctactcagcatcttaagcttccaacccagctccctacacataccaggaactgcttagggcccctgcagcagccagaagcagcaaccacctgaacagctaaggataaaaagagatgaatttcattcttgtcagactcaattagagattcctgggggttctgtcccctagtctcttgcctttgaagaacaagccaaatggtctatggattggtgaagtagctaaaagaatctcagttcaattcagaatgctgcctttgccaaacacaagctgtgagctgcttgcttgggccctgccttcgtcccatcccatccctgtccctgagctgtctatggtcctgtctgtgccctcttccctggagaatgaggagatgcctgctaggatggcaagcagccacgtggtgttctttggaccgtgtttcccaagtgtgtgtgtgtgtgtgtgtgtgtgtgtgtgtgtgtgtgtgtatggggaggggggtgaggtggtgcactccagcttattaacaacaggaaacaaaatttcctgatgaaaggaccaagtgctgtcccgccagtcacctggcaggggctcccctccagctctccaacctcctcttctcaggctagcaatcttgacctaagaaggggccctcaaagccaatcaccagcacgagtcattgtcttggtttttcctttgaagcctatcaccttcccctccccctcccagcaaagccccaaagttcaacctttgcctggactggacagtgggggaggtgcagccagaaggtgtggctctgcaagccccagggacccctctcacgctccacaaactgtaggtggcttgcctgtaggtgggcgcctctggaggggtgctggccaaggtcaagggtaaactaagagagggtgaaatttttctcctgagcttaagaggtgatgtccagagcggtgggaggaggagggcacttcctgagaacagggccagggaatgctttattcctagcaaaggaactcaagccccgctgcagccatcccaacccctaagggctggaagagggatgctgaacttagactcctcctcctcttaggagaaggcagtagtcagacacccagatcctcgacagtgactaggaacacacacacacacacacacacacacacacaccccagacctgggtgactccaggagagagtctcggcctccgagtcgtgatgccagggctccgcgccagggtccagcgtgacgagcactcgggggctggacgcccagactcgattgggaaggagggaaaaagcccagctgttaaggagaggagccttcagactccgcagagaggcaggatgccccacagctcctgtcctatcccaaagtcagacccagaggctgggccgttctcgggcgcccaggtctgctcagcagtgcaccccaggttcccctgcctacctggacccaactccttcgagtcccaaatgctacccccaagttccctcttggagcagcgcacccaactgtgggttctgcaccccgttccctcaccccagcgccccagttcttcatggtcaccccagacgtccgcagcccaaacccttcccgggcccccgtgcgcagcgcgactccgctccccacttccccaaggagctgcgatccaactccgcccggcccccggcggccacccgggcgctcaccgggctgcggcaggaggcgggaggcgcaggcaggggcggcggcggcggcgggcacaggccggggcgggaggaggccactccgcacggtgcggtattgtttccaaaatacgcctgctcggggcatcccgcaaacagctgatgaggccccgcccccctgcgcgtcacgccgaggactgaccaatggcgagtgaagcgccaagtcccgggctgggccgctgccagggacggtcacgaatgtacgaaccttcccatggaaacattgcaaggggccgagcaaaattccgaccgtcgccagaagcgcagtcggagcgccgtcgccagtgcggattctgtccctaacacaggctctggaagcgccagagagtccctgaatcctctgtattaggtgtgggagagggggcgccaaagtaacttttgtcttctttttcacggcaatgggcagaataattgctgcgcgtccacaaagggaggggggaaggaggcggggagtttttttatgaggctggtgcgtccagtgggtgcagggtgcagggtgcgggtccctatgggatcccagcctcaggggaaagctccctcccgcctgccgagcaggtcggaagaaaactgcagctccaaagctgaaggtgtgtttgaaacaaacacatccaggggagcccttaggtcctcttcttgactgggcgtgggcactggcaaaataagcacctggctgagaagcggagcgctcaagaaggccggggctgcttgagcggttgacacatatctcgcatatggcagcatttagagactgtgctggtgctgccaggagagcagcatgtcctgcagaccgcgtaagggagtctatgggctacttcacaggcatttaccgagcacctactctgtgccagatattgggctgagtgccagaaacctggcgtctgccctcaaggagcttacagtctactaggagaggtagccctgaaaatagtgaaaagttattggaattgtattcattccaaggataatgactattgaggaatgcagaaaaattcagaatacaaaggctggagaaggcctcagggagacagcttttaaattgaatgggaaatatttttcaataaggaaaaccagatgcacatgtctcacgcctgtaatcccaacactttgggaggccgaggcgggtggttcacttgagctcagtggttggagaccagcctggccaacacgggaaaccctgtctctactaaaaatacaaaaatcaggcgggcgtggtggcgcatgcctgtaatcccagctacttgggaggctgaggtaggagaattgcttgaacctaggaggtgaaggttgcagtgggcggagatagcgccaccgcactccagcctgggcgacaatgagactccgtctcaaaaaaataaaaataaaataaaataaaaaagaatagcccaggcctaagggtagcagactgaagtgctgagctggagagcttacctgtgcagggagcagagggaggcttggtgactggatcattgggtgcacactgagatttacgaacggtaggcatgggcaggtgggttcaggtcagactacagaggtgtccctggaatgccagactgaagaatctgtattttataaaggggaggcagcaaagattttattggagatgagtgacttgaccaagcctgagttttaggaaagataaaatgatgagtccagagagcagtgagagggagccagtcctgcaacaaccctgacccaccaggggcagtagggctcagcagtgctctgaccaccgagctgctctctgggttgtaaacttagatttaagttcagtggagctgggaccttcagcccaatagagcctgaagtctccttgtacctttttcccatcattctttcctttgctccctcagaagtcacctgaaacagaatgaaccagccatattgagggctgtggttgctagaatagaaaaatactgtctccaaaggacaaagagggaaaagggaaagagtggggagtcaaggttagccagtagcacagtcccccgaaattgatagatttccagcaaaaggcactaagccaaaaggaggtatattattttacccagaggcttggccaaaagtgcatgt

SEQ ID NO: 1241874 - DNA, 4001 bp, Homo sapiens
cagagacagagttgctgacaagaggagagaggcaggccctggcccccaagccccagcagactcaaccctcctcccctaaacccccgtgcctacttgctgcacatgaagccggtggaactggtctgcaatgcactgaagctttcgggcaatctgtacctctgcttgatgttgccactgcccttcggggggctgctccccaatgggcaagactgctgggaaactggcagggagaggaagccgatagccagcattgcctgcaaagatagaggatccacatctcagcattctccacaactgctccaacctccctacgcctgcctgacctggccaagattggaggctgagggtaaatcctcatatgagaaaggataggagccagcctgcctctattggagcactctgccaagcttggacagcctgctgcccaagtgcataaaagttgcagaacagaaagaatggccccagccttctcttcgcttctccattcactgacagtgccatgacaaagggcaggtggtaacgtgtgcaggcgaacatgccagccttccgtccttatttatcaagctacccttaaccacagttggttattcacgtagtagcaggttgaagctcttctctggaaaagcactggaggtagctctccagtttctgggttgagcaaagtaagaggcagagcaagaaaaaatcaaaaagtgtcttcacttttttagtgcagtagagtaaggctggtctcccgaagctcctgggcagcagcacaaaaagagggagagaaaactgagacgcacagagctgccaagttgctctccggagacagccccaggcaagacctctagaccagcgctccacacttacccagtgcacgcgttagaaccaccgctaggggcgccagtccgccgggctcctcgctcctttccctcttccccgcctgcccgccttatccaacttctcagactcccgccagaactgctttgccagaactgccctaaggggcagttccctctgggagtaactgcagtgtctcctcaatcagctcgtcagacacagtaagccacgctcctagcctttaccctccctccataagctgcagtgctaatagaagaaaacagactgtctaaccctgcccttttgccagaggagggcatatttctcataaaacaaactatttaagcccacaaatgaaggggtcttgtcttagccttggaagcatcccctctcctggcattgggcccaggcaggcccaacctctttctccagttcccctttcacacacagaaagtcccatgtggcaactgggggccaccttctgcctttgggaaccctccctcccagaaccggctgggtttttcccttcattgtcaacagccagtcacagatcccccagacttctccagggcaacaggagccactttatagtaggcaagtcactgctaggacactaaaggccaggccactcaaggggcacaagatgtaaaaggagataccatggacccaaggatccctccaggaggggacaatttgccctttggggggtctgaggcacaggtgaggagcaataacaagccgagaggcagcaggtggaagtcaaggaatcaacagccccgctgatcactttgggggaaggaaacagcaaagggcaggtttggggagggaaagtcccctcttttcccccagtctctatgggaggagtcttgaggctgagagcactcaccataaaagagtcgctggggttcctcagtcaccccacaaggcagcatgacaccttggctgggggaggctgggctgagagtctgggtagctttgtcttcctggctggtgggtcgaaggccagggccacagcagtgggtgagagggaagagctgaagtcggctgagggggcagtccagtaggctctgggcaaacaggtcagcagagagcaagctcccgggttgggtcaccggctccccatcctctggttggaacacatcatcctccagctcctccacacactgagatggctccatctctcctgtgagggggcaacgcaggcatctgggctgctgccccaccagggccatacctggaaggactccccttcccttcttcctaccatactcccccttcttatttgagctggccggaccacatactgatgacatacaaccctggtaataaagcactgctaagggtgacattcactccccaaatgtggactgcctgaatgttcaggggctctccacacctcttccctgggcccgcctggaaccaccctttttcttgatcacgttttctgacctaggccggtcacaaagtttgactctgagggttgtgagcaatagcaggagtagaatcagcagctatatgcatgcagggtacctgggaaaatataaacaagactagcctctgtaagttgctgtcaagggtgctgtgactggctatacatacagtgctcacaacacacacacacacacacacacacacacacacacatacagagtcattgtcccaaggaaattcttatctcagtctgagctgagctccaggctcagcagcaaaaacaaaagccagcaatcctaggacagccaggttccctccaaacctctaagccccgccctgctgcccatctactctaatctccaccccttgcttgcacaacacaacaaacaggctctgcagtgtggtaagaatgtgtcctgggagaggggataaagacccaagctagtcattgcagctgccgtctcggctctctttgagcagagttgagctgtctgcccaccaaagtttggcctagagggtaggtccagcctctcccaactaagtctcctcactagtctccacgacttcaaatccctgattccacagcctcccgctcctgccagctctgaacctgagactggtacaactggtcttacagaaggaagtgaaattcagccctctccctgtgacctcactcactgcctatactgctgaagttattgatatgagtttcttggtgataaagaagttcctcttgctccacctgatggctcttgaaagtctgagcttggagctactcagcatcttaagcttccaacccagctccctacacataccaggaactgcttagggcccctgcagcagccagaagcagcaaccacctgaacagctaaggataaaaagagatgaatttcattcttgtcagactcaattagagattcctgggggttctgtcccctagtctcttgcctttgaagaacaagccaaatggtctatggattggtgaagtagctaaaagaatctcagttcaattcagaatgctgcctttgccaaacacaagctgtgagctgcttgcttgggccctgccttcgtcccatcccatccctgtccctgagctgtctatggtcctgtctgtgccctcttccctggagaatgaggagatgcctgctaggatggcaagcagccacgtggtgttctttggaccgtgtttcccaagtgtgtgtgtgtgtgtgtgtgtgtgtgtgtgtgtgtgtgtgtatggggaggggggtgaggtggtgcactccagcttattaacaacaggaaacaaaatttcctgatgaaaggaccaagtgctgtcccgccagtcacctggcaggggctcccctccagctctccaacctcctcttctcaggctagcaatcttgacctaagaaggggccctcaaagccaatcaccagcacgagtcattgtcttggtttttcctttgaagcctatcaccttcccctccccctcccagcaaagccccaaagttcaacctttgcctggactggacagtgggggaggtgcagccagaaggtgtggctctgcaagccccagggacccctctcacgctccacaaactgtaggtggcttgcctgtaggtgggcgcctctggaggggtgctggccaaggtcaagggtaaactaagagagggtgaaatttttctcctgagcttaagaggtgatgtccagagcggtgggaggaggagggcacttcctgagaacagggccagggaatgctttattcct

SEQ ID NO: 1241875 - DNA, 4001 bp, Homo sapiens
cctcactagtctccacgacttcaaatccctgattccacagcctcccgctcctgccagctctgaacctgagactggtacaactggtcttacagaaggaagtgaaattcagccctctccctgtgacctcactcactgcctatactgctgaagttattgatatgagtttcttggtgataaagaagttcctcttgctccacctgatggctcttgaaagtctgagcttggagctactcagcatcttaagcttccaacccagctccctacacataccaggaactgcttagggcccctgcagcagccagaagcagcaaccacctgaacagctaaggataaaaagagatgaatttcattcttgtcagactcaattagagattcctgggggttctgtcccctagtctcttgcctttgaagaacaagccaaatggtctatggattggtgaagtagctaaaagaatctcagttcaattcagaatgctgcctttgccaaacacaagctgtgagctgcttgcttgggccctgccttcgtcccatcccatccctgtccctgagctgtctatggtcctgtctgtgccctcttccctggagaatgaggagatgcctgctaggatggcaagcagccacgtggtgttctttggaccgtgtttcccaagtgtgtgtgtgtgtgtgtgtgtgtgtgtgtgtgtgtgtgtgtatggggaggggggtgaggtggtgcactccagcttattaacaacaggaaacaaaatttcctgatgaaaggaccaagtgctgtcccgccagtcacctggcaggggctcccctccagctctccaacctcctcttctcaggctagcaatcttgacctaagaaggggccctcaaagccaatcaccagcacgagtcattgtcttggtttttcctttgaagcctatcaccttcccctccccctcccagcaaagccccaaagttcaacctttgcctggactggacagtgggggaggtgcagccagaaggtgtggctctgcaagccccagggacccctctcacgctccacaaactgtaggtggcttgcctgtaggtgggcgcctctggaggggtgctggccaaggtcaagggtaaactaagagagggtgaaatttttctcctgagcttaagaggtgatgtccagagcggtgggaggaggagggcacttcctgagaacagggccagggaatgctttattcctagcaaaggaactcaagccccgctgcagccatcccaacccctaagggctggaagagggatgctgaacttagactcctcctcctcttaggagaaggcagtagtcagacacccagatcctcgacagtgactaggaacacacacacacacacacacacacacacacaccccagacctgggtgactccaggagagagtctcggcctccgagtcgtgatgccagggctccgcgccagggtccagcgtgacgagcactcgggggctggacgcccagactcgattgggaaggagggaaaaagcccagctgttaaggagaggagccttcagactccgcagagaggcaggatgccccacagctcctgtcctatcccaaagtcagacccagaggctgggccgttctcgggcgcccaggtctgctcagcagtgcaccccaggttcccctgcctacctggacccaactccttcgagtcccaaatgctacccccaagttccctcttggagcagcgcacccaactgtgggttctgcaccccgttccctcaccccagcgccccagttcttcatggtcaccccagacgtccgcagcccaaacccttcccgggcccccgtgcgcagcgcgactccgctccccacttccccaaggagctgcgatccaactccgcccggcccccggcggccacccgggcgctcaccgggctgcggcaggaggcgggaggcgcaggcaggggcggcggcggcggcgggcacaggccggggcgggaggaggccactccgcacggtgcggtattgtttccaaaatacgcctgctcggggcatcccgcaaacagctgatgaggccccgcccccctgcgcgtcacgccgaggactgaccaatggcgagtgaagcgccaagtcccgggctgggccgctgccagggacggtcacgaatgtacgaaccttcccatggaaacattgcaaggggccgagcaaaattccgaccgtcgccagaagcgcagtcggagcgccgtcgccagtgcggattctgtccctaacacaggctctggaagcgccagagagtccctgaatcctctgtattaggtgtgggagagggggcgccaaagtaacttttgtcttctttttcacggcaatgggcagaataattgctgcgcgtccacaaagggaggggggaaggaggcggggagtttttttatgaggctggtgcgtccagtgggtgcagggtgcagggtgcgggtccctatgggatcccagcctcaggggaaagctccctcccgcctgccgagcaggtcggaagaaaactgcagctccaaagctgaaggtgtgtttgaaacaaacacatccaggggagcccttaggtcctcttcttgactgggcgtgggcactggcaaaataagcacctggctgagaagcggagcgctcaagaaggccggggctgcttgagcggttgacacatatctcgcatatggcagcatttagagactgtgctggtgctgccaggagagcagcatgtcctgcagaccgcgtaagggagtctatgggctacttcacaggcatttaccgagcacctactctgtgccagatattgggctgagtgccagaaacctggcgtctgccctcaaggagcttacagtctactaggagaggtagccctgaaaatagtgaaaagttattggaattgtattcattccaaggataatgactattgaggaatgcagaaaaattcagaatacaaaggctggagaaggcctcagggagacagcttttaaattgaatgggaaatatttttcaataaggaaaaccagatgcacatgtctcacgcctgtaatcccaacactttgggaggccgaggcgggtggttcacttgagctcagtggttggagaccagcctggccaacacgggaaaccctgtctctactaaaaatacaaaaatcaggcgggcgtggtggcgcatgcctgtaatcccagctacttgggaggctgaggtaggagaattgcttgaacctaggaggtgaaggttgcagtgggcggagatagcgccaccgcactccagcctgggcgacaatgagactccgtctcaaaaaaataaaaataaaataaaataaaaaagaatagcccaggcctaagggtagcagactgaagtgctgagctggagagcttacctgtgcagggagcagagggaggcttggtgactggatcattgggtgcacactgagatttacgaacggtaggcatgggcaggtgggttcaggtcagactacagaggtgtccctggaatgccagactgaagaatctgtattttataaaggggaggcagcaaagattttattggagatgagtgacttgaccaagcctgagttttaggaaagataaaatgatgagtccagagagcagtgagagggagccagtcctgcaacaaccctgacccaccaggggcagtagggctcagcagtgctctgaccaccgagctgctctctgggttgtaaacttagatttaagttcagtggagctgggaccttcagcccaatagagcctgaagtctccttgtacctttttcccatcattctttcctttgctccctcagaagtcacctgaaacagaatgaaccagccatattgagggctgtggttgctagaatagaaaaatactgtctccaaaggacaaagagggaaaagggaaagagtggggagtcaaggttagccagtagcacagtcccccgaaattgatagatttccagcaaaaggcactaagccaaaaggaggtatattattttacccagaggcttggccaaaagtgcatgtctgagctggt

SEQ ID NO: 1241876 - DNA, 4001 bp, Homo sapiens
cctcatatgagaaaggataggagccagcctgcctctattggagcactctgccaagcttggacagcctgctgcccaagtgcataaaagttgcagaacagaaagaatggccccagccttctcttcgcttctccattcactgacagtgccatgacaaagggcaggtggtaacgtgtgcaggcgaacatgccagccttccgtccttatttatcaagctacccttaaccacagttggttattcacgtagtagcaggttgaagctcttctctggaaaagcactggaggtagctctccagtttctgggttgagcaaagtaagaggcagagcaagaaaaaatcaaaaagtgtcttcacttttttagtgcagtagagtaaggctggtctcccgaagctcctgggcagcagcacaaaaagagggagagaaaactgagacgcacagagctgccaagttgctctccggagacagccccaggcaagacctctagaccagcgctccacacttacccagtgcacgcgttagaaccaccgctaggggcgccagtccgccgggctcctcgctcctttccctcttccccgcctgcccgccttatccaacttctcagactcccgccagaactgctttgccagaactgccctaaggggcagttccctctgggagtaactgcagtgtctcctcaatcagctcgtcagacacagtaagccacgctcctagcctttaccctccctccataagctgcagtgctaatagaagaaaacagactgtctaaccctgcccttttgccagaggagggcatatttctcataaaacaaactatttaagcccacaaatgaaggggtcttgtcttagccttggaagcatcccctctcctggcattgggcccaggcaggcccaacctctttctccagttcccctttcacacacagaaagtcccatgtggcaactgggggccaccttctgcctttgggaaccctccctcccagaaccggctgggtttttcccttcattgtcaacagccagtcacagatcccccagacttctccagggcaacaggagccactttatagtaggcaagtcactgctaggacactaaaggccaggccactcaaggggcacaagatgtaaaaggagataccatggacccaaggatccctccaggaggggacaatttgccctttggggggtctgaggcacaggtgaggagcaataacaagccgagaggcagcaggtggaagtcaaggaatcaacagccccgctgatcactttgggggaaggaaacagcaaagggcaggtttggggagggaaagtcccctcttttcccccagtctctatgggaggagtcttgaggctgagagcactcaccataaaagagtcgctggggttcctcagtcaccccacaaggcagcatgacaccttggctgggggaggctgggctgagagtctgggtagctttgtcttcctggctggtgggtcgaaggccagggccacagcagtgggtgagagggaagagctgaagtcggctgagggggcagtccagtaggctctgggcaaacaggtcagcagagagcaagctcccgggttgggtcaccggctccccatcctctggttggaacacatcatcctccagctcctccacacactgagatggctccatctctcctgtgagggggcaacgcaggcatctgggctgctgccccaccagggccatacctggaaggactccccttcccttcttcctaccatactcccccttcttatttgagctggccggaccacatactgatgacatacaaccctggtaataaagcactgctaagggtgacattcactccccaaatgtggactgcctgaatgttcaggggctctccacacctcttccctgggcccgcctggaaccaccctttttcttgatcacgttttctgacctaggccggtcacaaagtttgactctgagggttgtgagcaatagcaggagtagaatcagcagctatatgcatgcagggtacctgggaaaatataaacaagactagcctctgtaagttgctgtcaagggtgctgtgactggctatacatacagtgctcacaacacacacacacacacacacacacacacacacacatacagagtcattgtcccaaggaaattcttatctcagtctgagctgagctccaggctcagcagcaaaaacaaaagccagcaatcctaggacagccaggttccctccaaacctctaagccccgccctgctgcccatctactctaatctccaccccttgcttgcacaacacaacaaacaggctctgcagtgtggtaagaatgtgtcctgggagaggggataaagacccaagctagtcattgcagctgccgtctcggctctctttgagcagagttgagctgtctgcccaccaaagtttggcctagagggtaggtccagcctctcccaactaagtctcctcactagtctccacgacttcaaatccctgattccacagcctcccgctcctgccagctctgaacctgagactggtacaactggtcttacagaaggaagtgaaattcagccctctccctgtgacctcactcactgcctatactgctgaagttattgatatgagtttcttggtgataaagaagttcctcttgctccacctgatggctcttgaaagtctgagcttggagctactcagcatcttaagcttccaacccagctccctacacataccaggaactgcttagggcccctgcagcagccagaagcagcaaccacctgaacagctaaggataaaaagagatgaatttcattcttgtcagactcaattagagattcctgggggttctgtcccctagtctcttgcctttgaagaacaagccaaatggtctatggattggtgaagtagctaaaagaatctcagttcaattcagaatgctgcctttgccaaacacaagctgtgagctgcttgcttgggccctgccttcgtcccatcccatccctgtccctgagctgtctatggtcctgtctgtgccctcttccctggagaatgaggagatgcctgctaggatggcaagcagccacgtggtgttctttggaccgtgtttcccaagtgtgtgtgtgtgtgtgtgtgtgtgtgtgtgtgtgtgtgtgtatggggaggggggtgaggtggtgcactccagcttattaacaacaggaaacaaaatttcctgatgaaaggaccaagtgctgtcccgccagtcacctggcaggggctcccctccagctctccaacctcctcttctcaggctagcaatcttgacctaagaaggggccctcaaagccaatcaccagcacgagtcattgtcttggtttttcctttgaagcctatcaccttcccctccccctcccagcaaagccccaaagttcaacctttgcctggactggacagtgggggaggtgcagccagaaggtgtggctctgcaagccccagggacccctctcacgctccacaaactgtaggtggcttgcctgtaggtgggcgcctctggaggggtgctggccaaggtcaagggtaaactaagagagggtgaaatttttctcctgagcttaagaggtgatgtccagagcggtgggaggaggagggcacttcctgagaacagggccagggaatgctttattcctagcaaaggaactcaagccccgctgcagccatcccaacccctaagggctggaagagggatgctgaacttagactcctcctcctcttaggagaaggcagtagtcagacacccagatcctcgacagtgactaggaacacacacacacacacacacacacacacacaccccagacctgggtgactccaggagagagtctcggcctccgagtcgtgatgccagggctccgcgccagggtccagcgtgacgagcactcgggggctggacgcccagactcgattgggaaggagggaaaaagcccagctgttaaggagaggagccttcagactccgcagagaggcaggatgccccacagc

SEQ ID NO: 1241877 - DNA, 4001 bp, Homo sapiens
agattttaccttagctaaggtattttcagttccttctaaaaaggacagtttctgacaaaagtaacccactctaaatgacatctgtagaggagaaaattcaccctggggtgaagcacactcctgtaagtaatttaccctgtggaaccttcagggcatcccttttaatggccacatcaaaattacttctaaagccacatacagaagctaaaagacacttctgccccccactccataagctgcagtttaattttactgacaaattgaacttttaaaatgtttccctgtttatacttatccctaggcattcataaatgacaaatgtgtgcttagggacaactactttgttccacagggaaacctgtatggcttttctctctcatctatcgggttggatcgtctttccaatctgatgatcttgaggtacagaaagtgggcatgggcctgggatgcaggcctaactgctacatgggggagatgcaataaaacataaaatagccctccagtaaatctcatgcttccaaggcaattacttcatgttagtcaatatttctaatgagaattataaccacagcaaacagatcactgtaggtatcaatggccaaagaactttaaccactttctgaaggaggagaatgtccctaaatccttactagtctgaagggacactataggtacagatgatattcaaattaaattatgcagatgcctgaacataattacgagttcccaaagtgtgagcatcatgtgtgctaggtgaagatttcaccacctcttctcagcatttaactacaacaggaacacgttcaaccaacagttgacttgaaatagtaatagtttcttggtgaaattagttagcaaacttattagatgagaaatcaaacgatgactcgtatcttattcgttttaaccatctgaaagtatgccaaaaagaataaagttatttcttaaaattcatcatcacaaaaggagaagccatcttttcacacctctttaaagagcaaatcaaatccagtacaatttgtaacatctgaagtaatgttcttttatatgatgtacaaaattttattttgacaaactattttaacaaggttttaatatgtatcaacgaatctgggaagggatcaatgaaaagagagtcagtgtatccatcactgaacaaaagtttcaatacattaacacgtatttgcaaactcagggtcgaagacttagaatcttatcaagagatcccataaaatcgaatagcaaattaaataaacagcgaatgaaaaaaaatctgccaaatgctgtttttcaattcacttactgtcaagccaaaatcttgtcgctttgatgaaaagaatatatttttaaaaaaattgttgctacatctgctctgtggtcctatgcagtaacacatgttctctctccctcacacacacactctctctctccctgacagggattcccaggacaccggtggggcctcttttaggccccttaagtgttaacagcaagaggcctggctgagaccaggcgtctgggccgctttaaatgccctggccttcagaggactgaggcgagcacagccataaaaccaggggacgttaccgaacccccgagcgtctgatgccccccgccccccaaccacacacaacttcactcacacaattaaggctgggagatggcattccacttaactgtcagactcggagcggtggcagccccgcagccacaaagagatgccttaaatgagaagaacatgtttctacaccgcatttgtgaaagtttggctcggagctacgcgctgattaatatcagatctccttcactcgcctcgccacaatcttgtcacatctggctgacaaatcccgaggaactccggcaaagccaggcggcggcggggctccgggtctgggcggcggctccggaggagcagcgggagaccccgcagcggcctcctccttctccgcccgcggcccccagcctcgccgccgccgcccggctcccagcacggaaccgacggggcgctcccgagacgggcgagccacgcgctcgcaggtcccaaggccaggctgggcgggactgttaagggagctcgaagtcgggggccgggggcttcccgtcccggcgcttcccatgcaaacccctgaaggaagcggcaggcgcagccgcgggctccgcagcccaggcccacttcctgtcactccaggaaaacctcggagcggcggacgcggctcggcccggcttccagcccagagcccaagcgccttagccccgtcccagcgctttctgaaagacgggccacctcgcgcggagccgcgacaaggactccagggtccgcagtgaagctggtcaaatctgccccgcacacggtcaacgctcggtctgtgtcccggaagctttcggaccggacctgtctaaatagcgactttcagtcgtgggttttttgttcttgtgggtttgttttgttttttgttgttgttgttgctctacaaaagatttgtcccgcagtggacgggagcctcctcacggccgcccgcccgtctccgcagttctcctcagtgaccggaggctgccgcgcgccccgttctccagagaaacaatccccggagagaaagacggccagtgtgaaatatcagctgtttcacaaattctgaggtaaaagaaaaaaaaaaaaagaaggggtcgacccccacaggtggaaacagcaagtcctaacgtcctgggctgaagcctggggtgcgggcggcagagagtggcgtgtagggtacccgccgagtgccgccgccgatttccacaggctggcccgccggcacctccgacgcgcccgcagatccggcgcggagaccgtttgccagctccgggacgtcgggcagggacgggtcccagagccccaacccccccgccgccgcctcccggccggagaccacggtccctcccgccgcgcctcggggccgcgctgccgcgcaggtagccagctggccctcgggaggtggccctcgggtacccacgggagccggagcccagcggcgtcccgggccgcctgctccgcgcacagagaatccccgcgcccgcggagggcgccgcgcttacctcggccatcctgcgaccgctgcggtgccggggctgccggcgcgtctcccgggcccgggccgccccgcgtccgccccggctcggcgggcgccgccgcatccacgctccggccgtcggggcgcgacccggcgaagtgggcggctccccaagcgcccaggctgcgcagcacgatggccgcccccgccgcgcaccgcgtgtgcccgcacgcccgccccctgcgccccggggacgcctctccgcccctccccctgcccctccgcccaccgcgcggtcgccccacgccgcgggcgctgcttcgccgcccgggaggccgcctcccgccccgggaccggataacgccctaaatcagcgcagctgaggcgaggccgtggcccccgcagaccgcggagacctcgccggcggccggcgcggaggtgtctgcccccgccgggcttgaaggcacttgttggtaaaagacacagacgtgtcggtgtttgcctctcccggggaagggcgaaacgctctgaagttctctggcgctcttctcaggagatgattcggcctcccctcctaccctggggcgccctcggggtctcactgccgcggaggaagaaggcagcgccgccctcgcctgcagaaacctcattcccgagaaagtgcgggacgagcgtcttgggatgtggaagaagggggtcgccaggaggttttcttaagaactcaaaacaagcgccccccaccgcacacgcacacacacacacacacacacacacaccccttcccttgggtggtctgaagagtcaaagtcccagcttgaccactttcccaggacaaatggctttgctctctgggcctcagtggcttcagttgtaaaatgggattaagtttttcgcgtcttattggatgctagggacggaatgaaatgaagtgccctggagaagccaactggaggt

SEQ ID NO: 1241878 - DNA, 4001 bp, Homo sapiens
gaatgaaaaaaaatctgccaaatgctgtttttcaattcacttactgtcaagccaaaatcttgtcgctttgatgaaaagaatatatttttaaaaaaattgttgctacatctgctctgtggtcctatgcagtaacacatgttctctctccctcacacacacactctctctctccctgacagggattcccaggacaccggtggggcctcttttaggccccttaagtgttaacagcaagaggcctggctgagaccaggcgtctgggccgctttaaatgccctggccttcagaggactgaggcgagcacagccataaaaccaggggacgttaccgaacccccgagcgtctgatgccccccgccccccaaccacacacaacttcactcacacaattaaggctgggagatggcattccacttaactgtcagactcggagcggtggcagccccgcagccacaaagagatgccttaaatgagaagaacatgtttctacaccgcatttgtgaaagtttggctcggagctacgcgctgattaatatcagatctccttcactcgcctcgccacaatcttgtcacatctggctgacaaatcccgaggaactccggcaaagccaggcggcggcggggctccgggtctgggcggcggctccggaggagcagcgggagaccccgcagcggcctcctccttctccgcccgcggcccccagcctcgccgccgccgcccggctcccagcacggaaccgacggggcgctcccgagacgggcgagccacgcgctcgcaggtcccaaggccaggctgggcgggactgttaagggagctcgaagtcgggggccgggggcttcccgtcccggcgcttcccatgcaaacccctgaaggaagcggcaggcgcagccgcgggctccgcagcccaggcccacttcctgtcactccaggaaaacctcggagcggcggacgcggctcggcccggcttccagcccagagcccaagcgccttagccccgtcccagcgctttctgaaagacgggccacctcgcgcggagccgcgacaaggactccagggtccgcagtgaagctggtcaaatctgccccgcacacggtcaacgctcggtctgtgtcccggaagctttcggaccggacctgtctaaatagcgactttcagtcgtgggttttttgttcttgtgggtttgttttgttttttgttgttgttgttgctctacaaaagatttgtcccgcagtggacgggagcctcctcacggccgcccgcccgtctccgcagttctcctcagtgaccggaggctgccgcgcgccccgttctccagagaaacaatccccggagagaaagacggccagtgtgaaatatcagctgtttcacaaattctgaggtaaaagaaaaaaaaaaaaagaaggggtcgacccccacaggtggaaacagcaagtcctaacgtcctgggctgaagcctggggtgcgggcggcagagagtggcgtgtagggtacccgccgagtgccgccgccgatttccacaggctggcccgccggcacctccgacgcgcccgcagatccggcgcggagaccgtttgccagctccgggacgtcgggcagggacgggtcccagagccccaacccccccgccgccgcctcccggccggagaccacggtccctcccgccgcgcctcggggccgcgctgccgcgcaggtagccagctggccctcgggaggtggccctcgggtacccacgggagccggagcccagcggcgtcccgggccgcctgctccgcgcacagagaatccccgcgcccgcggagggcgccgcgcttacctcggccatcctgcgaccgctgcggtgccggggctgccggcgcgtctcccgggcccgggccgccccgcgtccgccccggctcggcgggcgccgccgcatccacgctccggccgtcggggcgcgacccggcgaagtgggcggctccccaagcgcccaggctgcgcagcacgatggccgcccccgccgcgcaccgcgtgtgcccgcacgcccgccccctgcgccccggggacgcctctccgcccctccccctgcccctccgcccaccgcgcggtcgccccacgccgcgggcgctgcttcgccgcccgggaggccgcctcccgccccgggaccggataacgccctaaatcagcgcagctgaggcgaggccgtggcccccgcagaccgcggagacctcgccggcggccggcgcggaggtgtctgcccccgccgggcttgaaggcacttgttggtaaaagacacagacgtgtcggtgtttgcctctcccggggaagggcgaaacgctctgaagttctctggcgctcttctcaggagatgattcggcctcccctcctaccctggggcgccctcggggtctcactgccgcggaggaagaaggcagcgccgccctcgcctgcagaaacctcattcccgagaaagtgcgggacgagcgtcttgggatgtggaagaagggggtcgccaggaggttttcttaagaactcaaaacaagcgccccccaccgcacacgcacacacacacacacacacacacacaccccttcccttgggtggtctgaagagtcaaagtcccagcttgaccactttcccaggacaaatggctttgctctctgggcctcagtggcttcagttgtaaaatgggattaagtttttcgcgtcttattggatgctagggacggaatgaaatgaagtgccctggagaagccaactggaggtggtggccccgagagtagacgcggaggggctgaggccgcaggatcctggagcccaggagctgacggagatcgcccacagctgctgcagcagcgcccgggtttctgctgccccggggcagggcaagcctctcccaacctcttcagctccttaaaaggagtctgtaaaggctagactgggggggcggcgggggtcctgcttcctcttccctcagtttcttccacctgccttgctgctggtggggatccttgaaaaggaaacaaagctcttccttccctctctgagaggaaaaggaagatgaagtgagttgccctcagccacccagagtgtgcctggttgtggctatggaaggcacaggcaggtggaaggcttctgaagggaagagaagggaaaggagggaacaaggtgtacgaggaagaatgtgtgggtgtctgggcgtcctggcgtcctggggtccagcgggtccttctgcctctcctggggtggacacacaggtgagtgtcctgggcctgatgtgtggcgcctttccttgtaggcttgaagtctcctggcctcacgtgatggaccttgccgtgggaggagattcttttttttttttttcacgtggctaacttcttgatgtagctttgctagattcattccgcatctaaactgcttacctctcattcctccgtgcccccgtattgaggcctttcttctaacacctccttctctgtttgttgtaacacagtgcatctttgaaggactttctggaatgtcaccacatctcagaaaccttccctgatccaccaagcctccactcgatgtgcttttgccctgttgtgacccccaggcacttttttctgcctctttcatcgtgccagtagcattgtgtagcctagttgtgatgtgtgcttgtcttaattcctttggtggttactcatcttagtggcttctgtgctatgagatacggtagcagataaacctctggttttgcagtcatagtgacccagggatagctcattcctagcaactggaaactggctgaggaagtcagccttcttggcccctcttttcttctctataaaagcagatatgaaagcctgtctcaggccagattggtaggactaaataaaatagtctctgttctgcaaaccctctccccctttcctttctgctgcatctaaaaccaatttctggattaacttaaatttgttacctacaataatattgtaaccaagagagatccttgatgacaatattactgaatgccacctatgcct

SEQ ID NO: 1241879 - DNA, 4001 bp, Homo sapiens
caggttcaagtgattcttgtgcctcagtctcccgagtagctgggattgcaggcacgagcgaccatgcctggctaatttttgtatttttagtagagatggggtttcataacgttggccaggtttgtctcatctcattgctttatcattttttgctcctgacctcaggtgatccgcccaccttggccacccaaagtaacaagacatctttcaatctatcagcccggtaacttactagatctggttacatatactttctctgacaccttcctccctattgttccttctaccagcattactccagatagaatgaacagaacttttccagagtgcttttcacatttactaaccacttttacatccatcatctcatgttccaaccagcaactttgggatgcatgacacttgtgttatcatcattttatcttatatatgaggcaatgacactacatcctggtccccatatctagtccggaactgtttctaatacagcacaccgtctccagtgcactggcaattttatacagaagaagcctgtaatgcctgatttggccgcacttagcttcaaagggcttgtaatgcctgaagaccataatagcactgacttatgataatctagttcaagttccgtttgcagaagtggatctgtcatacttccggtctaagcccagcagtattaggctgcactagagaatatgaagactaggaatagagtttagagaaaatgtaaaccaaaaagaactaagaatatgtgcaaaatgatcaagaaactagtctgcaggggtaacttaattgggtaaggtcagttgtaactttgaggaaacatccatttacaaattacagaatttgtttctacaattgcagagattcctataaaatgttagaaaaactacatttaattgaaaatacgaaatcaggtattaggtgaaatagagatcctaatcaagagaaggtgagaatgaaaaaagcaacactaaaatgcaatcacatagtttattcaattaaataaataggaggcaccgtaactatcttgatgcaacaccggaaaagctgtttcgtcaaagagctcacaagacacagacaagtaactctccagcggcatgaaatgcatccagaaatccaaaccattttgccaggtatttaaacagaaagggttgtgtctagattcacgcggggactcggcttttgacgtacacactctgtatttggtttagcgtactagggaagatctattaaagccctgattacttatgctgcttccgtgtctattccccgcggttacgaggcataccagaagtccaagtttctttgttctgtaccaggacggacgctggtcataaatactgaaccatcgtagcccagccacttcacccacaccagggtaaaagggtgggggagcggaggaggggcaaggttccatcccgagcacaactaccagaaacggaaaagcgacggggtggggggccaaactgccaaatacaaacaggacccaagccaagggcggggacctaagcagggcggggatccaggaagcacctcccgagcaggttctatggctccccctaccaagggtaactctctgggtttcctctccccggacgtcgtgggcacgcgcccgacagactttcgcccctaggccggttcccagtccagctccggagccaccgtgccgagttctcccaggccgcactcaccccggaggaagccttggccccctcgtcctcttcgcccctccaggccggcgacgtggggctgacggccaggtcgcaaaaagcagggccgagcggagcccgctcccctcggtcggcggtggagaccccggcccaatcccccggccgcagcggtacggcgtcggcggcagcagctgacccggacacagtgagaagccccggcggaagtgataacatcccgacctcctccgggcgcggcagccggcggtggaggcggcgggggcgtggcggcggcggaggcgtggcgtcttcttgaaacccacacagcatccccccaaccccctcagacgtcacgggctagcgctcgcgcctgcactcgcggggtcggccttccttgcctgtgggcggacccgtcgcgtcgactccttattggtggcgttactacgcctcaaggcgtttcttccctctttgctgttcgcagggacgctgcctggtagtttcagttacttttgttttctttctgcctgcctttattgatcattacagtaggtgaaattatcgatatcaataataatattgtaatacaataggtgcaattatcaatatcaatattattacaacaggtgcaattatcagtatcattacaataggtgcaattatcagcgatcaataatgtgaattataaaatggatgaaataaggggaggaggtcgggcgcggtggtttacgcttgtaatcccagcactttgggagggcgaggcgggtggattaccggaggtcaagagctcgagaccagcctggccaacatggtgacacctcgtctctactaaacaaacaaaaattagctgggcgtggtggcgcgcgtctgtaatcccaactactcaggaggcgagggcggaggcggaggcggagttggagtttgcagtgagccgagatcgtgccattgcactccagcttgggcaacagagcaaaaactccgtctcaaataaaaggaaaaaggaaaaaaaaaaaaaaagaaaaagaaaaaaaagaaataaggcgaggaaaaatatccgaggcatcattttggggagttaggcctcagaagcgaccttagagtttggtaatatttgagtgtgaaaagctttacagcagtgcttctcttcactgggggaacggtcggtttatttttttcaattttcaattagtttttgacaagttaataaaacagaaaaatgaaaagacatacaaagtccaagtcaaaactttttatcgttagagttaacagccataaaattacctgcaaaattgacatagagttttctactctctctctgtgaaccatttgcaaacagttctcagaagagcccaggtctatagaccatggttagagtactcaaggtaaactactcaaattagaccatactcagctgtagagtttcaaccaaatgagatttgtttggagaacatcatagtctctctcagttgggcgtgctggctcatgactgtaatcccagcactttgagaggccgagtcggtagatcgccagacctcagggcaacatggcgagaccccatctcttaaaaaaaaaaaaaaaaaaagagacagagaaagaaagaaagaaaaagaagcaaagagaaagaaaggaagaaagaaagaaaagaagaaaattaggtgggcttggtggcatgcacctgtggtcccagccacttgggaggctgaggtgggagactctctggagcctggcaggcggcggttgtagtgagccaagatcgcgccactccactccagcctgggtgacagcgaaaccctgtcttaaaaaaaaaaaaaagtccctttccaaagtttcatctgataaatccatagaaaggctcagcatcaagtatttgggtgattccattggggtacgatcaggcctgaggggaacagaaaagctcaaaattttaaatcattgactaaaaatgcagcattctgcctggatttcacattgctttggcaacatttacccaccattggtagattaaagtccgtctctttgataaaatgggaagaaaatagtacctaccttatagggtttttgtgagatgaattcatatatatgtattaggaccttggttgtcatattgtaatcacatttaagtattaggtattctttttatcctagtctagcaatttcactaaatagctagtagagaaaacaaaactgatcaacagagctttagctaaacaactacttgggccaagaaatttcatcttgatttacagaagtttttgtagtttcatactttgcttcttcagttctgcaatgtgcagaattccccacagggtggcagaaaatcactggaaatcatatata

SEQ ID NO: 1241880 - DNA, 4001 bp, Homo sapiens
ttcctaattaccagccaggtaaaacattcgttaattagttgtattttttctttctctaagttatctatcctgtcctttatccattcgtcaatggaatcttattatttgtttctagttgtgtgaactttacattcattttcttgttcatctttctgattcaactgtgaacctttgtatctaattctgtcccactgacctgcctgtttttgcttcagtactacccaagactctgccattttaataacaacacgttctactcaggcagctatttaaaaccatcttagtataatgaaacagacatggtcttcagtgtgagttagctgtttgttaccttgggcaagatacttgactcttctgggcctcagtcccatttgtgaaattggggtaaacaattcttacgcctccctaacaggatggctgtgattaaaagctagtaatgccaaacaatcaccttttcattagatgtcaatctactatcctcaaataaccaacaagcaaattctaacatcaagggagggattcatttataagcaaatgtgaccttgtgtgtagaaacacaaagcaggtaaagcctcacttgtctgttttcgtatttactttcctgggtcttgacaactaatacgttaatgaaaaacaaaaacaaaaacaaaaaagtggccaggcgcggtggttcacgcctgtaatcccagcactttgggaggccgaggtggacggatcgcttgaccccaggagtccgagaccagcctgggcaacatagtgaaaccctctctctaccaaaaataaaaataaaaaaaattagccgggcgtggtggcgcgtgcctgtagtcccaaatactcgggaggctgaggtcggagcatcacctgagcccggagaggtcgaggctgcagtgagccatgatcgcgctacagcattccagcctgggcaacagagcaagaccttgtctcaaaaaaagcggggggaagggggtgacaataaccccaaaacatcagtcctgcaagatttttcaactactctcttcccccaaacaaaaacataaaacttcgcaaatgggcaatcaggacaacctgatctgcccctctatccttgccacttgtctaattctgaagtctgagcgacaatccataattggaatgcgaaacgcctttcaatggtaaaacgcacgcttgcctaatgaagacactaacgtttagttggcgactgagccgtcctggttcacagatttcgatttcgaccctccggagcatcaacggctcgggaggaaactgaggccccgggcgggtcagaagagcccagcccaaggtcatccgggagtccgggtaggccgggccccggggatctcccagcccggcccggcccggcccggcccggcccggcccggcccgcgctgccgctcacctcagcagcgccaggaaggctgcgggctccacgtccggcagctcgatctcggccgacgtggtggccatgccgccgttgaacatggcgtcaaagacggcgctgccggccgccagcacgaagcggtgggcggggatgcgctgcgggcccccagcggcggcggcgccgcgacccttgcccagtacgaagcgcacatcgctcagcagctccgagttgaagaggaaggcgaagcgctccttcagcgacgccttggtcgcctgccagttgtagagaggttcccgctgcagggggagcaggggccccagagaggacggtgagggcggcggcggcggccccgcggggcccggctccgcctcagcccccgacgcctgctccccagctgcggcaggcccgagtgaggccatcctccagctgcgcggttgcccacgttatggacaaaactccgccgccatcgcccaggccgcctccggaggccggcgctgcctccctgccttccgggaaaggcgcttccgggggcctcgcgcctccgcaggcccctccctgaccgcgcgcgcccccgcacgcccgggttgccgctgtgcgcggccgcgggaggtgtaacaggactggactcccggcagccccagggcaggggcgtggggagctggtcctagctcagcgctcccggaggtggagcttctgcaggctgggtgctgccgggcctacgggcacccaccccctggctcagtgccctgggtattctgactcagtaggtctggggtagggcctgagaatttgtaattttaagatgcatcgtggatctgcaggcggctctcacggctgcctttttcttcctgcaggccccttatcaccaagtccagcgcccccattgtgtatctgggacatgtcccaaggcctgtcccgaggagtgttttgcctggaagtggaggggcaggaaagtatggccaagggaacacgtgagggaggggatgacatgacttcccacaaccctgtaccccaagcgtggccaagtcgccgctccagaaggccgcgaaacccgtggaaattccggaagcagaggtggaaggcttagaaccccagtgacctctccccaggtccgcaggtccctttcccttctaattgaccctttggttccgtcctctgggcctaagagacatttccttctactgcttccacccctgtatttgaaacccctcgtgcttgcccaccttctcttgtagcgcttttcagtccttgcactgaaccactgcctaagcttgaaatttaaaaaattaaaaactaaaacacacacacaatggaaaaggctgtattatcccttcccaggcagtatttacaacccggtcatcatgattgggggaccgaggccttcctttttctcccttcagtgaggcaggccctgagttaagtcagctgtcaaaagcagaacgtagaaaacccaagaaatagtccttgaccaggcacgtatagttggaaacacctgttctttgcaggaagagccttacagattacaaatgccgtcaagtaaatagtaaaccccaaacctgggtttctcctgtaaaatcactccacttgtgaaaccaccagaggggacttccagctgttaggcatttagaatggtaacttctttgggagaggaacgtgcttgggaagagacttaaagtagtaggggctgaaatagtggatgcacaaccccttccccattgccagccggcaattcctaaagacaaagggacatcatgctactaatgataccattatcacacctaacaaaattaaccatatcatcaaatcatctatatatgatttttttttttttgagacggagtctcgctctgttgccaaagctggagtgcaatggcatgaagtctgccttccgggctcaagcgattctcctcctcagcctcccgagtagctggggttacaggtgcgtgtcaccacatccagctaattatttgtatttttagtagagacggggtttcaccatattggccaggctcctctccaagtcctgacctcgtgatctacccgcctcggcctcccaaagtgctgggattacaggcatgagccaccaggcctggtcctatgtataatatttaatgtacagttaatatttgtttctccacttgtctctaaaaaaatttttttttgagacggagtcttgctctgttgcccaggctggagggcagtggcatgatctccgctcactgcaagctctgcctcccacgttcacgccattctcctgtctcagcctcccgagtagctgggactacaggcacctgccaccaagcctgctgatttttttttttttttgtatttttagtgtgtccagagttcgttccttctggtgggttcgtggtcttgctgacttcaagaatggagctgtggaccttcctgatgagttttatagctcttaagatggcagggacccaaagacttcttctgaagagcaaaagaacaaagcccttatgtcatggaaaggaaccccaacgggtggttgcagtctctgggcgtgggggcaggaggggaggggccggcgggggtggggggggtggagtcagcttttacttccttatttgtccccgcccatgtcctgctgattggtccattt

SEQ ID NO: 1241881 - DNA, 4001 bp, Homo sapiens
cacatacacagcagccccgcaatgaattgattttttttctcatcaacattataacgaaacgatgttataccaggacctgctctatattgtgtgaactctgtaaaggtaagggctatgccatttatttttgtatgcccatgatctaatacgagatataacactattatgccctgtttgttgaattcatctgaactttcttctcttgctcttaaaaatagtgaattacactatctcagttaaatatcccaaattgagctaagactgcccccacttcctcccagacctgctcctcccacagtcttcctctttctcaaataaatggcaatcccattcttcagttacccaagccaaaaatcttagtgccaactttgatgcccttctcatacccctcagtcagtcagcaagtcctactggttctaccttcaaaatatatacagaaatcaaccacttatcatcatctccactgttttccacctggctcaactcacttttgagctgaattatttcaataacctcttaactggtgtcccttgcttccatcctttgctgcctttagtgtattcaacactacagccaaagtgaccccatttaaacccaagtcagattatgtctttcctttgctcaaaaccttccaatgacttttgattacaactagagtaaaagctaagtccttacaatctgcatcttcaccatttttacataatatccttttactcttctagttaattctgctccagtgacaatggccttggacatgccaggtgcaacttcctcccctagctctcaccctcagcctttgtactctcctcagatatagaacctctagcttttgagattccttcaagtcttgaccaaagtgacatctcctcagtgagactccagtgttcaagttaaattgcaccaatccccacccccaatattcactacacccagttgctttattattttttttagtactgaccacatctccacctaacagtttgtctttattgtctgactcccccaccttcatcccatgccagaacttaagcttcatgagggttgagatttttgtgtctgtatatttgctgcactcagagcttagccaaaaaaatacttgttacatgaatgaaagagcccatgacatagcacttatctaggtattgcgggcaccacagtgaaaacacatacagatttccaacctagaactgcaatatagtttttttaatacaaggaaaagccgcaaacatgcagaaaaaggcttttagatctctatgttattggcataatttagatctctatgatattggctaaaggctttcagatctctgtgctattggcatagcacctgccatttgttgagcgcttatttggaagcagttacttaacaaatactttgaattcccccagaaccacgtaaggcagcattaacatcagcattttccatacaaacgatttgcccaaggtcaaacaactagcaggtggctgagctgagttacaaacagacaacattgcaacttccaaactctttgttccgctggggtcccgcagccttcttcgctttgaagctggatgcggcaggattcgcacgtgccctcagtccactgcgttttcacctccacctccggcattctactccaaaaggaaggaggctccggtggggtctgttctgacggtgccgatctccccctcgactgctccgagcggagccttctattacctaccaggccgtgtcctctcaggcccagcccccagcagctttctcccgtacctacctcagagcacccccttccttcttcaccgccgccatcctgcattcctggctcaggtcctcgtcctgctgcaggcctttcctctgggccacagaccgcctgggctttcttccgcaacctgccctcggagctacagaagcgaccaaggcacgtacacgactccctaacaaaccggccacctcaagcccacacccctagccgccaagtttcaaatttaacggtcccgcgcggtcgacgtggccacgcccctccgctcctccgtgctctcgcgtctcgcccaaggcattctggggcttgtagtttatgcctgtttagtccgcgaactcgcggtgcataatgggaattgtagtttttgggattcaatggccgtggaagtgcagcaggcttaggcaaaacaaatacccccaggtgctgtcttgagtcgcggctcgaagccgagtctctgagccgagcgaggaacacttaaagcaccagaacttctttgctgttttgagtgttgggagatgtctctgagtgcttgcacttggcgtgactcttgtagggtgactacccctgctgtctgccccaaatctcacccgtccggagttcttaggccactgacctagctgtttcctgccccacccttgaattcaaaaagctggattctagttctgtaaaatcataccaaatgtgcaaccttaggcaagctacataatctttctgaccatcagttttcctcatctataaagtgatgatactgtcttgctttctcttctgctcagtccacaagcagtaaacacagccatgctatggttcccaaggtgttacctcttttccccttcaggggactagccttgactgacattaaactgtttgttgcaatttcaattttctgaggaagaaattgtgatagctcagatgtgaccaggggagtagagtctttttgtttgtttggttggttggttttgttttagagacagggtcttcttcttgctctgttgcccaggctggagtgcagtagccccatcatggggctactgcattccagcctccaactcccggggtcaagtgatcctcccacctcagcctccgcagtagctgcgattacaggcattagccaccttgaggaaggaacagggtcatttaagaaagcccaggtacaggggagttctcctttatgactgtggggatggtcagagaggtggcacttcccagaggcagatgctgaggatactgtccactaccctctggttcttagttcccagctttctgtctttgttcatgttatataagtccttctttcctctgaatcatcaggactcttgattccaaagaagtagaaatccaacttaaatcggcctactcagaaaagggaatttactgtcttttatatataaaagacttcagataaagcttaacccaggactcatgtggactgggcctctctccatttctcgcctctactcttgttgttggcttattgtcattctccattgggtaacagattcacgactttatccttacaggttcaaattcagacttaggagtcaccctgcttaaccccttcctcccaaacagtcactggggatagtggattcagggctttgattgttcagaaccaagtcatgtgtttcaccttgggactgagagaggggaaggggtgattcctcataggaaattttggttactctttacatcaaagtcctccacatccaggaagctttcctggatcatatgaggtgtggtgcgtgggattctctcactggctcattttatctcttaccttatgtcagtactggcctagcacttcattttctttcaacagggtgtcctgttcatatctacagcttctcaattttgactatttcctacaaacaatcttggaaacgtagtgtttggtcttttgatctcagtctttcctataacctagtcggattccccataaactctgctacgatgtagaatgcattcaggctaaaccccttgcttgtttcactacgggaaaagaaggaggtaggtaaaacaaaactccaaaatgtatgacagaaggtactctgtggtttaatttggaaaatgagtttttagggatgtcccatgaactgatgggtggagctcccagcaagcaaggtttgcctttgaggaagaggaatgctgaaagcagcagggtttgtctgtggacttgggggaactggagtgagtggggcacaggatatccaccttggattgtgaccctttgttggcctggtcccaaggacttacggttttgtggag

SEQ ID NO: 1241882 - DNA, 4001 bp, Homo sapiens
tcacatggatttactcattatcctagaaattcaacattcattgaaaaatttgtcgattaccaactaaggggcattttacttatttacatattaactcatttatttctttatttgtaaaatgcaggtaaacatgatttagggcagactgtttatgtttctaaaatcttagaagaatttaaaacattgcaaattgtttttaaaaactgttattttccaaatggtaactcagttatgaaatttttttcttgcttaacatatactcacaccaagttcaacagaattttgaaaacaatgtctgaatttaaagttaccggtctcaataaacatacgtgtgcatgtgtctttatagcagcatgttttataatcctttgggtatatacccagtaatgggatgtctgggtcaaatggtatttctagttctagatccctgaggaattgccacactgacttccacaatggttgaactagtttacagtcccaccaactgcggcactattcacaatagcaaagacttggaaccaacctaaatgtccaacaacgatagactggattaagaaaatgtggcacatatacaccatggaatactatgcagccataaaaaatgatgagttcatgtcctttgtagggacatggatgaagctggaaaccatcattctgagcaaactatcgcagggacagaaaaccaaacaccgcatattctcactcataggtgggaattgaacaatggagaacacatggacacaggaaggggaacatcgcacactggggcctgttgtggggtggggggaggggagagggatagcattaggagatatacctaatgttaaatgacgagttaatgggtgcagcacaccaacatagcatatgtatacatatgtaacaaacctgcacgttgtgcacatgtaccctaaaacttaaagtgtaataaaaaaaaaaaaagttaccggtctcaagagattctgttttagtcttctacttctctgtatgagaagtttccccttgtctctcttctctaagaagtctttcatgagctcctaaacagaaaatcaacaaaagtagccctgaataatatagatgttagtattaataacttttaggtcagaagctcttccaagttgaaaaagcaaaatttgagtacaaaaaaagagatgtgagcataattggaatgatggaacgtttttagcactactttaatatttttactacattatagaatgtttagaaaaatgagaaaggcaaaacaaagaaaaagaaacatcaccagtaattactccagccagataccatcctaaatgacatttggaggccatgtctcccctgctggggtttcccttgaccgtatgatgactgacactagaaagttcacccctccccaatctgacccgtatacgaatggctcaaagccttgttaagaccacccttgggagaatacgaggcagtgagtgagtacaacgtcaataaaaggaatactcagggtcatttaagagggcaagcgtggcagggttggagtggggagggatattatttctacctagaacctgtgtcctcacctggcccgcagcctgagactgtaagactctaaggaatacgggggacttagtggggctctagactaagcgggagacacaggccaggggcttgagagtcaaggcatctgactttgggaggccaagggacccagagaaagaaaagtcagggtgctcggagtagaggtcagtgagacctgggtttgcagttcggcaggtgagattccttgggagtttagagaagtgggggattttagaggtattcgctgtatgctgggagagagaggaggcttgaggcgctcaaagtaggagactgaacttagagcagggtctgggagttcctgagctgcgggtctgcgcctggccacaccctgcgtacctcctccaggtagacatcctcattccagttgcctatccggactcccggaccatacacgttctgcgccatcgctccctgctgttcagcaagtgggcctccctccgacaccatgcgttagcgtggcgcgtcgccatgacgacccggccccaggcgattggtcaaggtctgggaccctgctggccaataagcgacagcgcgcaccctcgccctggggcgggagatggggcgtctgggtcagcggctgtctgtggccctccagcccgccccacttccacctcttagatttccttaactgcagggtgggcgagagggaaaaccctggctgacaaagtgcttccgagagagaaatttaaagctttctttctattagaatctaaccgaaaagtgctatcgagtaccccttgcttgtcgaggcaacaaagaggagcttttaaatggaagcacggcttgcttgcagcctattttttgtaatcagcagcagcagcagcagcagcagcagcagcaatttcgccctaatcataaaacaatacctgctcaatgtacacatttggaaaccaaaatcgcatagaaagaagaaaggaaaattaataatttcagggccttaaaagtaagaaatataccatgttagtatatttctgtttataggtttctgaggttgtccatatttttgcggacttgacagcatcctccctccctccctcccttgctccctccttccctgggtctcaaagttaaaggacgaacctgtgatttgcaggaactcttaagaaaaccagactctgctgtagccagcattaataaaacaaaatattattttctggggaggggagggataccagttactgtaggactaccggaggcttgatgcagattgaatgcattcagtaatttacctctatttagtgtctagtaagacatgactgaaatggaagacaggagcctccgctcccttcagcaaacccagtctaaaagaaaagatagttcatgaaaacgaattacttaaggaagactgtggaaaaatgcaattaaagatgtgctgatgggctggcgtggtggctcaagcctataatccagcactttgggaagccgaggcaggaggatcacttgagcccaggagttctagaccagcctgggcaacatagtgagaccccatctccaatttaaaaaaaaatacatatatatatatatatatatatatatatatatatatatatatatatatgctgatgaagggccatggagttgaaggatcctttctgtcttgaggaactgtgagaatgggaattggatggcctttgagtgatgggagaggggctgctttggagctgaactgggaaggatttgaactggcaggctgaagtgtagaataaaaataggaacattcccacattctgatgaatccaccagctctgtcaatatatcaccacattcgaggatacttctgaaggacacataggacaaagcagttagatcagatagtataccactaactgcatttgataaattcagaaactgagactcaaagaagctagcagtctaaattcaaactgctaaaagttgctcaaagaaaggactcagtccaaactttccgactccaaagtcatgtttgtttgtttttccttttaagtatttttcatattcctcataaaatcaagaataaaacaaagcagctctagtctctacatttttaacaaggttctaatgattgggtcattcagtaagtccttacactgatacagctttgctcccacctacttccttagtgctatttttgacaagtatattacatttctatatataatagacccaataatacaattatacatagtgttttatacaattgctttaaatcactcaggagaagaaatatctttattggtgctctatggtatttttctatgaacacaaattactgctttgtgttgttttcaacctgaataacttccttccatatttcttataaatcaggtctgctagcaacacattctcttggtttttgcttaccttaataagatgctttttctggatacatgattctttgttgatagcgtttttttctttctttcaatattttaaatatgccatcctactacctc

SEQ ID NO: 1241883 - DNA, 4001 bp, Homo sapiens
gagagactggattacgagccacggctggtacggatggattccttcctcccattaaggcactcacaggcaagtgtgatagacaatgttgctctgatgactggcagtgagaccagaagatagtgtgaagggcagcaaggagggtagggtgggatgcgataatggaaaatgggagtgattcattctacttaatgcatatacgttttatgggtttaaatctggagggaaacaactttttaaactcaactccttgtgtgtgagaattaaatggaagcacatcttggaccccactttttataggtttagtgccacctcaaaaaattccatactgatccattctgaaacaactgcttttcttactggaaagccacaaagttggtgcagaatctatgaaatggaaaattagacccaagccaacatgctcatgcataagcttgattttaatgaaaaggtacacggagcagccgcacctggaggaaaagccccctcagggctccccacctccagtatccccatgtgcttgagtttgcatccttaccctgtccctgactgtgtgaccttgggcaagttagttaacctttctaagtcctggcttgttcatcttcaacatggacatagcaggtttgctgtgaggactaaatgagctcatacacaaatagttttagctcagtacctggtacatatgaacatttaagaaacatgtccttctcgtgattagatgtgacactctgaccattttagaagcaattacggttcagctatcatatcccaacatcttgtgataaccattttcattttttgcttctagctcttactattcttttcatcacaatattttagggtggaggtatttgggggaggaggtaagcagttatatacatcccattttcccactgttgttcaaagcaaggtgaaaagccagggaaataaacacatgcactgaagagaaattcagtctttaggatatgatgtgataggtgtatggaatataaacaaatcatataatttcaacctctcacatatagggcatcaaatcataggtaggtcttattttaaaagaaaagccaagcagcattaaagaggatagagggaacccatatgggcctattgctagctcagtattggtgactgtgaaacagggatgggtgagctagattacgggggtgtttcatggggtctgacttccaacaggtggctagctttagtcatgttcagatgcaaaaccgtaatgagtttgagtatgcaagtcccagggattctgttgaaggccatcttttctcggccatcaagggagacaattttctaggtttaagcctccctggcaagttagcaagcagggaactgcctgccctagcttgcacctgtcccctgaaggggattctggcctgacggtgaagacccaccatcccttccagacagcccattctgccgctggggcacctcccgacaaacgggggaagcccactaggaagtggtcacgaccaaccaagccacaaatcctcagggtgtgggatttccacctctataccacgtctgaaaaccgaaaataggcgcccgcttgccatactgcaatgggattccccccagcagcaacccccccctccagcttgcatgttttattaataaatgcaagatggcacacggaggcaaagaatgggaggtaaggcatctgcagctggacccgaaccagggcagtttgcaaaaataaataagaagcatgtgacaagaagcaggtctccaggctggagctgaagccctgggctgccccacgcaccctcgcctggctcccccggccagggggatgaaggtcagcggcaagatcccagcccttccgagcacgcatcctgcaaaccttgaccggtccccccaccccccgccccgaccacaagactcgggcagtgaggcaggggaagctctggccgcggccggctgcgaggacacatacctgctgcccgggctcgggattcgctcggctctgcagcggcgccggccgcggctcgcgctcccggggctcccctctccgcccccccgccccctcgcggccccgccgctccctccgcccctccgcccaccgcgctcgggggcgcgcgcgaggcctcgcgccggcggcttggccgagcccgcgcctgcgccctcgcctcccgccggccgcgcgcgcgcgcccccgaggctgcggaacggcggcgcggctgtctaggaaaccgcggcgtcggctggcaggggctggcggcctgagctgggcagggggcggaggcgggggctcggctgtctccggggctgccacgcagagcgggcttcgtggcgtgggtgagggggtcgcggggcagggtcggggcctgagtgcgagcgtgtggagaggcgagggggccgcgaagggtgggtttgacggggacgcaggcggggcgcagaagcaacaagtgcggaggccgagggcgtcgctcggggaagcggaggacccccgcgggatttcgtacagctgagaatgggaacctcccgtcgctttggcgcagcgctttgcagtttccagagctctttcccagttgctccgtttcatccgcgcggggcgcccggtgagggagcggatggcacgcagtgcccgctgcgcttggaggccaccgaggggaaaacacctctttctgtgtggccggagtcatagcacggtcagagtgccttgactctcagttggctgcctgggagaaaaatacctgtcagtacattcatttgatggcctcagctcaggacccttgtaggaccgtgtttctcctctttttccgtttttcgttatctgactcttaaaaaggctttttacacgtccccatctcctttccccgtgaaatcccagtaccgcagatacactgtcgacctgcttatgtgctgtatgtgttatccgtgcttgatgcataaaaagtaacattgcgccccttggaggcagcatcgccccggtggagaagcctgtcctagggccatgattgccagttaccgggtgggttaaacggaaccactgagcaatctggatgcacccacagatattctctgtggttaaaaaaaaagtcctcacccataatgggtactactctaattaatgtttgcaagggctgctgtgaatacggccatttaagcagcttctggattcatagtagcttattatcgtttgtcttctccaccaattcttgctaaaaatatagccattttcctatagggtgttgcgatttttatcttaaaatatttgaaaagatgggaaacccttgtttctaggacacggagtttcagaatggcttttggctctgcagataggtttgatttctgattcttgtacctcttctaaagtgtttttatttgattaggtccagttggcctcccaggaatgtcctttgtcttttcttcctgccgtagcttttttagtatggataaaatgaaaatggtagagttgaaggacttcaaaaccacctcttggaattgccccacggtcttggactaccttccctggattatacgggaatatctatacagggagtatctacttttggcaaactgagaaaaaaatgtaaaatttcttcagatcctccttcgcctttcagcatttcctactcatctctaatctctaatggtggaatttcagaggaagaaacacttggagatgatacttgtggaagctacctgggttgccaaaggatttttctacatttctagacggaagaaatgtggactagaatagagaaagtggagatgggttaagaaaaattaatggaggatgcacgggaggggagctatagttttctgacagtcagtgacagcattttaactaggtacactttctttagaaaaagctttggcatagcttgcccagattgttatccactccattttccaccttagtagaactctacttaagatttgattgaaactattgagaagcatccagttataacgctaattaactctcagagtacgacaagtattttgaaacttgctgagagaaatttgaagaccacttcaaatttcta

SEQ ID NO: 1241884 - DNA, 4001 bp, Homo sapiens
tacctgaaagctgcagttaggatcatagtgatagaacagaccacacccctaaattaatgtcagcacctcatttaatgttggcatggctttgtctttctgcaacaccctgagtcgagtagctagctaccttccattagctgagtgtctgccgtgtgtcagccactgcactgagcactttgactagactgctccttcctccatcaccccctctgaagctggtgttatttatccccattttatgaccttcatcagcttcagtggctgcagatcaaggtcaagcttagaggcttcctgcaccactctggaacctgagggcttcagtttaaattcctgctcaaccatttcccagttttttggccttggggaagtttatcaacctcttggttcagtttcctcctctgcagagtgagaataataataatgtcaacctcaaatgggtagctatgagaattaaatgatctagcccatgtaaagcgtctagttagtgctcagtgaacatttcctgttcttttctggtcctcagaccctctttctgtttctgtcatcctctggcccttcactgtgtacctctcagaggctattcaaggtgatggtttgctcattaccagtcctggctgactctcataagatgcctcttctggtgcctctctatgcttccgcaattgaatttgcaatctgtacacacatcagctacacagaatatctgctttgggtcgaggatgtgtctgtggaaaacaagagaggaaagccagtcacccaaagtagctgccacagaaacagcagtgcagtgaggctctggtgtcttgcccagtggtctaaacgcccaaatcggccacctggcccctagtttcttgcctggagaacctgggagcaggggtgatatgcaaagtatttaccaatacagagggcccctgaccaatcagaatggaccttggccacagtgctggagcacagggcacagggggtgctcagagctgtggctcttgaccacctggcaaggaagcatttgaacaattgacattgctatacaggtgtgctctgggtctgtatctgctttgccagtgggaagagccagggtggagcagtagcctgtgaggagtctgggctataggaaggtgagttctgtcttcctgtcactcctgagtgcaggctcaccttatgacaagatggttgaaggttggtagaattaagtggccttcagggcttttgagctgagatggtgttaacaatgttggcttcagcatcaaaccatccactcgtgagctttggcatcttaaatgagtctttaatttctgataaacttggttgtttgatctgtaaaatgggtgcaacaccccaacaagggctagtatagaaagcatctcacacagggtccagacacatggcctcgccgagaaagggggagccgttccttctcctcttggggaagtcttggtgttcttcctattaggtgggaccccttccccactctgggggtcagccgggtgcaagtcttcctttgaagcatccacacttgttcttttgttcatgcagcaggagtttattaagtgcctactctgtgccaagcacagttctagtggtcaggaatgcctcggtgaacatgccagacaaggcccctctcctcacagaacatgaaggggaggcagagaacatggtagacaggcctttcctcccactgcaagcatgcagtaatccggagacctggatgccactaacacaacggcagtggcaaaaaaacccaccagacaaaaccgagcccagcctggaatcaggaaaggaaactctcagaagccagaagcaaaagaaagacctcacaccaggggcctgagaggggctgccatggaagcggtcacagaaattcaggaactgagtctgggtcagtggttcccagctggggctacacctctgtgtgacctggtgagcttcaggagatgcccgggccataccccagaccaaggaatcagattccctgaaggccagacctaggtttcaggaggttttaaagctcctccagtggttccaatgtccagctgagctcataaaggtctttggggtggggctagggggtggagttctaaagcctgcacaagccaggaaagagcctcctgggtaaggcaaggctcatgaaattctctgagtgggtcaaatggggactggaaaaattccacccactagctcagctaatgggtaaaaatgctggacatttatctggagctgcagggggtaaagtgtcatccttgggaaattcaaagctggcctgtacctgctgagagcaccagggatatggtcacattgcaagcctgttgccagcaccccaggcagagtcatcaacaattactttggaggagggccacttccaccttccagggcataggtgacccctgtggaaaacaagtacccctggaacatcctagaagtggaggtggaccataaactagtgagcagatatgtcattgtttctcagttctgaccgtgagccaggaagatgtccgtgatcagcttccagagatgtttaaacttgtgtggagtgtggcctgagcactgggatcttttaggagggtccttggggttgagaactacaaaataaatgagataatttagtttatgaagaccacctagcaggataatgtgtcgtgtaatagaaagtaattagctgagggagacaaggagcaggctccccaggaggtgacattcaatttgaagcatgaaagatgagacagagagggaaggcaaggagctgggaagcagatttccaggcagagggcgcaacaagtgcaaaggccctgacactagaataacagggagccagagggaggagggctcaaggtcttgtaagccatggtaagatgcttggaattttcttgcaaggatgaaggaaagccactgagggtttaagcagggcaatggtgtgatctgatgttggacaagcagaatcctgaaaactcacagctgcatacatttcacttgctttataccactgagcatccccactccctctacccaatttctctatctaccttgtcctgtatttgcatttttgcaataactgcataaaggaggtcggtaggtgtcttctccattttacagatggaaaaataccagagccaagtctcattcatgccctctaggttcttgagtggcaggctttcagatcatctggtactccttccagagctcctgaccagagatggggcatttgtgaacacaagatacagccaagcaacctgtcccgctgttgttattacagtgagttatattcttgcccacctaggccactggaatgagaatgcagtaaaacagcttgcctcagagtggtcttccctggaacacacagcttctgttaagcattcatgattctgacgggccagtcatcccttcattgactttgtccagcagctccaccattacagtctcattttagaaaataaagacacttggaaacaaattgaaagggcgttttcctgcaccaaccccatttgacttgcctcagcatgctgaatggagggctgcactccccccatgactgcctggacccatcactctagggtccatgtgggttgcatggcagtcctccactttttggccattggatcctcattttctattaattccttaagggatggccgctcatagctggttctgggtcagttttggagaatgcttttaaatatttaaaaatgttgtcatgactggagaacttgaggtctttgttggcatggttcttggaagcccacagtagccccatttcccatcccccaggttctagggaaaggtggctgaggaaatggtgaggaagactgagaaaggccacaagggacctttagtgctctttgttgggtggttctattgggctttggctgcagacagctaggacgattctagagaaactatgatctggggctggatggctcagtggactatatatggaaattgccctgtcacctggattgctaagaacagaaattacattacccccatcataaagccccaaacaactaaga

SEQ ID NO: 1241885 - DNA, 4001 bp, Homo sapiens; identical to SEQ ID NO: 1241858

SEQ ID NO: 1241886 - DNA, 4001 bp, Homo sapiens
tatcgaggggtgaaagcccccatctcactccacagcaatgctgtgagaaggaactgtagggttttgaagtgtggatcctccccacctccacccttgggacactctgggttaagtactgactttggtctcacctcccccacatgcttcttggggtctgctgggtccccacccccaccccaggagtccctctctcctgggtctcagcccatggaataccctttgctctggagacttcttgaggcccctatctgggacccagtcaatagacaggaaaccacctgggaccctcaggagtctttgtgggaggggtggcggcttcagggagccaacagagaactcttaggggtgtgggaatgacctgatctcctgccagtaggaggtggaaagcccaggatacactctctcaagggagacgactcctccactcaagacagttgccaaaatgtaggtgcctccttccctgacccatactgaggcaagcaagctctcggaaagggcaggtgcccagggagcaggctcagatcatccttgagaggcagctctgttgatcctctctgccaagctccaacgtcactcagccagcacccaggccagggtcccggagaagagcccaccaccgcagcaccgcccctgccttacgcagtgggaaaggaaacagctctctgttcccactttcaccttctaggggcctcgggatggccgatggcaaagaccaggaagaagagcgcgattcctgcccaattgtggccagcatctggattctcccggagggctggatcgggcctcgccgagtgttctcccatctcccaccttccctacctgaggctctgggctctccagacgctacaacccaacctggggcagcccaaagtctccagtggaggggaaagcgaacgggatcggtctctatcccctttcccctacccgccctgaacataactcgggtgcctagggcccacagccgatttcgcttagaggctgccgccgcacccgacctggcgggcttccgggtgtccccaagcccctcccggcggcgccgagacgcacgtgcatccagcaggctgacacacaggccgccgccacgcatgcaaacccgtgcctgcacgtacgtgcatggcccacatctgcacacacgccattccagaactgcgctctcccctcgctcgggccccgggcatacgtgtgcacgcaggcaggcccgcgcacccagccccacaccgacgcccgcggaccggcgggaggtcccggaacaggggcggcccggcgacagggtccgggcagcctccgcctcagggcgatcctgccagcctgggctgaggccagaggggtgagtcaagaggtggcgagaaaaccgcagggccgtcccatcccagcagggcgcgtccagggccccgcggtgcctcagcgcccggcgcccccaggcccagccctccagtgcccccttgtccccatacctcctcctcaacgccatcccccagcaatccacgtgacagggtcctgcgggaggccggagggctcggcctgagttccttctcgccagattaggcgcctgttctccgccggagacccagagcgctaccaggtcccgggagcctcgaagtccggggaaagtcggagcagcagcgccacccctgccccgcagcccgttcgcggggggccggcggcagccagaagccgcagcccctcggcccaggcgcggctccctcagtccccgggccggccggtaggggcgccctggggcagcgccacccgccccttctccacgcgccgcccgcaaactcggcccaagtttccgcgcccgccgagcgggcgagctcctacctgcagagcgccaggactcccgccgccgctaccccaggcggcctccgcgtccgcatcctccagcgtctctcaggccgcgggtcctagtccgaccgggccctgcgcgggaagtcgcagtgagcaccaagcccggagcaaccctcctagctgccgttcgcgccgccgctgggcgccgtctgcggtcccgggcggggcgggctgggggcggggcgggggcggggcgactcgcagggttggggaagagcccggccccgcctctgggagcctgcgctcctgtgggcagcgggtgcggagggcccgcgtggggccagctcgctaggagcgggctgcgggcgctgtgcaccgcccgtaaccgccacgctccacgaaccagtgcccggcgggcccgtcacgcgccctcagtcgctcccttagatcgttcattcactgccacttgctgcgatgtgaccttgcgcctgccgcttgacctcgctgagcttcagtttccttatttgcaaaagtggaattctgtcttcctcatagcggtggcggtgtaagcttggaaaagggtgtttgcaaatatctggcacacagtaggtgccggcattcccctgtccagcactagtgtattagggggctggagaagggctccttgatctgtcccctcatttcgttgtagtcaatgagggcaatttccagactcctgctagggcacggcaactgtctgaggaagcggcaatctccccatccctggaagggccgggaatgagggtgctgggggatttgcaaagtagcctgggtgaggctccctccatgaggcagaccggcgcgcagcctgtgaggcgggtggagtggagcacgcccagccaggaatggtgtgttgcaaagagaggctggaggggggaaggggtgcctctccctggaccatctgactgtggatgagagcccctcagtgctgctactttatctgaaggaatctggtccgtcaaagctcctgggctgcccgaggactgggaacaggtgtgtgcagtggggaaggggagggcaggtggacatgccaaaggtcagagtcagttcaggaagcaaaactatcccctcagatcccaaaggtaagttctgcctgagtcagagcagagcaggcctgaggctgcaggttccaagaatcaccaagcagctggagcagctggagctgaggaggaggggctgggcgctgcaggtaggaagaggaagtgaggtcacctggggagcgggggcgggaggtggggggagagtgtcacttcatttagagctggaaggaccttagaaatagagtcgggaaccatatagggagagacactcagagagggttggggctttccccaggtcactcagcaggctgggacaaaatcccagatctcctggctcccagcctggggcccttcctgcagccacaccttagcgtcaggaaaatacatctgcgcgcggacagctaggggtcacaccaaacatcatacccttaaccccagcctgcagccccgtgggtcacaggctattcactgctcttgccccttaccaactctgctcgcccctcctcctccagcaccgcgccggcgaccctgtccctgccctgctagtggggtggaaggagggctgtgttcttagcccttggggtctaggacgctcaggttgtgtgctcagatgtgcccagtggtctctccaatttccctgagttggaatgggacccaaccaggccaggatgagcagccatctgagacaataggggctagttaagatttgcagcactgctgagccttgtgttaattcagggacacctcacacagacagcagccccactcaacagtatgtctgttccttttcggcatcacttaaacaccctggactgccaaagaaaggaggcaacactgggggacttgggagctactttgtaactttctgagcctcaaatttcctcattgcaaaaagagagcagtgagagacctgccttagcaactgtggtgtcggccaacatcagtgtgggaaattgcttgtaaactctaggaagctcatagagtgtccccagactatgagctcctgaaggctctgaccttgccattttcctccctataccaatggtcgtctgtggagcctatagagaatgaaggcaatcaatacaagataactgccttgggagctccacatgtttttatcaggactgtggtctt

SEQ ID NO: 1241887 - DNA, 4001 bp, Homo sapiens
gagctagtcaggagccctgtctgcctggcctcctccttgcccaaagctgattcctgaggcacctccagcactccagagaatagcctgaaagcctctaacttagtccaacgatctcatctgacagatgaaaaaactggacccatgaatgttttatactgttttgatttaaaacaaattcgcacaggaactgatcacgggtctcagatctcaagttttctccctctccttaggccagtgatcattaaactacactaaaatgtctcttctttctctggccaatgtctccagttttggaacaggacaaactaagaataatccagactacacacaagtttccataactgtcctttctaaaatactgtatttttaaagaggaaaatatacaatggttttcgtgtaacttggcatgatttaaagatatattcactttaagacacctttacattagaatctagaattttaaaatggagaagcctctaactgcagatgtgaaaaatcaactgtcatagaataagctttcagctaaccaaagcaaaggagggctgtaggagacacctgattcacacttgaatcccaccccagtgtccaggtatacctgttacagcattttgtttggagccaggttttgcatggatggctatggtgacgcatcctttaggatcaactgccacaggacctaagggaggaagtggtctctctggttccttgctctggcttttaccctaaaatgacaaccacacaactttacaggttacaaaatattttcccacacatttaatttgattcttccactaccccctttcacccttaacagacaaactaggctcatcagtggtgtccagggacttctggccacctagaaagcttttcccacaaccttcaaggctctactcaattttcccacgaagggttcccatcaacccaacagtgttttttccccccttgcaagaaaacctaactctggcttctaaaccttaatgcttgctcctccctctgctttgtatttccaattccttgggggcagggatcatttattattcatcattgtatctcatgcagtcggagctaataaatgttggtgaaagtgtgtatgtctgcatgttgcgggaaagggaggaaaaaaaaatagtgcttgatatttaaaggcctgttatgggacaggggctgtgctaggaactttcgttcaacaaatatgtaggcaatggatatgtaaagatgaaaaggtacatggtccttgctctcaaggagctcggactgctgcgagggagaaagaacatacaaaattataatacactgtgctaagtgcaccgatgagataggcacagaacattaccccacaggcaaatcagcattggggcactggagaatgctgccagcaggaggcagtgcttgagctgagtctgagaaacggactggggttggccaaacaaagatggtggaaatgggagtgctgtattcttgacagaaggggtgcgatcagccaaagcaagggaggagaaagcagaatacagcctcctggggaaacgcaggtcatgccgctgcgggaacatgaattgctggactgggagtgcgggtaggaggccaaaggtcagcacacgcagcccaaggagagctcggctgccgccgggcccagcgctcagaaatcaccaggtggacggcagcgcagcctactgaggcggggcgacggcagcaggccgcagctctgggggtggcggcggctgtcctgagccccggaactgagagacggcaagccgctggcagtgcctccactcactcccgggccccgcttctcccgcgctcttcaacaagtacccctgaggcccacccctctgccgccacgggacctgctactggccttggtcgtcgcaccagccttcttaggcatctcggcgcaaagaagccgagcggagccccgagtattgggtgttgcccgaaggtgcctcagcccgctgcggagccgcagcatccccgcctgggaaggcgccggaagagccctctgcgcttgcgcaggtagccggcaggagcggccccaccgcccggcgcatccgctctggccagagggcgacaccttaaggccggcgggagcgagtctcgtggccgcagaacatgcgcgagtctcttttgttctggaacgggccgagccccaggaagtggagctgcggagctgaggcctcaccgtgtcttggcccaccctgctcagctgataggaaggtgtgtcacctctttcctaatcggggaaagaaaggtattgtcacttctcagaattggagagcgcggcaaggagtgcacagggccaggtgtcttctcgctcccacagccaagcagcagatgcagagtcccacgcgctgcctgtggccatcaagtcgatatagagcctcgtggcggcttggcccttgtgaatcttccacgtatcgatggcgcacctaccttgtgccaggcgcagcggatcccacaatgtaaaagaagaggaaatacactgcgacatgtgatatggagagacatgaaacaaatcagcagaggcaagatcatggagtcactgaaggctttcaagcaagggattattagcagcccaatttgctgggttttagaaagacaccggctgcactgtggccgacagaggaaaagccagagacagggagatccgccccctaaatgggagagggtggcctgaactagagtaaccgcagggagggtggagcgctgatcatttcaaggatcttcaggaactgaaatgatcagaacttgggaatgactgcatgtgcgaataagggggaaaagtcaaggaaatgcccaggtttggggcccaaggaacaggtttgggaggccgaggtgaggagttcagctttggacataatgagtttgagatgcccacaggacatccaaatacaaatgttaaaggggtaactgaatatatgtgactggagtttgcgaaatcaaggctggtgatagagattctggaatcttctgaaagcagatggcaattgaagctatggaaatggatgagagagtgtgtaaagagcacgagggcccaggttagaacagcaagggcaggtagagaagtcaccaaaggacactgaccaggtaggagtacggtgtaacggcagctaaagaagggcgcttcaagagggaacatcaacagtgatgaacactctggagagaacatgtcacatgtaacgactgagaagtggccacaagatttagaaatcagggtggtggtggtgacccgggctacagcagttttagtggagagaaggaaatggagataattgtagagaataatccagtgacttcactgtgaaggagcaattggtatctggaggggcacatgacattcagagacttatttttatcatatttgaagattggtaggaaagagccaggagaagagaggttacagcagaggacggttcctgaagaggtaggatctgagctcaagtagagattgagttctctacaggaggccttagacactccttccttcctaagggaaagcttaggtggacatgtagctgtgtttgtaggtttggtgatgggaggtggaatttctttcattaactaaggcgggggaggtgttgaaggtatattgggactcttgagaatggcaaagggctgactattgcaactcacccagcggtagacagttaagggagaccgtgaaatcatctatgatcccaatctatagttaccttattttatttttgtttatttttgagacagggggatgggaagagcctgtcgcccaggctggagtgcagtggcgggatctcggctcactgcaacctccgcctcctaggttcaagcaattctccctgcctcagcctccagagtagctgggactacaggcgcgcgccaccacacccattttttgtatttttagtagagacgggcgtttcgccatttcgcccaggctggtctcgaactcctgagctcaggcaatccacccacttcggcctcccaaagtgctaggattacaggcgtgagctagcgcctggcctatagtt

SEQ ID NO: 1241888 - DNA, 4001 bp, Homo sapiens
acccagccctaaatagctctttaatcccttcttttgcggattagtagttcagctctctctaaataaagtttcctgtggaaggagagttgttatttattccctgtatggcatttgggagaagtgaaaaagatttgagtatatcatgaataagaaagaaaagagcataagagaatacaccagacagaagggaggcttttgtaagtgttgattaaagtaacagacacttacttattatagagaagacaaggtatttgctagagaaaagaacgaaaaagagaaaaagagggagaggaagagaaaaaaaagcaaaattacaagtgattgcatacatagtgagaggagaatatcaaaatgtatgctctttcttaaaactgcccagaaaaatctacctattcccttggctgaccagtcttcacccatttcactgttcatgtgcagaactggcaagagttaatgacagaaaattaaattatgtgtcaattttgttccttcttagcaagtctgataaaatactaaaggctataaagggataaatattgccctaaatcaaatctggataatattgaaaagagactccttcattttacagactaggaaaaccaagtccttcaaaaagcaaagtcataacagaacttaaacttatgcttcaatttgtactttgatacctattatccaattacctttcttttctcaagaaattacttctgtcgtgtttgttcagggactgaatacgtcaaggatggggaagctctccattaggaataaccatgctcagtgccacaaaacaaaatggtacaggtttggatttggtttttcattaggaaaaaagtaaacaaacattctctgcttttaacacaacataaatacagtgacctggttgtcctcaactggttcctcatgtaatgttggggtctcagtttccacttcattaaaatgagaaatctacataattcccaaagtcctttcttagaaagttggataattctaaaatcgctgaaaaaagaagtgtttgggggaggaagtatgaaatacacccggaatgtgtgtatgcataacatatatggagaaactttagatctggttgttcaaatggccaatgacccaagagtggaatccctgggtaccctgctctctgattggattgagaacccttgaggtcacttaattccacagttaacagtacaagccacagtcaaacagtatgaagccgctttacctctatgctcccttgtttgtttccaacggccaattgaaaagggtcctccatttgctcctttcgaatctacaattcatattcccacccatcattcattcctactatctgtcaattaacctctggtcatttatgaagcacctactatgttcacccatcacctagcacgtaccacgttttccataaatatctgttgacttgaatttaattgcaaggccttggaaggctgccatgaactcaccgttaagagttttgtgtggaaggcgagtgaaagaataaaccttttttcgccaacctcgacctcctaacgcctgacactggtgttcctccccactcatgtgtgacacgtggttcctaagcgctgcctgggcggcccaggcactgctgctgcaggcaaagggctgtgagaggggagagatggacacttacctgggaaacctctgcttcagcttcctcaggctctgcctggtaggcggcacagacactaggcactgggctatctcgtcgtactgagctttggtcagtatcatgttgggccagggaccaggaggtggcgggaacaaggaaaaaacaccctggggctcaagtagccttggtgccgagggatgaggggtaggcaaagcggcacaggcccgggtcctcgcctgcttggcttgccccaatcccccctgaaacacacccctagctgcaaaagcggggcggagactcgcccggtcccaggctccaccggcacctccgcggcggggactggctgtacaccagagtgccctagcttggcttactgagcagccgcagtggtgcgccgaaggcaactagccgccatgtcagttaagggcaaaccaaccaggaagtagcggccgcccttggaaaggcgccgcgccagagtttcagtaggcaggtaggaatccagggcatcgcccacctaggatcaaagggtcaacaagggatgctttgtactctcccaattactagaagccagggcggcctgacgcacagaccaggcggcaggtctcacgagtgccccgcgatccttcagcgtgagcccccgaaagcccctgccagagcgcgcgatttgaatacacttcctaacgcgccagtttgagcgctcctcggagcgtggactggcctgccgagaaaccatgtcttcactctaccaagtctgtcatggtccgagcaggaaaactcactagggtcgctgtaaacataatttggcttgtgttgaggaagccctacaacttctgtacatcgcgtggaaggcagttttgtccttgttgagaaacagacttgaaacaaatccgacgtcatcaaacagccggcagtaaagaatgtcacttttggccgggcgcggtggctgacgcctgtaatcccagcactttcggaggccgaggcgggcggatcacgaggtcaggagatcgagaccatcctggctaacacggtgaaaccccgtctctactaaaaatacaaaaaattagccgggcgtggtggcgggcgcctgtagtcccagctactcaggaggctgaggcaggagaatggcgtgaacccgagaggcagagcttgcagtgagccaagatcgcgccactgcactccagcctgggcgacagcgagactccgtctcaaaaaaaaaaaaaaaagtcactttcactccttgcagttagctgctcaaggtctaaaatcgcatcttattgtaaccccagttctcagaaaatagtaggcgctcaataaatgtttggagtaatgagccaatctttttttattttctatatgtattgtgaatggatctcagttctcctaaagcaatttgttgggatatcagtccctcatttaatctcttttctaaaatctgtttggttcttagaaggtcatgtgttgtgtttctcttctgatttcaacaatttaagcaaactaaagcaaaggtgcttagactttagagaacctgtaagtggtttaaaatttttcatctggaataatgcctgggttggaagttttagatatacctccttgaataaattccttaatccatcgaagcctcatttcttttgtctgtaaaactgatttaattcatggaggtgttttatttgtgtatgtttgatgtagagatggagtcttactctgtcgcccaggctggagtgcagtggctccatcgtggctcactgcaccctcgaactcctgggctccagcgatcttcccacctcagcctcccgagtagttgggactacaggcacatgccactacacctggctaattttaaaatttttctctagagatgaagtctcgctttattgaccaggctagtctcaaactcctgaccggaagtgatgctccagcctctacctcccaaagtactgggattacaggcattagccacttcgcccgggcatgggctgtttttaagattaacaggctggtacaaataaaagattatatagcgtggtgtctagaggatagtctatgtgaaatattaggttggtgcaagagcaactgcggttttggccataaataaataggctaagtaagactacttgataaaaatggacagggcgtttactaggtattgttttacaggctccccatgcacagactcgcttaatcctcataacttcctgccaggcaggtactattgctgttatcctcctcttcccttttgtacagagtgaaaaaactaagacatgaaaaggttaaggaacttctagaggtcatgaggataagtagcagtagtaagatttaaactcctgaaatttggttccagagtcagtgctcttgccaactttcagtaatgcttaattactac

SEQ ID NO: 1241889 - DNA, 4001 bp, Homo sapiens
ataggtcccattctgtagcttcttcttctgtgaacatgagagcatattctgggttttttttgttgttgttgttttttgttttttgttttttttaaagaggggtttatagtgcatgtttgcaactacatctaattggttgtcttgctgttttgtagtaaataatgtcagcattgaaactcatttaaaagaatgaatctacacactttgcctgaatttgaaaatagaacatttaaaaattataatttttaaagaaacattacagcataagaaatacataagagcactttatatcaagttggcaactaattttttttacattcattttgaactgttctgcataccaggcaaaaattactaccttaattaataagtttacaagtaaagttcaatattcaaaaatttggaagtaactaagaaaaactccactttatatcttcatgcaaaaatcctaagaatcaacagtagtataccaaaacacaaagtaatttaaaatggagtctttctatccataaatttggcaaattatgccaaaccataatattccccctctaatatttcctttcagagcagtaggtttatattcctttgccagcaggtcgaatcctcctagggagagggcttgtgagaaaagggaattaggggctaaaaatttaatccaaaacttctttaaaaaaaaaaaatgagcttttttttttcacatcaacaagatactgactctactaaatatattttttgttagcaattattttgtttgagtttccttttcaatcaactctcctagctgccagcatggtcttccctcttttttgtgtaggcaaggagttcattctttagaatacttgaggaagcagtgctcggagtatggaaactaaattttcttcattaaatctactgaagcagatattaaaaatgcatttaatatactggcaatggtcggtgggcaccgctgactgtgacaggccagttactgatgatatgccgtcagatggccttctcagcaggcgcctgggtctcaggctgctgaaggacagcaatatcttcccttgtgtgtaagctctattcatctcccaagtatttactaaatcacaggcctctgcacacatagcccacgttttcagcgtatgctaacaaatgatggatggcctcgtcaattcgttatgtcctgaaagcatggtttcctgccattccaatcatcaaacctcagtgcttcagagctgatcagtcccagggaatatattttgcaggctcgattaaaagagtagaagttctttccattagactctctggcactctcctcaactatttgttgtttcaaccaattattagggcagactattcaataggtgttcaggtactataacatgagcaggttttttcctgatgttcactaaggtgtaatttcttttatgacaaatcagtggaggtatttgaaaataaaatatttgatagagaaattcatgttttaaaacaattttccttctaggtacagtgggcaaaaccttaaaaatacattatatcatcatattattttatattatattatattatattatattatattatattatattatattataatgtaagtgtattagccaatgcacttcaaaggaacttccaaggcaatagccattctgtaaatcatctaagcctttcaagacaataattcccacacattctcttaattataatctagataaaggcacaaactgcttaaaaattctcctgacagttccaaagttagatgacaaaagttcaacttgtcaaagaaaaaaatcttcttaaaagaacatttattttcagttccaaggttacatatgtcagttgtcttttccataagccataagaacatttttttctctatagcttatctatggaacagaaaataaataaaagcacagtcataccttttactcagaaacagtaaacttcataaaaacagatgaacttaccacaactaaacagaaagctgagctttgaggaaatggggtggtattaaagagccaaacaacttgctataaataagcttcttgaaatgctaaaaaaaaaaaattttaagtgccggactcccatttagccaatagccacataggcaccaatacacctccagtcagtgtaagctccaccacactgtcctgccattcacctcaaccttaacctcaagattaagctcatttttattgcgcacaaaggtcatctgtattaggtcaaaattcaaagtcccttgtcagaaaaggttgatatattccaacctttccttctccatgcatcaaatttttcatggtaaagtcatattcagcagacagtatattcagcaatttattgtgccattgtaatacagtgcagaatacaatcgtccaaaaagctatcacatgaataaaatatttttcatgactatgaaccaaatctagactccttacacacctctaacagaggaaatacaactaaccaagtcttgtttccatgcttcagaagagttatatggcaaataattgtccctaaaatataatctatagcataattatgcttttgcttccatagtctttgggaataggcaactttttttcaaagtgtcactcaaatttttgaatggtattttttttaatgcaaaaacatctcacctgttttaatacttttattcaaatctggcctaagcagtttaactgaagtaggtctaaacctgaaaccctctctttgatctagaacctagaggaagataggctctatgatacaatgaaaactaaaggagaaaaattactgtcttgcccaattcattactattacaattatgtgattagcagaactgcaaaaataagataaattaaaagaaaactttgaaggcaccattctagaatacatcgtaattagtaaaaccaaagtcttaaggaataatcaatccattctttttaagagtttatgcaacttctttgtgtttaccacaaggtcttttcacaatcagtatgttagtatgatgaatggtttcagatcattttaaaaactctcattcagccaggcgcggtggctcaagcctgtaatcccagcactttgggaggccgaggcaggcagatcacaaggtcaggagatcgagaccatcctggctaacacagtgaaaccctgtctctaccaaaaatacaaaaaaattagccggtcgtggtggcgggcgcctgtagtcacagctactcaggaggctgaggcaggagaatgctgtgaacccaggaggtggagtctgcagtgagccgagatcacgccactgcactccagcctcagtgagagcgagactccatttcaaaaaataacaataataataacaacaaaataaaaactttcattcttcaaatttgattaatacctatattgaacactaaatcaatgttcacactgacgtgatgatctagggtatcctataaaatctccttgccctggaagacttacacctgaacttacatatttactggagtcaagctactacctgatagagaaaccctgactctaaacctggtactcactcaagtatctttcataaatgcataacccccttcttactaagttgagacaaaacagtaaaacagcttccagatatgagtggttgcatttgagaaaagtagacaagaaaatacttggaaaggggtggttttaggcaaaatattttcagttctaatatgctgagtctaactatcataaccataaataccactgcaacaagcaaccatgattaagtaatggttccaataatataaccgcagtagcaaccagtgtagtatcaggaaccgtgctaatcattttatatgtattatcttatttcaagttcataacaattccattttataaataaggactctaaggcaccaaaaactgaagaaacttaccaattaggtatcttccctctgtttttatactggaataactaccaaatgaaaatgtaacatctgagcttgagtttttctagaaataatttctgacatgataaaccctcgggtgtaccactagagcatttctaaattc

SEQ ID NO: 1241890 - DNA, 4001 bp, Homo sapiens
aaacaaagtcaggatatacacccaaggcaatctgatccaaagtccatgctttttccacttatgttaaatagatacaaaattcaaaaatatgtgactgagaacaaaataagtacagttgaatttggctgtttaacagagattagctggatttggctgtctgacagggattggctgaatgatctttgctaacctttttgcaggcacgcaggaggaagaatgaaatgacccaaagccaccgagttttttattttggcattagctaccgcagagagatagtaggcatgaaaaactgtagcattatcttctatgtaatcaaggctctgatatattctaggagaaagaaaggaaatattttaggttatgaaagaaacaagaatgtatttaacctttcaaaagaataaataaatcactggaagtagggagacgattacattgaagcatacatgtatgctgtccttttctggcaaggaaggaaaaacatatggcataagatactcttttctgggggcctatatctggcacatctcagctttacagggttggttaatcatcatatgaattaggaaacttgatctaaaacggtcgtgttcactgggcatcaacagtggattgagctagcagcctatggggcttatccatggtcattgctataaagagggatcaattaatcctgaggtgaggagtgtgcatgcagtcagagaaagcttcacatatagaaagcaacatcttttctataggtggagataagaagagcattacaagaaaaaggcatgcatgaacaataatggcagttcgggttgactgggctacggaagtcatgagaaaaactgggaaataaacaaggcaggcacagccacgatctaaatctgtaggaaatcagcagcttgggggtgggggcgggagtgaggaaaggagggtggtagggccctgatctgatgtctggtttgtaaacgaaatctgatagccatgcgaagggggatctcagggaacagattcgaggcacagtaacggcttaggaagttactctgatagtcccggcgaaaacggaattaaggtgctactaagttagtgtcagtgaggatgaagaacaattacagggatctaattcatggtattcggcctctgactgattcatggcgtagggttgttattcaaagttattcaaagttttggagaacacaggccctggcgcaggtatgaggggaaatgacaagatttgatttagacattgagtatgaggggccttcaaggcgctacatgcgggtgtagaagaggcagctggaaacacacacttggaattcaggaagaggcccgaggaccagggagaagcctgtgacactgcagcagaaaggaaaggaggttgtctatttctttccctcaaatctaggactgaaaacttgctcgttttcagtctcaccctatcgtcaatattatttatttattttttattttattgtattttattactttatttatgttttttttttttgagatggaatcttgctctgtcacccaggctggagtgcagtggtgcgatcttggctcactgcaacctccgcctcccgagttcaagcgattctcctgcttcagtcttcccagtagctgggattataggtgtccgccaccgcgcccagcctcatcaatatttattagtggactgcaacttccatccctaactcccggctcatcctaacataagaggcactgccaggtcgccctcagtacctcagcgtgtctgggtgcgaggcatcacagctgaacaagaagtcggcggctcgcgggtcactgatcgttcccccttcagccactgtggaggtaagagcacagggtgaacctatcaagcaccctggacccaaagcatcagagagaggaggatgctcccctcaccacctaacccgctgcttccactcagcttcctaccccagaattgcctcagatcctggctaacgctgccgcaaaaccaaccgcgctgcccttgaaacatggcgtcgccaagcctgtggagatgtgagagaggaggccgcagagctgagatccctgattggttccaggtccaaagtcaagctcgatgattggttctcaagaggaatggccgggaagggcctgaggccctcagataagggacagtcactaccagactgagctgactggttctcgggatcacttaggggcctctcagccttcccctgataagaggagggcggcgactcgagttggtgagggttttttgtttggttggttttgttttaaattttgaggtggggagttttaaaccctaaatattaacaaagttaccatgctttatgtttacaggcatagggcagattctgcagcatcaagtattatttttgaagcaaaattcatttcatcatttcatctataaatgtttcactttgaatccctgaaaagtgaggacttaaaaaacatacacacaaccgcgacaccattctcacacttaaaagatagttctttaatatagtcaaatagcaccagtgttcaaatttctgttttactcaaaattgttttccttttacagtttcccacctcttacatcagttgtgataagtagttatatttttctggtgttgtcttcctttaaacattaaaaaattgtttatataaagttgtccataaagtcttttacttttttaatatctgagggatctctagtcatggttcttgttctcatttttttgtccttgtttttaaatttttcctcctactttagtcacctctctgacaatctttttttcatttctgatactggtcatttgtgccttccctttttttatttcctaatctgattagaacttcgtcaattttttagccttttcaaagaacatacttctggttttattgatattctcttcatgtatttcttttctatatcattaattttagctctttataatttccttccacttttctttctttaaaattgctgttcttaggctgggcgcagtggctcatgcctgtaatcccagcactttcggaggcctaggtcgggggatcacttgaggtcaggagttcgagaccagcctggccagcatggtgaaaccccatctctactaaaaatacaaaaaatatccgggtgtggtggcgcatgcctgtaatctcagctactagggaagctgagacaggagaatcgcttgagcccgggaggcagatgttgcagtgagttgagatcacgccactgcactccagcctgggtgacagggcaacactccatctcaaaaaaaaaaaaaaaaaaaaaaaaaaaaaggctgttatttttctaatttcttgaactagataattgtttttgatcctttatttttctaatatgtgcatataaagctataaatttcctttgaaatgtgtgtcacatgtttttaagaggtcattttttattattattcaattcaaagtattttcagatttcccatatgagtattgtgacttgtggattatgtgaaatgtttttaaatctccaagtacatatgattttctagttatctagttgttattgatttctggagttcgagaccagcctggccaacatggtgaaaccctgtctctactaaaaatataaaaattagctgagtgtggtggcacgcacctgtggtcccagcttcttgggaggctgaggcaggagaatcacttgaatccgggaggtggaggtttcagtgagccgagattgtgccactgcactactacagcctgggcgacagagcaagactccatctcaaaaaaaaaaagaaggtgttttgtgtgatcttttctcttgaagaccaggaagagtttatctttaaatgtcccattttacttcatgtgcccttcacaattgtaaattattcttcaccttttttatcctaatacatgcatagttacattgatatatttgtttttagccataacaagttttgatgtgcattcttgtcaatattgtttgcttcaaaatctataaagcctaatgattttactagcttatgacttaaagtttactgtttcaggagaatttt

SEQ ID NO: 1241891 - DNA, 4001 bp, Homo sapiens
ctacacccagctaatttttgtatttttagtaaagatggaatttcaccatgttggccaagctggtctcgaactcctgacttcaagtgatccacccgcctcggcctcccaaagtgttggcattacaggtgtgagacaccgtgcctggccggtatccagatttttaagtttgccaggtattatgtgagccatagttccaaaagtgtatatgcttctcatgagtggatggacaatgctcctggcatagagtaggctcttaaaatttcctcattttaattactcgatgaaggcacaattgatctaagttacacaataagggtaaggtactaaatctattttgctcacaaaggtgctaaggtttgggcaaaatataaatcatttgtttttaatttaacaataccttttgaggtacagtagggtccacagtttcccaaggttctggatttttttttcgatcaaggctaaaattaaagaaagccaattaaacattaaaagatgtgaatttaaaccaacactgatactgggtttataaacatgttagggacaaaaccagtctcatactaaggcatgtgtctgctaatgatcaggaaccatcagtagcaactaaaattgattgaaaattctctaagggagtttcatggtgtggctcaaacattaaacatcagttcccctaaagggtaggaggtctgtattctcttgattgggctgcattggggaaggatcccacaaaccaaataaccatgggagtgaaactgccaagccaaggacatgcaataatgttcttatctcagtctgtgggaggggcaggttgaactctgcaggtggtgaactccagggctctaggctcctctgccagcggttagaggactgccctctccagccctgcaccagcctccaacagtttcaagtttatcttttcctcatattccaggatacatgtttttgttttttactttcttctacccaaagttgagattaggttcatcgtagacaactgaatctatcaattctaccacattagtaaaaatctaataagctaaaatttaaaattttaattaaaatgattgtttcatgatatatatctcccaaaaccactgaagaactttaaatttcaaaacttaaaaaaaaaaaaacaagctttacttcactgccagagagtggagaagggccaatgggtaaaagaataaacacaagaaataaactaatttgattaatatcatgggtttttttaaattttttcttttttttttctaattttcattttctgacccattggtagacaatatcataagagttttctgataaaagatgctttttaaccctgactcccagttcacaatttggcattctcatccatgggaaaaaaataggaaacttatacatttcataaactaaaagtcatccaaacactgccaaaaacgtttttataaattgagacctacttacatcacatcggttttccaaagagaatacacagcgaaagatgaggctccacccgccgccacagtcatgaacaccaccaagggaatgagctaacaaataacaggtggaggggacacatttggacacttcaatatgaaacatttgaaacacagcaaaacaactgtatttattttatactttgttcaaaatctgtgccatcttttcatctttaaaaatgaaaactttagtcaagattttcaattgtttttaaaacttacttccttccttttcatcaggagttggaaaaagctcatgatgacttcagcgaagaattgccaaatctagaaattaaaaatccaaagtattgatcgcctggtgggcgccaaaccgtccaccgcgctccgcaggccaactgcgggccggcgcgtccgcgtctctgcagatgggagactcacctggacgccgggcggtgcgcacggacgatggtaacgcccggaaccgaacgggccggcggcctccccaccttatatatagcgaccacaaccgccccgggtgggccgggccagcgcgctctggtcacgcgcgtggggcggggagcgcgagggacctgactcgctttccccgttgggcacgcgactcccgggcgccccctgcaggacattctgcggctgacgtgaagcgcccgaacgcgggcgctggcgccccctgccgctcgccgcggtcttccttacctgccgaccccggtcgctcttggcccccctaggtgcttgtgaggagtttggaggtttggggagtaggaggtggaaccccctaagaggggagcgcagatagccgaggcctgagggaaagccaacccttctaaaagggtatccgggcctggcgcggtggcttaggactgtaatcccaacactttgggaggctgaggcaggaggatcactcgagtccagcctggccaacgtgacgaaaccacgtctctactaaaaaaaattagcgggcgtggtgctgcatgcctgcagtcccagctactgaggagggcgaggcaggagaatcgcttgagtccaggcctttgaggtcgcagtgagccaagattacaccactgtattccagcctgggcaacagagcgagaccctgttttaaataaaatagaataaaacaaaatatttaaataagcaaataaacaataaaagggggtccggaaaaatgagctgcagaccggagggtcccaggagaggctcccaggtgcaggcgggtaaattagaattaatccaatcacattaaaagctccaaaatgtggtctgtgcacctatggagatcattaaaattaaattgtaaagtttatttcagaataactcccagggcgtcctgactttttctgctaaaaaaaaaacccaaaaaaacaaaaacaaacaaataaacacaataaaacaaaaacccgaggtcgagggagaacaaacaaaagaataagctggggaggctgtcaggagaaggtctttctgcaaacgaccctgccggctggtttagtctttgggttccctcctaactctcctctaagccagcaacctcactttgcagtttgcaggcggctgcaatggtaacaatttcacagagccaggggctgtgtgtgtgccagacactgagccagattcccctcggcaaggtgggtgcaaagtcttattaagactcagagaggctctggtcacgtcactggtaagtggcggcgatgccatcagaacgcaggtctgtctggtgcccaacaccatggttctgtctgcacccctctgttaaatactgcaataagtaaaggaccagttattttaaaacaaacagtttgaagttcaagctgtaagttaaagttaaaaggcaacatcttaacgttccctgaaattggctagaccctgctgtgtttcaaccccattttcattctaaacctgggttttgtagtcaaatggacctgagttcagagcctgcccctgctatacttattattaatagctgactttaagtaaactacttaaccttcatgagtttcagtttatatatctgcaaaatgggggcaaacctggcaggggagagagttggaaaaaatgttagaatatatgtaaagcattctgtcctgcttgtagtaggcactcaacaaatagttactatatgcaaagatttggttttttgtttgttttgttttttgagccagagtctcgctctgtcaccctggctggagtgcagtggtgtgatctcggctcactgcaacctctgcttcatgggctaaagcgactctcatgcctcagtctcctgggcatctgggaatacaggcatgtgccaccacgccccgctaatttttgtatttttagtagagacaggttttgcaacgttggccaggctagttttgaactcctgacctcaggtgatccgcccccctcagcctcctaaagtgctgggattatgggtgtgaaccaccacgcccagcctcaaagatttgttttatgtaaggctgatcataaatgtagtttcccactcccttactctggcaagcgttcttactgtttaaccccagaactgtaactagagacatttgctaattggat

SEQ ID NO: 1241892 - DNA, 4001 bp, Homo sapiens
tcggtggttccccaggcctgggttccaaccccagccctccctgcattccccacagaagagctgactcccacagggtgttcacatgccaatggcatgaggttatccagggcccagggccacccagcggcccaagatgccacagtggcccgtcatctctgagctgggaaacccagagcactcaaacaatgggtctctgtccctcagacactgctcctggcattcagccccaacttctctgtcccccacttcctgcagggttttagcccctggggcttgaggtttaggagtggcctgtgctttgtggcataggcgcagggctgtggactggaaaagggtatgaagatgcatctactgggggtaggggggctttcagctgtggctctttggtggggacagcagtggtccgactgcaggaggttgggagctggcaggtgcaccccagaatagttagtaggagaggggaacagaggcagctgtctttccccgacatggtctgggcctccacctccttgctacgagccctgtctcccagggtgaggcttacaccgggaacctggctgatggtaacggtgaggccatcaggctggaggagtgctggtgtggtcacagccatccccccctgctctgcctgccgacggtcctcctggatctcctgtgggagggctgggggtcagcacacgccatggccccccaggtgcacagagacatagatgctgataggcctacacagagagacaccagtgggacaccagggggcagaggcgccacatcacacatccccaggaccctcaccaagcctctaagagggaccatgcccaccctacccctggccccagccccagaggcgcattgctgagcctgcagggagaccaccacgtgtggggcacagggagcggcagccaagtggtttctcctggccctgtggcagcccactcacctggtacctgcggagcaaggcctggttcttcttgcgcagggcaactatcctccgatccagctctgcgtccttctcctgcctgctcatgggggactcggctctgggagttccctgcagaggcagggaacccaagctcctgacttccgggtccccctctcaccagtccccagctttcacattttcaccacccaaggaagagatcccagacccacagctaaggtcacccaggaaggaaggggattgcttagggagatggcccaaataaggccccaagcccccattccagctaggcccgtctgcctgtccctgcctcctcagggggctcaggtcagggcctcataccccaagccacagctcccagcagtggggtgcccctcccccagctctccagggagcttcactgccgagcagagcctggaatgggagttataaatggctctggcagcggaacctgccgtgactgggaagctgccaggggattcgggaggtcgaggggggagctgtttggctcccagatccacaaccagagaaaaaggagaggccctggctccgtcctgggctctcaggccctggaccccgcacctaggcctgtgcccagcctggaggaaagagccgctcccaggggcccagcctctccaggccgaaagctgctggtagtcggggcggagagagccagctcccctggcggccccagcccaggagtcaccctgggcaagccatgtctctgcatcaagattccaggttcctctctgtctggatgcaggttctctgttgtgaccctagtcacagccttcttcctcccagccccagctgtccccagctgcccccagagggtggctgcctggtatcccagccccctcccagtcccaagaagccccctgccaaaggcagactgccactcacagccgagtgcatggcaacggcgggcaccgagagaattccagagcagcccctggggagccagagtgggaggaaagctggagccaccggagccgggcctctgccggcctctccctgccggcttcgctgctcagcacacgagatcatgttgtgattacaaaagactcctctgggctcccagccaggaacgtcgggccgccacccccacccttccactctcagagggcgaggaccagggcactggcagctggctggtcctgcctagcacctctccctgccccaccccagcgtccccagacagactggtagggacttctccctggtgggtcaagcctacacaggaggcctggctgcctaggccccagcaggaccccagcctgggcctgcctgcagacaagatgggcagccagcgtaggcctctgtgcctcccatgagtagaaaaaggcctacagcacacagatgcgcctgccctctcctgctccttctcctcatcagccttggtttaagtaattcaaagggatcaagaagctcacctcccctagactaccaagtactaccacatccctaaaatgacaacaatagtcattcattcttttaggttggacattgtcttctctgtgcagtcatgcaccatataatgacgtttcactcaacaatggaccacatatatgatggtggtcccataagattataatggagctacaaattcctatggcttagtgacattgtagccattataacatggtagcacagggcactacttatgtgcttatggtgacgcttgtgtaaacagacctacggcatgacagccgcacaaaagtatggcacatacaagtgtgcacagtacagaatacctgataatgataattaacaattatgttactggcttatgtatttactatactatactttttatcattattttagagtgtatttcttctacttacaacaacaacaaaaaaaagtgaactgtaaaacagcctcgggcaggtccttcaggaggaaatccagaaggcattgttagcataggagatgacagctgcaggcctgttaatgcccctgaagaccttccagtgggtcaatatgtggaatggaagacagtgatgttgatgattctgactctgtgtaggcctaggctaatgtgtgtgtgttagattttgagaaaaaagtttaaaaagttaaaaaaaagaaaaagtttcaaaatagcaaaaaaacttatagaataaggatataaagagaaaatatttttgtacagctgtacaatgtgttttgtttgtgttttaagctaagggttattaccaagagagtcaaaaagtttttttaaattaaaaagtttataaagtaaaaaggttacagtaagctaaggttaatttattactgaagaaacaaaaatatatattttttaatttttcattttttgagacagtctcactctgtcacccaagccagaggtcagtgacatgatcatggctcactgcagcctcaacctcctgggctcaagggatccccctgcctcagcctcctgagtagcttggacaacaggcgcatgccaccatgtccaggtagttttaaaattttttgtagagagaacgtcttgctatgttgcacaggctggtcttgaacacctaggctcaagtgatcctcctgccttggcctcccaaagtactaggatgacaggcatgagccaccatgcctgaccaaaaaatcattcgtataaatttagtctaacgtaagtgtacagtgtttataaaatctatagtagcagacggtaatgtcctaggccttcagattcactcatcactcactcagtgactcaccagagcaacctccagtcctgcaggcttcattcatggtaagtgccctatacaggtgtgccattttaaatcttgtacaccatatttttactatatcttttctaagtttagatatgtaaacacttagcactgtgttacagctgcctacagtatgcagtacagtaacctgctgtacaggtttgtagcctaggagcaatagctataccatatagcctgggtgtgtagtaggctgtaccatctaggtttgtgtaagtgctctctgtggtgttcacacaatgacaaaaccacctaacaacgtatttctcagaacatagccctgtcattagcagacacatgactatgttttaaag

SEQ ID NO: 1241893 - DNA, 4001 bp, Homo sapiens
accacaccgacatcaacctcctagtttgacatccctgtaactaggccttgacatcaaggcctagtttgggtggggaaagtaacccccagaggatctgagaggagagattggcatgctctcctcctggtggactttcccaagtagcagcccccacagacacatctgtcactgggtcgcaggaagacaggaagtggtgaacggcggggcacagttaggtaggaggggctggaagccacttctgggcttctcttggagtcaaactttgtaatgcaggagatccatgcatttccttggacccagcattgtctgaagacatgagctggagcttgtatcaacttgccagccccaaaaggactcttggagaagagaagggaagcatcttctcccagattccaatccctgagctcttgttggtggccctgggttagatgttcacttgctctgagcctcagctttcctccctgtaaaatggggataacattacctaattcatatagttgttagaattaaatgaaataaaattcatcaagtttcttgtacagaatagatgactaatgaatgggatgggtctggagcacctgcctgggatggagccactgactgactatgaaggagcagagagttctacgtgcttcctaaaaacgccagcttctagcaacacctatgccaggggacatcagcaaaaaagtaaacccaggggtgccaagaagcacttgagaccagagtaaggatgccctccccgtcactggcacacagctaaccatggaaaaggacttctctatgactgccagccaccaaggaaattagggacaccagaggcaagaaaattatgttcagttacaaaatacattccattttatagccatttctattatcggttgctactataataaattaccaaaactttagcagcttaaaacacacactatcatttagttctatgggccagaagtcctatgggtctcataggactaaaatcaacgtctcggcaggacagcgttccttggtggcagctctgggggtgcatcactatctttgctcattctggtcttgacagttccgtgggactgtaagactgaggtccttgctggttgctaactggggccaccctgaactcctagaagacatttgctctgtccttacatagagtccctacctctcagaaccagccacagggcatggaatccttctctcatggccctctctttgactccaattcccctagctgcatttctgtctctgactgcacccagggaagcctgtctgctttttaggattagattaggcccattcggataatccaggataatctctttatctcaagatccttaatgttaaccacacttgcaaaatcctgtttgctattaagataacatatttacagtttctaggaatgagaatgtaaacatctttgggttgggggagtgggcatctttctgtctatcaaactattcaccaggcatttatttactatcttaatggccaagtacagtgctatgtgctgaattgatgttggtataaggggcatggggcaggggagaaagtctaggatgggtgatgccccccactgggatatctgacttagagctttgcagtactccaggggatgctgttgacataaaatacaatgtagattgtaactctcacctctcactcccttaaccctcttgactccccagtccttgcccctgacttatacaggctggaggtgtctgaataaggtcattccagttctctgggaggcaggagctaagctcaccaggggactgagatccaggttcagccatagcagaaactgagaaccctgctagatccaggttcagccatagcagaaaaaaacagagcaaggtgggacttacagccatccaaacagacgcctggagacagatgctgctcctgcccttagccttgcttcctggcctggtttcatggttcctccggggactagagagggaaatgcccaggtcctcttgggccccttgtagctccatatcagaacagaaaacctgtcactaactgaagtcccttccggctgaggtaccccggcctatattttgcagctccagggctcatcagagccaccaatttgctgatgggttctcaaccacaaggatggtgagtcagcacagtggttgactctcagcagagaggatgcagccttcagcagagctcctggtggggcagcctcctgatcagcctgtgctgtggtcctgcccctgcatttcttccagtcctggacgtccctggcctggctggcaccctagtcgcacacccaagaagcagttcagcttgctgagcacagtgtttcccaaaactgtggcataagaggtgaaggatagaccagggaggaagtcttcagcccagtctgacaaacacaggccaacgtttggccaacagcaactcaggctctttgctctaggccaaacttgaaacattagtgtgctggtaggtgttctgccttccctccctctgctctagaattcagatctggaagccaggtcctgacagctgggatccagatgcagtccccatcacagcatcacattctggccaaccaggcttccagtggcaggagctgccaccaggaatgggcaccagtcctctctcagttaaaaagcctttgcttcacaccacaaaacccaaagtgccagctgtggtgacaaccactgctcctaccacttaaaatttgctggcaagggagacttttagagaatgattcccccacaaatatagcattcctttttttaatctttcctgtacccctcttagggctaagttactgatgatagccctgcgtgatacagagcaagctggcagcaaggaggaaaattgtcagcagtgacaagctccagatgacagttatgtggcttggaaggcaagtcttactctaaagagatcctgcccccatcccagctctggattacttggtctgataggttttacagggtatgaccccagttttctgtttaaggacattggcctccagatatgactaggagggagttttcctctaatatctttccgcaaagatcaccatgacaatgaccagaataataaatatctataatcacatgcaatctttagctttagtaatagagtgtgacagagaactctgctgctgctgctgctgctgctgctgctgctgctgatagtgatggcgatgataaggaagacacaagataatctgaccttcctcagcctctgatggctgattacaggtagatgtggcttctgaagcaaagttacataattcacctcttgttcctgatccacttttagcaaaacttccgtggaaaggaccttgtaccttcttgaagtatccaacatgctgtcatctttatgttttcctaccaagttcccacatttctgcctcagtgggttctacagtctgaaccccagaaacaatttcatagttcaaacatctggcatgctattacatcaaagggattgcagattcccaacctggaatggaagaatccttgactccccgcacccgccccccaattctgctctacctcaaaactgcctacatcatctcaaccacccaagttttgggaaacgggtgaattccctcttccttttcattgagactagcccaggtcatagacccaatctctttactggggacttaggctaataatttcgagtacacaaaatcaatagcaaaaataaagtcccacgttgcagaacatcctcaactgaggagagagctcattggttgagagtgtttgtagtatcatgcactgcccaggaatgcagagaacacgtagttctgttagctcttattgattgagagtggaagacagctcttggaatgtagggaaaaacttctacggatgtcatggaaataaagattcatgttttttaaataatggaatcacaatgaatcagaccagagtgacattaaactggatgtccctgtccttaaagttgaaggtgagatcctttcaggcaagcaggcaatgctgtcactgggagactctcatgagttctgggaagac

SEQ ID NO: 1241894 - DNA, 4001 bp, Homo sapiens
tacagccatgacattgaacacttcaatgaaatgatgcaagatttggactccaaaatgtcccctctctcccctgtcagcagcatgagcctgagcacggcaagagtcagccaatatagtgcacacacgctttgttgaactcatgttcttccacccaggagactgaggtttctgtgcaaagagtaatgtcaatccgctggaaatcactgggttgtctgtttctttgtttatgacttctccatatagttggttctgctccaacttatttgaaagggacatctgttggatgatttgatgtgatgtctgttccctgaaagtcatttctgacagggcgatgtaaaggaacctgagagggagctccgtcatgtgatgagtggctcttaagtgcaggaacagatttgagaggattatccaagacagtaacttcaagatcaaactaggccatggagttagccataaggctctgcaaattctttgcggctcagccctctggggtctcctgccaccgtgcttgccagtaatgaatttcacttccatgtgggatctttcaggtcttcttgacacactgaagccatatgtgtttcagccacttcagacatcatcctgctctttaacttgaagaacagtctaagtcagtgaggtttgccatggcatcaaatctccttttaaacccacaccgcttgaataataactatgattctggatagttgactcatgaatatttcctgcgaaggaacaatgagggtattctgaggaaattaaatccatacaagtaattcccaaactttattcatgtttgaatactttctaacttcaaatgtttttaccagactggtaacacatagcaaaatcaactgataagattgtccttttttctttcttcctcttcctctacctaacacttctctagtgtggtactaactggagaaggcacaaagagtaagtagatagaaagggaaatgaaaagtcaaagagccctacacttttttttcccccctctctcctggtagtcctacttcaaaggcagtgtagctttctcagaaaggccaacccacactcagagggtgaagttggaaaaccccagcaaccctatgatacacaataaacccatgtaaggaggtggtcccttacaaacagttggctatgaatatcttctttcaaatagtctgacactcgtggcataattatttttgtaagagtcctcaggaaagtctgttttgaaatactgcatagcttaagactacaatagtaccttgcatagttcaatgtaaacatatccaggtggcttgtgaagaagagaggaagccagaggtgatgcttctctataggaaaatgacactgcagccagccccccgaatcctgagaagaccctaaatacaccactccccctccccgacaactacccaagtgatatcctgtgagtgactggattctaatctatcgaatagtttctgtacatgaaaaaaaaatcaattttggaataagagttgccagcagaaagatttccatttattaggcacctaccaggtgcctgattctattgggtacattaaagatattctttcatttagttctcacctggaaactctcaaggcttgttcacattttactgatgagagaaataaggcacaagaagattaaacaaacaatccaggccaactcaagtggagggatgtgtggttgagttcaggtctgcctgtaaatcgcttgaggccagaaacttttctctattttgttcactgatgtgtcccaagtgcccagaagaatgcctggcaaattgtagctgcttagtaaatattgaatgattaccttaatgagagaatccagcacgtgtactcctaagtattattctctacagtttctcctcagtctcctcactccagtctgttacctgcccctttctcccatcccatttcaaagggaaatggagcccagagctgcagtggatgctgtagaaagttatatctctgtgtacatcctgctgaaggaatggagcgattgtcagggagctgtgtcattgagtctgaggccttacttccttgctctcccccttctatttcctgcttcctcccacaaagattttctgagtccttgctgtgtgctgagcactggagactcactatgaacaaagttggtatggtccctgtccttatgcaaattattgaataaattataggtacggtgagtgttttgacagagaggtaagaatgttatagaaacatataacaagaggactcagacctattctttgaggtcaggaaagacatctttgcaaattttaactttaagacaagatattaaggataattaagagttcctaatgtataccttgggtttcctggatgtctctgcctaagacacttttagggaggagttaagactgttttcctataatactaagaagtcatttgccttttcattcttattgcattacaagtgtacaatggagttttacagaagctgcataacatagatttcacaacagattgaatgcagaagcagacatgagaatccatttatcctttagtaagccagatattggtaagatttgcaaaaaatgcataacagcactactagtctcactcatgtatttttggttttggaaaacgtggctatgttttcataaaatgttatttatgttaaggtataatcagtttactatgttgttttaaaatgaattaaatatttaaaaaagaattggttctaatttgcaacatgatataatgatataatctaccttttttaaaatgaaaaggtctttggggttcttcagaagatttgagagcacaaaggggccgagccccaaaagtttgcgaatggctgagctaagagaagaggaggagggagtgttccacagtgaataaacagcctgtgtaaaagcccttccctggtatacgacttgtagttttgaggatattaaagaagtccaatgtggttggaacatagaaagtgatggagagagaatataatatgcagaacaatgggtaagcagtgccatatttgagagcaatgacttaatcttaggtcagtgggaagtcactgaagggttttaagcaggttggaattgatgagatacatgttgagagaggaaggaaaaggaaagaagaaaggaaaagaatggggggacacagagaagggaggtcaggaggcttttggggaaaacttagtaagctatgagggagggacagtagggctggatagaagaggatagatgtaaataatattatggagaatctagaggacttgggtttgattgtcagtagagagtgacttgttttgtaaaagaaggaatgaattttctcatggttttttagtcataccacttgattttaaattctagcgctaattctgtgactgtgagcaaattatttaaactccataagctacaattttctcatctgtaaaaaaaacaggaacaagagccacaatttcatatggttgttgaagttattttaaaatgcacacatatctaatataactggattatcgtaattatttatttgtttcccttaccttctctttaactctctttcttaccattttaagatggaggggggaagttggcagtgttcttcaggaaacataaattcttgggaagggagtttggacaccatatgcaaaatctcctcctgtgattcctctacacactggaggtgtgctttcctcaagcacttgaagcaaatgtgttctctagtctcttctctctctctctttttttccctgaagactactctgtcatttaagttcagttatttttgtcttacctgctcactttggacttgaaactttgtcccgttcttcttgttccatagtctgattcctactatttttttccttcacctttctcttcccaaagtcttaggctagccttctctatttctcagctttgtcatgcccttgactttgcaagattctctttcctggcaaccaccatctacagacaaaatattaataactttggaggagttaggacagaggcattaaaattattgtaaataaagcca

SEQ ID NO: 1241895 - DNA, 4001 bp, Homo sapiens
attctgcttctgcagccagcattcgaccagtgtacccatgtccttgggtaacgaatctgtggggggagccattctggtatcacctggtccccctcccactgccccctcatccaaggcctagcagtcagcttcctgggtgaccacaggaggtcagagtttgtctaagcgggtcaggcctacagtattgtccactcagaggaaagagaaagaatccgcgtgggaaagacacaaagaggaggaggaggaggcgacagagtaaggggaggagaacagaaactaaatataaatatgtgttggggatgttggggatggcagcagggtatggttagctggctggctcccacaccactgtcccacagcacagagggccagcatctgcacctggcaccatgctttccctaggaaagccgagggcattgggcttgtggtgcagccacacagggtacagacctgtttgggactgtcaggttcccacgggttgcctgagctctattaggtgggcgccttagagtaaattgtgtgaaaccaatacagcctataatgcaaaagattgagccgtgagtagattgatgcgtctaaagaatcagtgaacaaaaataagtggccatagtgacctcagttaatcattgaagtctgaggtgcccaacaatgatttttaaaatccctgcactgtccttggtccccgctctgtgacactggcagtcacccagccaccacttgacggcagccatttggagtccacatgtactgagtttccaagccagaacttcctcagcactcagccagaacacagcctttctctgggggcccaagacaaggagagcaaaggtcttctcacttctttatctggggaagagatgagtgattcctgtcccttcccccagtatagaaaacaccctgtaccccaaaagaaacatggcacaggggcagccaggagtgagccccttggaatggccattctgatcttaggcagggactgctgaggacaagcagaggatgccgactctgggacaaaatcacaggcggaggggctccgaaacaggccctagccgctctgggggtgcgggtctcctgccctaggactctcaggctagaaagtcctcaggactcaggactgcgcaagggctgacaagggaactggaatcccttaaatcccgctttcctgcctgcgcaaggggctaccccagcacagtcttggggccctgtccacatgggacagatcatccaaggtgacaggttttccgactcccgcgtgggctctccaggatgtgtgggtgggcacacgcggcccgctcaggtccgggagagtcggcccgcggctctggagcgtgcatctgcgatgccagtgaacgaggtgattacacacagccggcgctcagctgattctccaggtcgggtctccgcgaggcggccactgggccgtggagccgcaggcaggtccccgcggctgtggccaggccagggcccggaggcgaagggcgggcgggaactggggccaagcaggtggagagaaagagttgagcagcacggcgcccctcgggcagaggggctcctggccaaggccccagcgacacttggcaacttctcccgcgctctgggttcgccgccgcgtcctacctgaggccacaccctgaaatcaaaatcgcggtcaggtgaagccggcgctgcaccaacgtgtaagcgcggcccctcctcggcgttcccgcgccgaggtccctcccgcggagggcgggcccggctcccacgacctcttcgagcgttcctgggcttcccgctccgcaggtgggttccccggctgccccggaggttcgcggcgagaggacgggcctcccaacacgcgcagcccccttcctgggtgcccatgccccgaagttcgggaccagccggcgccaggcgaggggccttgggcgcaggcatctggagctccgcgtccctggagcgggacctccctccgcgggcgcccgcccggcgcggggcattcgcgtccccgagagggcgcagcagtggggcctgcgagctggggccgggtggccgcgccgggtcggagtgtggctggagaggggccgccccggaagcggtgctgcgcccaacgtccccttctccccgtaagccccgcaaggagcctgccgcctcttgcacctgagccaggagttcagtcgggaggcgggcgcggagcggttcccagcgcctggacgtcagccagtcgcaacacccgcgggaacacttgctacatttgccataatgcatttctgatctgtttccgcgcaggcctgcggaggactggcccagcaaggtcccaggtcttccctctcctcagcgcctaagagagaggcccagtgcgggtgaggagtcgcgaggaagaggcggaaggcgccggaaggtgagtgagcgagcggcccccggccctagagccttctgcacccattttgaagagcaggcagggagggacagtgggcaggcaggtggccctcctgggctggctccttcctggtactgctaggcagcggaggtggtcccttccaggtgccgtctctcgatccttagtgggtgcatgttaagtcacttacaccactttgccccatggccccacggtaggctggtagacgtcaagacctcaaatggcccgccctgcccccgggcccatcttcaggtctgatgcctgtcctgggtgagggtgtcaccgcggcagagtgcagggaattcatgccggggaagaggttcccaaacaggaagggtggtggcaggcccagtggctgtgcagggcagggtgggaggcagccgtgggagactcccgcaggagttacaggtgaagctgccgctccacacatcccagcccaccgctcattccccagatctccagacctgctcaggtggcatccgatctggagtgtaggtgctgctgggagcactggaggctaagccatgaagagctcccagggtgtaggttgcgttttctgtatcttgccccattctggtggttttttgggggcttttctgacttgtttttctgggtgaagggggcagaggggctcaggtctgtgtccatgctcgtttttggtggccggtgtggcataggttgccgcattggataagaaaacgcctggttccatgcaaggtgaggttcagcctgcagtgccatgaattctcctccatagtatataggacagtggccgaagacacatttggaaccgaagagagtggggtttgaatctatccagactttgcctttgactccttagacaagttgcttcacttctctacaaacttataaatggcctcatctgtaaaatgggaatgcgaatgccttcctcctcattaggcggttgtggggagtaactgcctcatcagcctccagctgctatgttgggaagggctaagccactccaagttctcccatcctggagagctttgagggcagtctggctgtttggcaagctattgtcagagggtattagagcaaagcaataggaataaagtaaaggtaggggtccttggagggcgagtagtgagagaccctaattcagggtctctggacctcgtggtgacccagggaaggggccattcctggaagaggatctggcttgggcatcagaaacagcagcgccccctgcacatcacacatgttcatgtgttcatgggtgaccctggaacctcaactgttgcctgggatagagggagcctctggcttgagcttccagtcccatctctgttctgcatagctgtgtgatccagagcaggtcacttgacttctctgggcactgggcattgtggatgagcctggagtttggagtcggagagatctgactttgaatcccagctccacacttactgtcttggacaattacttctctctgagcctcagtttcttcatctgtaaaacagagctcgcagtagctacaattagccattagatgtactaataaaaagcacctagcacagtctatccatgtggtgggcactttataagcatacctttcttttcttgcctcctccttctctct

SEQ ID NO: 1241896 - DNA, 4001 bp, Homo sapiens
ctggctttaagaatacagcataaggttgagcacagtggctcacgactgtaatcccaacactttgggaagccgaggcagtcagatcatttgaggccagcagttcgagaccagcctgggaaacatggcaaaatcccatctctactaaaaatacaaaaattagacaggtgtggtggcacatgcctgtagtcccagctactccggaggctgaggtaggaggatcaccttagcccaggagatagaggctgcagtgagtggtgatcacgccattgcactccagcctgggtgacattgcgaggccctgtctcacaaataaataaataaaataaaaataaaaatggaattcctacaagccatacacaaaaggcagatactgtgattccacttatataaggtacctgagtagtcaaattcatagatacagaaaataggatggtgggagctgggggctgggaggtagaaagaatggggaattactgtttaatgggtacacagtttcagtttgggaaaatgaaaaagttctggaggtggatggtagttatggttgcacaacaatgtgaacaccactgaatcatacacacaaaaatagttaaaatggtcaattttatgctacatatattttaacacacacacacacacacacacacacacacaaatctgtagggcatttccaggttggacaaccagcctgcacttttctccaaagatctccaaaatgcaacagttctatctccagtcaattaaattctgtttttttttctttctttctttcttttttttttttgagacagagtctcgctctgtcgcccaggctggagtgcagtggcgctaacttggctcactgcaacctccgcctcccgggttcacgccattctcctgcctcagcctcccaaatagctgggactacaggcactcgccaccacgcccggctaattttttgcattttttagtaaagacggggtttcaccgtttagccagggtggtctcgatctcctgatcttgtgatccgcccgcctcggcctcccaaagtgctgggattacaggcgtgagccaccgcgcccggcccctaaattctgttttcaacagaacacagactaaaggtctttccacagttccatatacatgaagatcctgcttggtaaaaagtgtctgtcagagagtactgttacaatgcaagggctgtgtgctcagcgcatgcagttcagccgtatgtctcatgctcttattttaatacaatcactgaaaggtaggtattttcaccattttacagatgaaaaaacaagttcagaagggtaacttgctctagggcacattactgatatgtggggaatccttgacaggaaaaccagatctgtgctgctccagaatccatgtttttatcaaataccatcctgcttgtttggaaaatataacgaaagcagcccaagcacgggcaggtaggaaaagctacgcaaagagcctggaggcttttataactatctaggcatatgagacaggctgacaccttctttcaagaggagacttagaaatcaggaaggctgcctgaggcaaggtctgaataatgccaggagacagagcccagccagcgtaaaggccggaagtaaaagggacagctatgacacggcggtcctgggtgaactgatgtctagcgctacagtgaacccccaacccgaattcgtctaaagccacccaaaaccaaaactttgctcacaccagagccccgcatggccccttaccccagggcagggcgtccagaaccacgcaggaaattccggcgtccagatcccaggcctcagtcgctcaggtctctagggctgtctggacgggatgaatcaggtcccaaggcctctatgtggtattccggggccgggccagagtgggagatccaaaacgctgggcaccccagcccctcctcacttaccgtaacagctgcccagtaaacgcttggctcagctctgtcgcctgtagcccggaggaaatcgggaggggcggagtcccctagtgacggagcccaggagtcctccaactaccttcccacccgacgatgttctgtgcgtcgattggtcgagaggagctcagcgtggtgaagaagtgaggagcagcaagaggcgagcggtggacggggctctggttgccgggaaacggtggagtcacgtgccctgagcattgcccctcccctcccgagggccaggttgattccttgcagatccagggttccagtccctgcttggatagggaagtcgtttccaagacttttgacttttcctagtcgccggagccagttcacctcctccacaactttctctgtcggtgtttgtcttctaaaaatttcaccccttcgttacccaaattagagcacttcggcggcttctttccttactctcccaggagactcgtgtctcattcatcaaattatgaagctttccttcattcatttagtcaatagataccaagcacctgctgtgttctaagcattgtgttaagcgtgaagttaagacacatatgacttgatataagtcctggagatccttacagcttagtagtgtaggaagggggtccgccatggaggcataaaagtttacaaataacagtaaacagtgatagacagccgggcgcggtgactcacgcctgtaatcccagtactctaggaggccgaggcaggtggatcacctgaggtcaggagttcgagaccagcctgggtgaaacatggtgaaactctgtctctactaaaagtacaaaaattagctgagcatggtggcacatgcctggaatcctagctattcgggaggctcaggcaggagaatcgcttgaaccgggaaggcagaggttgcagtgagacaagatcgcaccactgcattccaacctgggcaacagagcaagactgtctcaaaaaaaaaaaaggaggggggcgttgaggattatagagtatatgatggaagtgtggccagagtacataaaggagagagtggtcataagaagtgtgtgtcagaatgctttgttgttgtagttgttaaaggagatgacctttgatatccttcaggggatagataccagcttgttcattgagatcgacccctccccatccccagcttccaggatcaacaccagttactctctcccaagaaacacgtgatgaaagacatcagccaaccatcagtagccaagtaacttggctgaggaaatagttctcactccagcctgggtgacagagcaagactccgtctcaaaaaaaaaaagaaagaaagaaaaagaaaacaacaacaacaaaaacaacatagttttaggattacagatgtgagccactgcgcccagctaaaatacaatttaaaattcagttcctggccgggcttggtggctcatgcctgtaatcccagaattttgggaggctgagggggtgtggatcacctgagatcagcagttcgagaccagcctggccaacatggtgaaaccctgtttctactaaaaatacaaaaattaactgggcgtggaggcgcatgcctgtaatcccagctactcaggaggctgaggtaggagaactacttgaacccaggaggcggaggttgcgccaccacatccggcctgtaatcctaacactttgggaggccaaggtggatggattgtttgagcccagtttgagaccaccctaggcaatgtggcaaaacctcgtctctactaaaaatacaaaaaattagccagtcatggtggcacatgtctgtcgtctcagctactagggagcctgaggtgggaggatcacttcagtttgggaagtcaaggctgcagtgagccaaaatcgtgccactgcactccagcctgggtgatgggagtgagatcttgtttcaaaacttgttaaaattttaattaatttaaatttaattagccacatgtggctattgtacagcacatggctaatggtgatcctattgtatagcacaggattggagaatattacatagttcacagaacctcaaggtgagtggagagtcaggctttaggtctatacagcc

SEQ ID NO: 1241897 - DNA, 4001 bp, Homo sapiens
agagtcaatcctggctctttgtgggtacctgccggggcataggtctcatgtccctggccaagactgagactttggacagttcccatggccctgatctaaaataagatggaggcagggggaaaactgtagtgccttggacccaagagtttggaggaggaagcgttccgcaggggcatctggcgcttgatctccaaattgtactgtccaaagatgtgcaacccagactatggccggcccagtccatgggcagaagcaccaccacctcagtctgcctgaagcaacagtcattctcatcttctgagatgggatttcctggtaggctccacgaggctgaccctggacagctcttgtcctggcatctctatgcccactccctatcccattctgaacacagtgcccttcaaacaacccctcctccttggctctcaggccaggctgcaatgccactttgccagcctggagttggtacctaccatcaccccacctcttcagccttcctagagcccctatcctccctgcacagctggccagggagagcttgagcccataactccaattcaatcactctccctgccatctctgcaggggccctgattacaaggagttgaaatttgcctaaagcccacctggctggtataatggcacccagtgggcaaattcaggctagcagctcagaacgctggtcatgcattttggactcgaacgcagcacagggggcagggctgaagacatgtgtacctcattaccctagcgatgtgagaagcagtaattaaaccaggctccacttagaaagacagagagggacacacacatcccagcatttctcagtggcttttcagccttggcaaaaatatttagaacagtgggatggagactcgcatccccttagggaagactcctgcccctgccaaaatatgcaaggaactctgttatccactacagcacccccagacccattcttacccccggacaaagaggacatagctggcttaaatttttccaagatcaagggttctcagtatctgtgtgatttctagggatatgctttgagctgggcctcaagcagtggaaaccacctcagcacaactatctgcactctcccagggtcccttgtgaccagatcagagtctgggagacagatggtgggttcaagggtcagcttgggtcccagaaggttgtcttccactaagaagctgtggcgggattcagtccttactggccatcttggcagccctttgtgctaacccagagctccaggcccactgacatgctgctcaagtaacctctacaacaccgaggcccctccagccttggggtctgatgagatttttagcaaagcagatttgcggaaaggagagcaaggagaaagaaggtccccagtagagtgacacatgtgcacgcagctttgcacactccaacgtatttatgagtacgtttttgtgccaaacccaagaaggttggcttagggtctgtctggtccctcctcacccctcacttacctccctcagctccttggccacctccttgagctcgcgaaggatgccctcaagctgcccgatgaccatcttcatgcgctgtcgaatccgctcccgctcaccaccactgctggggtcgtcactgggctgcccgaggtccggggcgccccgaatgttcatcgtttaccacgtggccgcaggcctgcccatactccccccagctgggcacacactgcgtctgcctccacggagcccccctcggctgggcagagctccacattttaacggccccccagcccaccctggccctgggcggccctcaaccagcccctgccccctgccacccagcctcctctgcctctgggtggagagtgggacacccagagggagacagagtctagcagagggggtcaaggtgaggacacaggagaggagggggagggaccttgggtcccaggagtggcctccaggtcttgaagtgcctgtgggtgtgcagagctgatctctgcctgagcttgaacacagaggcagggggatgactctgcagggactaagggtaagagatgcccttgggatgggggaaggcagcagggatcccctcacaactcctaggcagttgcaaaggcagaggtctctggatgcaactgacacctgcagagggatggtggccagggtcttccagatgtggaaggggctccggatatgggcagctctggggagggagctggattggaagagggcagccccctgcggagagagcgagcctggcgtcagccctcccaggctgcagcaccagccggcaatgccgctgcctccctcctctcgccagcctgcacccttcctcgctggggatttttttttctttgtggggaggggtggtggaggcagacggtttacagcacagcccctcctctagagggaaagggagggagcccctgctttagaagcagaagtcctcagcctgctacggggcaccctggccgtagctcccgccctccccccccaccttccccccagccaggcctgcccaggctggttcaccagagggcctctccagtcacccatcctccctcctagcgcccccagggtgccctcgttcccagcggaccctccctcccccagccccgccttccctcagaacccccactcctggactcaccgagggtgggggcaccggccttccctccaagcagcgtcgggggccaagccccaagacggagttggggggcccccaaggctccctagggcgggcttctctctctggacccttcggccccgggcctcagggaggtcctccgagccgtgaccggagacatctgggcggtgggagggggcggggcctccgcgctccagggaagggggcaggaaaaatctttctcaagcctctccaggctcggggtcgggaatgagcgagggtccggcagatttggggctccgaggccacaggtgaccggggcgcggggaggccgaggagacgccgggcaggtcccagcgcgtgagccaaagtcggagggctgggagggcgccgggatcccctcagcccacgcccggcattccccgggctctgcaccgtccgggattcgctctgtccagtccagatcggccgggtccgtgttccgctggggtctgccctgccctaccccgcccggagtgagctggcaccgccgggcgcccgggacgcgctcagcccggacccagaacgtccgtgccccggcacccgcggcgtccggagcggccgcgagggtctgctcagcccagccccgcggtcggccctgggcgagaccgctcccacggctcagttcacgttccgaaaggtccggaatccaccgggtccccgaggaggggcgatgtcagccgcggggacccggtccccgccgggcccagccgagagcgcgcgaagccgggggccccggccgggctgggttcggcggcccgggcgcaggcgggagcagcgccgggcggaggagaggagaggaggcgagaagaggcgaggggaggaggcgcggcgaggggaagggaggggagggggcgagcggcgggccgggccgggccggggcgcactaggctcgcagcctccgctcggctccgctacctcccgtccgttcgctctcggctccccgcctcagcagcccccgggcgccgggtcgccgccggtggggcaaacaggcgccgggtcggggctgggcctcccttcaccgcctcgccctgccctgccccgccgggctcccggggcctgggcccgctccccaagcgccgcggcgccgcgccgcccgcgccccggccgcccccggcccgccccgccgccccccgccggactggccgcccgggcgggcgctggctcccttaaaggccgcccggctcgcttggctccgcttgcctcggcgctgtcagggaaggggccggcccgccgcgccgggagggagcttttaaagcgacacacacgcctcccaaccccgagggccaagcgtgcgagccaggggggtctcgccacccgggcgagggggaagggtctcgctggcggggctg

SEQ ID NO: 1241898 - DNA, 4001 bp, Homo sapiens
ttgtattaaagcatgcatgagcaaaaagttgtcctttttgcttaacttagaactcttactcccattttagcaggatttttagaatgtccaaaagaccatacagaccattaaatcactctcccacattaataaacaaaacaaaacaaaaaacactacaactgttgtttctttcaactttaaaaggttttacttttctatgtgtggaatgttctgagtatccactttttttggatgtcttaatctctaaatctaaaagagaggcccctaatcattaaggtgctcttaaacaaaatgtcaacactaaaaatgtgactttaaaggaaaaaaaggcatttggctcatggtttacctataactctcccgttatgcttttcctaacctattattctttagggaagaatgatttcttacttatgaaaaatgctaaaataaacttatacttctcgaatctagttaacactccagtctttccaaataatttcgaattgaatttcctaagtcacctcacccttcaacttcaaccaacctccaaagtagtgggcatgctctatacagtccatcagccaaataataagaggcatttttaaaggataacacgttgctaaacaattatctccttacaggacagtccagtggagtaacggctcaaaaagcccacgactgacatatgtgttattataagcacaaatacacagactatttttaaccttaatggacgatcagattatgtaatagtattagtagtacggctgcgcagggtttagttttaatcctggctttaaaaacctggctgggtaacatggttcattcagctccatggctagattttgaatcactgaaatctagattgattttatgccagctattagtaagttcaaaacatcttgaggccttctgttttcccctgacctataaaagatacacccatgtccatgttcgtacctccctcttctgtcattaaaccaaaagaaaataaacacctagtgacagtaaacatcctcagggcgtctccatgaaaatatacaaatattaaagatctttaaaaatcttttaggcctagcacctcaggaagctgttatgtctggtgaaaacctttggtgcttttagtaaaacgaacttgccgggaattcatacaaagaaaacaaaagaaacttaaaagagtagttccagttattgcaacataaacgcagctgcaaagtgatgttcacgggaatgagtcctgccatgcagtaggacggatgtcaacttcagagccactttctagggggcgtttcctgacgccccctggcttactgcccaggccaggggtctactctggttaacatgggcaggacaggagggcgacccgcccctccctaggcccgaggacgcgcccgcagcaggcgaacggcttcgggtgccaggagctcagcaagctggggaccccctgggcgaggagtacaaaggaccccaggcgaagccggcgccgggaggcagagctgactcccgcgggactctaccggcctgcgagcgttcgtcacgtgctcggtggctgaggggccgtcccggccgggcgggcttcaccgcgtgggcgcggcagtcgccactcaccgaggttgacgaccttgagcgccgtgaagaagcggttctgccgggccaggtcctgccagggagccttggagcagtggtacttgatgaaggggaagcagccggtgcgcaggacgtggtagttggcgccctgcaccggccagttgaagtgcgagaggccgaactggtcgttgcggacggcgctgtagggcacgcagaaggaggtccagtgcggcaggcgccgctgcagcagatgccgcgtcagcacctccgaggcgctgggcttggggcgggcggcggcgcgcgaggcccacggcctacacagcagcaggcggagcgcgacctcgtgggccctcctcagggcctccatggcccgccgcgccggggacgcaggctggtgtccgcagccgctggcgcgcaagcgcgcccccgggcgagcgccgggaaggccaaccggcgccgcgcgggtgcccgagagcccccggtgtgcggcggcgcgtgcgcacagcggccccgtggcctcccgctgggggtggagtccgggggatgggaagcgtgagctgcgcgaggcggagggtcacctgcgtcaaggagctggttttgagtggccaggtgtgacctcacgccgtcattagtaactcgggcaggggagggattcggggaggtctcatcaatttgggcctgaggaaaattcaggtggaagacaattaaataactaaccacctccgcaaggtgcagaactcaaacccaagtctccctcccacgccctgggctccagggaagcccttgggtgttgttgttgaaacaggacgaggcgtgaccccgggtctgcgttgtttggtaaggccgggagcacttttgtgtgtaggtcctcgctgtcgggttcactgtttaaaattagtcccagagatttcaaaatcaaaagtttatttaaaaacctcacgtgtctcagtgcagcgtccgaacacacaaaggcacctccctctaagaacctggtagacggaccaggagcctcttatcgagctttgtggacctcagtcacccattaccaatccattactttcggaaaagctttgctcaaactttgcggcctcttgaggcagtaacttacggacaaaactgcttttagaaaaggatttcctcttttgtcctaaactcattttgtttggagaggccatacataaacaagatgatgtgtctgaaaccaccttatgtaaatgaggtacagtaattacgcgttaagcatcatataacaattactatcgttgctaaaaactcaagggggatgtaggatagtatggcgaaattttatattccccagttttttgttttgttttgttttgtttttttgagacggagtctcactctgttgcccaggctggagtgcagtggtgcaatctcagctcactgcaacctctgcctcccaggttcaagtgattttcctgcctcagcctcccgagtggctgggattacaggcgtgcaccaccacgcctggctaatttttgtatttttaatagagacggggtttcaccatgttggccaggctggtctcaaactcatgacctcgtgatccacctgcctcggcctcccaaagtgctgggattacaggcgtgagccactgcaccaggcctattccccagtttttattgaacattgagcacccaccaacatatgccgaatcttgaactttaccttacagaatttgaagttgaactttaccttatagaacttgaactttatagaatttctttttcttttcttttttttagaaaggatctcactgttgtctaggctggagtgcagctgctcgatctcggctcactgcaacttctgcctcctgggctcaagagatcctcccaccctcagcctcccaagtagctgggactgcaggtgtgtgccacctacactcggctgctttttttggtattttttgtagaggtggaattttgccatgttgcccaggctggtcttgaacacttgggctcaagtgatccgcccgcctcggcctcccaaagtggtgggattacaggtgtgagcttctgcacctgaccaaattaaattttgaaaaagagtggagtcctttttcaaacgaaatctgttgaaggtccccaacatataaagttggttaaaacttatgctttaggccgggcacggtggctcacgcctgtaatcccagcactttgggaggccgaggccagtggatcatctgaggtcaggagtccgagaccagcctggccaacatggcgaaaccctgtgtctgctaaaaatagaaaaattagccgggcgtggtggcacatgcctgtagtcccagctactcgggaggctgaggcaggagaatcacttaaacccaggaggcagaggttgcagtgagctgagatcgtgccactgcactccagcctgagcgacagagcgagactccgtctcaaaaaaaaaca

SEQ ID NO: 1241899 - DNA, 4001 bp, Homo sapiens
tctagagctgccttccttcaccagggattgctccgggtagctgtgttggcagactgagccacgtcctcatttctgctaaggatttgcctggtctttttcctgagttatactctatctctacctatctcttcctatgtggccagcccctgtatgcgcctcccctttgctggtggctccaggccatggtctagacagcgctgtccattagaactttgtgcagcgatgtttacgtccattctgcactgaccagtgtggtagccattaatcatgtgtggccaccgggcatttggaatgtggaatctggaataacggtgcagctgaggaactgaactgttaattttatttatttcaattcagtgtcatgcagtgagtggccaccagattagacagggtcaggccttctcccctttcttcctgggccttcccactttcctcttctgcctgggttggactgcctttacccaagcttgtcctgtgacctctctctgttgacagtggcttccaaagaggctggcatggggcactcatctcttctgctcagtctgtgtcctcccactccctgatctgaccccgtgccaccttctggctctgccagcctctacctggttcctgtagtgccgcacagagcctccctttcccggcacagcctccctttcccggcatagccagctttcttcagggtcctgccaggaagggccgcccccccaacatttccagattgcctctgtccctccactctggggtgcctggaaggactgtccaggacccagagagcaggcagagccctggattcctatcctggaatcctcccccaggatgaagaagctctgcctgcctgaaccctccagcgatgggcctggagtcctgtccctgtcctttccttaatccccagcctctggatcttccagtcaccccggctttgcccaccctcaccccatttagaagctgggctcgctaggaaactgctcccttagcatctgcagaacttcctcaagaagtgaaatccccaggtccactttgaaggagaggaagggatcactgaggtctggggtaggtgtcctctggaagcagggagtgtccacaaggcccttctctgagtgctggtggagggcactcgacagagagagcgccgatggcagggtggcagagtaggctgctgtgtaggcaggtgggggctccaggatgttggggcagcttgagctctctcggtagaggcgtgggggcttgggtggggccagcagggtggcccggggctgctcgtccccccacagtggcaggcgccggccatctggcctcccttgtagctcccggatgacttctcggttgctgtactcctcgtggtccccacctgctgtgctggcctggctaagcacactactctgtcgccggagccgccgtggccgccccaggctcagctgcttgaagaaggaggcgttgcggaaggagcctttccgccaggtctccatggggcccaggggagccagcagacaggtgttcaggagcagccagggtgcatgtggtccctgctggggcagtgagtgccagcagctggggaggctcccctaggagcagaggcctcagggtttccactcagcacagacctttgaccacatcttggatggtgagaggagggctcaggaagaaggaacttttttgcccaggagagcagacagctgggagttcctggcagcaagagtttcccacagggacaggagtggcctggttactgaatagggtagtggaaaaaaacccaggaggaagaagcagcacttactggagccagaatgagggcagctccggcggaggcagaggtggaccttctcgggctgggtgaggctggcgagcgctccttccacaggcaggcagcagatggcccgagctcactcgccctggtgtttgcctggctcctatatgtctctggggcagtgtggggccgtgccctctctgccagtggctcccggactctgatgagtggcctggctgtttgtggcggtggagatgtgtttttgttctcagctgactcagtcaggtgggaagccaggtttcgtgctcttgggtaattgcagcatccgcgtgcagggatggggcagctgggaccaacaccccagggcaatggggagcttaagattcctctggggactcgtgtgggggcagccctgctttatgtgtcaccacgcggcttcctttctgatcacagccccaccaccctgggcccccagcaggtgcgcctggctccctgcccacagtgtctgggtaggaagagttcggggcgggtgggagttaattgaaaggcaggcgtgtggaacgattgttggggaaggaagagacctgtagctggtatgggtgactcagccccgctgtcaggccctcacgagcaggaacaggaaggggggcagagggtgtgttaatggggagcagcgccatgcctgtgatgggcgggctctgctgcccagggttgggctgggggcccgccaagggtggctccaagttttcttggcagagcagcattaacctggggatgggagatgtggcctcctcttggcctgccatcagcctggctgctatttccttgtcctcccttgttttaccctagagggctcctgccaggagagcggctgctgaaggccgggccgtgttgcctcctacctggctgtgctccagcccttcccctctggctaccgggcttcctctggggtcctccttctcttgcaggaggctgggccagggaggctgccgtgaattgtcagccgtgctctgggccaggcttagcagtccggcctagctgggactgctgcagccggggagaggggaggggtgcagccatcgggaggaacaggggaacccaggctgagtaacacttcctgtttctctacaccccttactccaaacctgctggccagggcctggcatctcaaccctagctgctcccttcctattccccgggtcactgaccaccacattttcctcctgccttgctctgtgacagcgtccccatgcggggtaccgcggatcagggccccacagctctctgctacgggcaggccaccgcatcttgcaatccctggcctagctcacttctgtgccaactcaggtgtgcttcacacttctctgagaagctgttgggaccacatgatcatcacacagcctaagcggcaccgagggaggaaaaggtttaattcccaccgcagaccttatcagggcgtgggttggcagcttaggtcccgctgtagagctgcttctccaccctacagccttggcccattcagatggttgtttattattcttttgattatgggccctgccctccaggagccctggtgtgtagttttagaggcacgctggcctcatgcttgcctttttccccttcgagggtggggcattccgggctgcctcgggtagggctcccttctgcatcctcagcaagagccagaccacagggcaccgggcatagagagtgccagggtcagtgcccagcagagccaagtgcatccctgctcctcagacaacttcccttccttgggaacctaagaggcagaagctacggggtagagggaaaggggtgaagggtaaagggcccagaggaaatgaagggagacgagggcctggcttagagggcccgcaggtgattcctgagaaacagatggaccggagctgacgcggcctggggaaagggagggggagctggctgggtagaagccggcctggaggccaaaggtggcgtgttctgggggacacaggcgagccaggattccaaaaggatgctccgggttccttcccttcctctgccgtcctccctccgagactcttagaacgcagcactgcctcggcaccgtactcggagtctgtgaggctgtgccctgctgtccctgacccctccctgtccctgccctgtccgacagggctcagtgctgtcagagagggactacgagagcctcgtcatgatgcgcatgcgccaggcggccgagcggcaacagctgatcgcacggatgcagcaggaagac

SEQ ID NO: 1241900 - DNA, 4001 bp, Homo sapiens
aggcatgcgtcaccacgcccggctaattttgtgtttttagtagagatagtgtttctccatgttggtcaggctggtctcgaactcttgaactcaggcgattcgcctgcctcggcctcccagagtactgggccttaaatgctggaattataggcatgagccaccgcgcccagctgagaactcttcttgttatcaaatgaccctctttactactggttctagaatttcgttcagctttggctcaaaacataatgcagaaaacgaaatctagtaaaaacagaagacaaattagctgataaactttgttggcataattagtaccataaaatctggaaaagctaaatcttaaattaaaaattttttagatttccaggataattcacaaatgtttatagattcagaaacaaaaggtccattgctttatactttacatcatagacaaccactgcagttttctaatatgggtttcaccttcttcaaacctgatattcttaaaatgtggagttcaaactgactatagttaagaacgaaacaaatagccaatacaaagaataataaaaggatgagttcaaattatctgccacatgtcatcaacttttattaaatgataaaaaggttaattaaaattgtaaatgatttttcagaagaaattacatcttaaaattggcctgtgaaagtggcttgaaaggtataaaaatctaccagtagctggtattagctttcttagtaatttaattttcagttagagaaagccagaccactttgacctttcgaagtcctttggtatagatacatatacatttaaaaagataaatgaaaacaagccattgattaataatgcccatcgcagaagctgtaattataaaattaagattttttgatgtcactgttgatgttgaatatagttaatagaaaagcaaaaataaaaaataaaaaaggtctaattttgaggcactcttttgtctctgctcaggtccaccgtcttccttgctaatgtttacgtttattattaatttttccatttatttatttacttttaccacaattaggggacagagaatgaaacctaaactttttattgcttctgtaaagagtgaatataaatgtaagattttttttttttgagacggagttttgctcttgttgcccaggctgcagttcagtggcgcaatctcggctcactgcaacctctgcctcccaggttcaagcaattctgctgtctcagcctcccaagtagctgggattacaggcccgcgccacctctcctggctaattttttgtatttagtagagacggagtttcaccatgtaggtcaggctggtctcgaactcctgacctcaggtgatccacccgcttcggcctcccaaattgctgggattacaggcgttgagccccggcgcccggccaccaaatcctttttcaaaacaactcccttctttgacacagtgcaatttaaataagtatacaattaacaaagtacgtttttcttgttcaaaaccatcactgaacagtttgcaacagtagggtatgaatgcatacaatctcgatggtctttacaccttcagaggctattcggacttaaggaaacgtgcatttacaagtgtaaatgtaaaagctcagtagttgccttgtaaagtgcttttcggggttgtggggttgggggtggtaggagtaggtggtgcctcaaattatactagcgaataccaacattcccaaacatctagccctctgcctaaactcacccggttgcggtctgtcattttcgctcttctttgttaattttttcggcaaagtcagttttcatgcagcagatggcaagaaagccggtgaacgcctagggacgtggccttttaaccgcacccaattaaagcagcaaacagaagatgaatagctgggtggatcagtatgtgtaaacctatccgtttaatccggggagctgttttcccgggtgaaaccacgaattctttctggaggttgcaactcgtaaccatagcaactggaagtggtcgccggctcccggatgttgtggggatctgcggccgcctggcccagcttcccgcagccgcccggcggcggcctgcgctccacttcgggagtggtagttcttctcttcaccgctgccgggcaggaggcgcaggcgggactacgcgtcacggcatgcactgcggcgcccagccggtcaccgcctgccggctgcagacgcctgcgagcaggttgtttttataagaggcgtcattggcgcccgagctgtgaccgccgccactggggcagccagcacaatcgggcggaggtggcgctgccccttcaggtactgtactaggcgggcttagaccccgggagggggtttgtgccgactgtctgagtccctggccgacacgctcggctcagtagaggagcagtggcggggtccgcctcctaggctggggctgctcgggcggggacttgacgcctggtgtcagcggccgcacgggcgacctcctcgggccgtgcgcgagtgcacagctccggaggcccgagccgaccctggggcgtccggtccggtggtcttgcagcctccaaaccccgagtgctataccgaactgcgcgccaagggtgggagagctgacggcctgggccacccttcttccttcactgggcaggctttgaggtgcttgtcggtctggactgatgaaaatccatatggtaagatgttatgtgcgtcaccctgccgggtttaatgccagcctgtcttttgatgacatttgagcccccgtgatgtcaggaatagaaagattaaatattaaataatgcccggagacttccgctagcacgccagcctgatgatgatcaaatacctctccatatccttctccagttccagtggcctcctttagctttggtctccctaatcgatttgtcctcattagcagctgtcccatgcagtgccttgtacgcgttgtttatgtttagcactattgggagcgccaagtaaggtattttattgagtggtgaagtttgcactgttctgctctacttttattgaaaaacacagttgggcattcttgtagttagaatagctaactatatagtactatgaattttagatttgtctcctccaatctacaggatagtgcttgaaatatcgctattactgcatcgtatcttttaagattagaatcatattgggtcccacacgtctcaggggatatttatcacacacatccagtgtgaatggtttacttttattttctgagttcaggtcatatagcagaagatggagatggtgagggtattattttaattcatattttttttttttttgagagagggtttcgctcttgttgcccaggctggagtgcagtggcgcgatctcggctcactgcaacctctgccttccagtttcaaacgattctcctgcctcagcctcccgagtatctgggattacaggcgcccgccaccacgcccagctaaattttgtatttttagtagagacggcggggcgggggggggggtctcaacgtgtcggccaggctggtcttggactcctgacctcgtgatccgcccacttcggcctcccagagtgctgggattacaggcgtgacccaccgcgcgggcgttaattcataatttttaaccttttacgctgagggcggaatttcagtcaaaaaagctgattaaaaatcagcccaaatacaatttaaaggtgtgggaaatactccttcttagatgaaaacagtttagaaaatagtgtaattgcaattttgtaaaccatggaacaaaaagtgaacataacttcttttagaaatgacttaaagggtccagagcggtggctcaggcttgtaatcccagcactttgggaggcccatgcaggtggatcacctgaggtcaggagttcgagaccagcctggccgacacggtgaaaccccgtctctactaaaaatacaaaaattagcctgtaaacccagctacttgggaggctgaagcaggagaattacttgaacccgggaggcggaggttgcagtgag

SEQ ID NO: 1241901 - DNA, 4001 bp, Homo sapiens
gtggtacatatggtatgcaaatggctgtctatattgggaaacactgtagaaccattccatttgctgaaaaaaattctggaggtatctatggaaaatatcatatcttttactgggatagttaatctagaatcatctctgccagtgttgtactgaaacgggactgataagaacaacaaatacacgtttattttgtaccacgcggctgtcagtgtccggagtcccccgggcagagcgccccggggagggctgggccctcagagcagcaggagggcgcccagggacagctcaccctggcccagcaggcggccccgctcccggccgcggccctcgtcccgggccttgactcgaacggccaggcggcgcacttcgtcctccgagaggccgtcgaagcagaagtcctggtcaaaggaggccttgcggctgcgccccaccacagtgctgcattgccgaagcgcggtgcccggcggccgcaggacgaggctgaggcgacagctgacggctcggggcccgggggcgcctccggccgggctctcggcgcggagcagccggaggcggagccgcccggttcccggacagtactcggcggccaggcgcagggcgtcgccggcgcggcccagagccacggtgccctcggcctccaggcgctcgggaaacgggacccgggacgacggcgggctcgtggagggggcccgggccggggactgggagcccgcgcggcgctccttgtcctcgttcccgctggagacggagcggacgcgggtcaggcggcgactcctcccagcccgcagcgcgcgactcagcagcccgtcggggacgcgcaggaggcggcagccgcggggccgccgggcgagcgcgtcctggggcgggcggggacagccgggggccgcgggggtcgccgggcccggagctcgcgggacgcgcagggtccccaggagggcgtccgggccgccgccgccgccgtaggtgtgggcccggggccggggcgcgggcgggcccccgagcaggagcgactccttgcggcgcgtgtgcgggctctcgagcagcgcgcagaagccgtaggcggtgcgcacacggggcaggtgcggcagtgacagcgcggcctgcgagcgcgggtcccagtctgtgcggccggcgccctcgtccatccctgcttcttcgacccaagaattccggagcgcagccaaggccaggcggggcatgagccgtggcgggatgcagaactcagggatgcggtccggagtgagcacatttgcgcacgcggcggtggtgcgagacttggctccgcgggcccgacccgggagaagccagtctccgctccgccgaaggcactcaggacccaagcggagtcgctccaggcaccacatctggccactctctgctggagcttgtctacctgcagtgcacaaaggcacaaggatcgtcagagcgagtcccgcaaggtgcagtaaatcctgttccttttctcctattaatactttcggggtgtttcttcctgcctttcccgaaacaaggcaaactgctcttgcttgccgctattgcaaactattttttcagtgagcgaaaaacaactgtttttcttttgtcctatctcaactgtgttgtaatacacacttcggagcttgttttaatccctctccgccctggctggcctaaggcagagattcacaaaatgctggattgtaacttcagtcgctctgttctctgtgccaacgattgccttgcaatcgtttcctgactctttggaccatagcagtctagtcctcagctagaattaaagtaattgttattccttccgggaaactgtggctggttctccccttgcagaggcaaagagcctcagacgaatcccccagggaattaagcaagccgatgggtccctcctaaaatacctggagtcctgcgtcagatgggtctctgcacctttctgcctgggacaccgaccaggagaggcgcttagcggctgggaaattcaaagcgcgcgcggcggggttcagcaccagtgttcaaggactgccagcctgagcttttatacctgccgctgggagcgcttgccagtgggccgagcagaggggcgctgcctggtaacctgacgccaggctcttccctgtccctctgccacgtggctggatttgctgagcaaggtttggagacccagttctttctctctccggcttcaggtggaggtgttttcctcggaaaccccgaacaagtttctgtttcctcacatgcaaaatggtattaagtctctactataccgcagagtcattgtgaggatcgacgggcgtaatgaatgtgagcacgtagaagtactctacattcaccattaaaatgaagacaagtccggtttgtcttattcttgcctaatacccttccccaaatccagcttcccagttgcccagctttcgaagttctttacttgctttccggttttcagttctgattttagatgttcttttctgattataaacccctctgggttagggggaacatttcatgtcttgatcagggtggagttacagaggtgtatccatatgtaaaaacaatcaactagtgtacacttaagattagagtactttattgtatgttatacatcaatttaaaaaatcacaatctacttcttaagccatgtgtgctgattttttatcgggaaaatgtacacttgcatgcatctgggcagttggaatcatcctttggaggcgccctgactacatctggcctttctaggctgtgcccaccagagagacccttttccttccttttgaaaactaacctgtgttcattttgtaagagagttgcttccagttagctcaggctgaaagagatctgaggcattttgttcagcgttcaggcagatatttctgcctaagatactgccttgcaaactattcacttgtctaaataatatttaatgaattaaattgaattcatgcaaaaatgatttcaggatagggcatgtgcattttgtttccaggacacacaggcactgtgctagatgatttacatatagtctgtagaactgtcacagaaaccctgcatattcggatcatccttattttatagatgaaaactcagtttcagaggtcaagtatcttatccaaggtcacataatgatgggaaatggaggaaatcatacctactaatgggtataaatgagctgtttggggaaataataatgtaaaatattttgcaccatgtaacatggtaagtgctaaatacatagaactgattattattaataaagatagaaggaaagttgtaaagtatagtggttaagaaaattgggtctgaaattggatctactgttaatgccagaatggttgctatgtgaccttgagcaagttaactgttctaagccacagtatcaaatttaaaattaataatagtgtcaacctatacggttatcatgagtataaagtaagatggtgaatatgaagagttcagcatagggcatgacatacacaatgtcggatataatattattattacagaagagagcaaatgctcattagttcattcattcaaagtaacatgtactgaatgttttctaggttccagccatcatgttaggcaagtggatacaggttggctgtacaagatcatatcagctatgtaaatccataaatgatggagtaaaatgatgaggataaactatttgaattccatctgggtgaggcaggcgtgagaagagactaccgaacattatttatttagttatttatttttaagacagggtcttactctcttgcccaggctggagtgcagtggtacaatcttggctcactgcaacctctgctttctaggctcaagcaatcctccaacctcagcctcccaagtagctgagactacaggcatgagccaccaggcccgactaacttttttttttttttggagagatggagtttcaacatgttgaccaggctggtcttgaactcctgggctcaaagtgatccgcccacctcagcctcccaaagtgctaggactataggtgtgagccactgtac

SEQ ID NO: 1241902 - DNA, 4001 bp, Homo sapiens
atagctattccctagataacccatctattggaaggtcctccacttccctgttttcctcaccaatttttgaaaaactcacttccaaaagaaaactttctacaaaaaaattttcttcccaccagggtatatacatccttataatacaagtgtctcactctgatgtgtgcgcgtgcgcaaacacaaattaggatattacctatgccgcatcaatatgtaaagctgtgtatatgaatcgtaacgttgggcatgactctgaatgaataacttgctttattaaaaaaaaactgtaacattgatagaaaaccggaaggaattaaaaacaatgcagatgggtgtacttcctttctctcccagtcccaagccaacccatttttccttggaatgcaaaaatggtctggaaagagatatgggggtcctgtgaacagaacagggagtcattatctttttcttctttaccaatagacgatgacaaatgtggatggtgaggaagtaaaacgtcaataaagcagtatcataaataaaaaaataaataacgtttattctgtaccacgcggctgtcagtgtccggagtctccagggcagagcgccccggggagggctgggccctcagagcagcaggagggcgcccagggacagctcaccctggcccagcaggcggccccgatcccggccgcgaccctcatcccgggccttgacgcgaacggccaggcggcgcacctcgtcttccgagaggccgtcgaagcaaaagtcctggtcaaaggaggccttgcggctgcgccccaccacagcgctgcattgccaacgcgcagtgcccggcggccgcaggacgaggctgaggcggcagcggacggcgcggggcccgggggcgcctccgaacaggctctccgcgcggagcagccggaggcggagacgccgggttcccggacagtactcagcagccaggcgcagggcgtcgccggcgcggcccagagccacggtgcccttggcctccaggcgctcaggaagcggggccctggatgacagcgggctcgaggagggggcccgggccggggactcggatcccgcgcggcgctcctcgtcctcgttcccgctggagacggagcggacgcgggccaggcggcgactccttccagcccgcagcgcgcgactcagcagcccgtcggggacgcgcaggaggcggcagcggcggggccccgcagcgagcgcgtcctggggcaggcggggaccgccgggggccgcgggggtggccgggcccggacctcgcgggccgcacagggtccccaggggggcgtccgggcctccgccgccgccgcagctgtgggcccggggccggggcgcgggcgggcccccgagcaggagcgactccttgcggcgcgtgtgcgggctctcgagcagcgcgcagaagccgtaggtggtgcgcacacggggcaggtgcggcagtgacagcgctgcctgcgagcgcgggtcccagtccgtgcggccggcgtcctcgtctgccgcgcggggccacaggtcgctttcagcggcgcagcgccggggcacggcggcggcccggattggagactcgagcgtgcaaggggccggcagccgcggcgggatgcagaattcggggatgcgattcggcgtgagcactttggcgaaggcgggcttcggcgcggagctgcctgcggccgaggaacagagtttctcgaggagccgcatccttggaggctggggctaggagtggcgggaagaggtgcgcctgcgggggagagaagctgctgagtttgggcgcctggagctgctgcagcccctcgacgcggctggatccctcccccagaccctgtaaacgtcccccacgtgtttaagaccccagaccagttccagccttcctctcccctgcacccacaacaaatcagccccgcttcagacctttctctcttcttcagtgtctctggatctggttgcaagctcagtgccagtggcctctagcccgctgccgaggcgccaccttcagtactgcggccaggagagtggcgctcccctcttataccgtaggctgagtcccgcccagccgccagcggcccaacccggaggtgctgcacagcccgccttcccgccaccctctcccacgacgccgggaggtctgcatgcactgggcgctcaggtctgcgcgaagctgtcgcgggagcaggcaccttgtggtcagctctgggacccgcatttgcagtgagtgcgtggagccccaggcaaggcctgggaaaggttgcaggtgaagagagggcaccctgtcgtcctgccaaggaaaaattggcggctgaaaatgtttctggcttcttggagaaggtgaggctggacgaggaaacaggaagttaatttggctaggagataaaccgtcactcaccctgcatgtaacctggacgtgacctgcacgtcctgggagcttctgttttcctgtccccacgcactcgcagcgtgcagaccaatatggtttccagttatttatatacttatttactgtctgtctccctctgctagactgtgctctttttgatagcataggccctggctcagtccatgccctaagtactggtgaagtgggtaaattaatcgttgagaaaatttctgatcgcttcttggtcttttggctaagatcaagtggagaaagcctctgaatggctgcaggctctgcctgtcatcttgatagttacaaaacatggggcttctggctcctgccctaaaataacacttgacgtttttaaaactacccctttttttttgctctagcacggaggtatccagttagaaagcaccttcccgaaatatagattccttctttccacccccgaccttcattttctgagatgtgaagactgaaatcccagagggacctgaggaaattccagaaaggttaaaaagagccagttaatggcagaagctggaactagcaatttcctgtttctttggctttgcatgtgatgcttcctgtgatctgaaatgccttttctctgctttttctttatataggaattcctgtttattttctgtaattcagcccacgcatcgtccctttcaggtgccttcacccacccagccgccgcggaactcccctgctccagttcctcagtccctcctcatttccttcctacatctaggggccaccattgttgcggttcgcatgctgctttggaattttcggtttacagttttgtctccccctaatagccttgtgggttttcagtgggcaaggactggggcagctcaaccagaaggggatttcgggagtctattatgaataaatgaaaaataaaagtcctaagatcaagaactgggattgcctccatcccggttgccttatccaggctacaagcctggctgtcttattcgtctctacgtaattctagcacccaggatacaatgccaggcaaatagtaagggcttagtaaatatttgatgaattgtattgaattgatactgatctgcaggtcttatgactgtcaggtgctatcaaccacatatctctctacgtaatttgatttctttctcacagaaaaccaataaggaagacattttttctgtttcccagatgagaaactgagggacttgtctagggtcattcaagctatgatcatagcgtacatagagcctaagtcctagctttttggctaatttcttctaattcattccgtctttcctttcttccttttttctgttcttccatccttcctccatctattcactcagttcaatataatgcagagtctactgtgtgatttgtatcgccctttacacccagaatgttaattcttacagcatctcagtctactgttaagtagtattttccactatacttgctttggaataagccccactatttttaaatccttaaaggtgaaaagagtaagtgtttctctgggctaataatactttactgcttaattgacccacaggttccgcatcccccaattcaaccaaccacggatggaaaatatttggaaaaaataataatacaaaagaaatga

SEQ ID NO: 1241903 - DNA, 4001 bp, Homo sapiens
ccaaggaaactgcatgagaatttacagaataaaagctgtgctctacccaggggtaggcagtctccttcctcagagtgaggcgaaagtggagttttgactacaaacttccccagtcccaacttggagaattgggagaggagataaggaggagggaaagggagagggaagaggaagagcagggaaagtagggaagaaaggaaggggagggagggaagagaacagggaagggcaggaaaagagagagaagggaggcagagctgccccagagtgagaggagcaaccagctataggaaagagggccaactaatggctgtttctccctttggtcttggagcaacttaggactaaagagatttccagggaaactttggtctcagtgcagctttcgtaaaaggaaacatgtaaagtttgtggttttaaaacttgattttcacttttacatcgctcctttctcccaacttctgttacatcgcttctgtttctccctgaccagatgagggagataatatcaagcacatcatgccagctagttgactggaatttaattaagagttatccacagcctggctcccctgcccttccccatgggcactgtgacctccaagagaggaggctcagagcttttatgctgctgagcaggacacatttcccaccaccactgcctcgccaggaagaatctagtttcagccagtaaaatcactttcggtccaaaatcactttcttattccaaaagattaatgaaccagccttggctgtacacgtgttagctcactggcccggcgtgagcccacagttcaggtcccctctgccacctcctcctgtcactccacggagcctccattcagtccctcagcctccagccttttgggatttagtgttctaattacaatcagaaatatgctgtgtgtgtgtgtgtgtgtgtgtgtgtggtttgtgtgcgtgcgcgcgtgcgtgtgtgtgtgtacgtgcacacacacgtacattcagcatagtagagccctcctggagaaaaacaatgattaagaatgggatgcatcatccctttgacttgtaggtaagacttaatggtaaagatcctctcctccaaagaaaagcgcctaccactgtctgcgggttctgcacaggggcacagcaaacctttctctgtgcttaccccaatcagaatgccacagtcatgtctctactttctaaacgtggatcaggggaacgctgttttaaatcttggctttgcatctcctccctggttagcaagttcccaagccacatcttcagagctggcggtgcccgggagtacacgcaaacattttaacaccaaatctgcgccaagcgccactagaaagcaacgtgcttcccgacccaacctcagcaaaggaaaacggagcatcctttcttgagaatctactatttggtactacaccttccctgctccccgcagcaatgattttactttatcattgaagagccttcagcccaggggcggctgagcgctcaggagtgttaggaaagaagcaggcggaaactttaccgttcactggggccgggctggaaggctgttcctttaagatcaccagcaggagcacggccgccgcgtgcaggctgcgccggggcatcttcgcgggctcctgcggggcgggcgcgggctgtgccgggggctcccggtggccgctcgctctccagctgcacaccgggaccgcgtgcgcgcagcctgggtgccgtggcgagtacgtccgcccttcgctctcctggcttccccgggcagcttttatggagcaactcaacgccaaacacttgatgtcatcgtgcggggagggggtgggggaggagaacgccctgcccaccggagggctggcgccccagatcctaggtgagttgtagccttgacttcagcagcactctgcgggtccccggcgctcctctgggccagggctgacccaggaacacagttctccgaggagctgctggcaggcgtgggtgagatccgcctgtctcacatccagaagggtgcgtctagggattccttcagtggcatgcccttggtctgtcactggtcctgtaacagcccaacgagttcaccttgcccgctgcttagacagagcccatttatcaagacaggggagttgcaatggagaaagtaattcacgcagagcttgccgtgccggagaccggaggttttcgttcctttgtttgtttgtttgagacggagtctcgctctgttgcccaggccggagtgcaatagcgtgatctcggctcactgcaacctccgcctcccgggttcaagcgattctcctgcctcagcctcccgagtagctgggattacaggcacatgccaccatgcccagataatttttgtatttttagtagaggcggggtttcgccagtttaaggctggccttaaactcccgacctcagataattcacctgccttggcttcccaaagtgctgggattacaggcgcccaccaccacacccggctaatttttctaattttagtagagacggggtttcaccatgttggccaggctggtctggaactcctgacctcaaatgatccacctaccttggcctcctaaagtactgggattccagtactcaaatcagtctccccaagcattccgggagttgtttgtttgtttgtttgttcagacggagtctccctctgtcgcccaggctgaaatgcagtggcatggtcttggctcactgcaacctctgcctcacgggttcaagcgattctcctgcctcagcctcctgggtagctgggattacaggcacgcgccgccacacccagctaatttttgtatttttagtagagacggggtttcaccatgttggccaggctggtcttgatctcttgatctcgtgatccacctaaagtgctgggattacaggcgttgaaccactgcaccctgcctctgggagtttttaaagataatttggcagataggggcttgggacttggggagtgctgattggtcaggttgcagatgggatcacaggggggttgaagtaacgttttcttgcagtcttctgttcctgggtgggatcgcagaactggttgagccagatcacacacggtctgagtggtgtcagctgatccatccagtgcagggtctgcaaaataggatgttagattttacaatagcgatgttatccccagcagcaacttgggaaggttcagactcttgcagcctgacgccgcaggacccctaaaccataatttctaatgttgtaactaatagattaatcgtacaaaggcagactggcacccaggcaagaagggggtcttttcgggaaagggctattattgattttgtttctgagtcaaaccataaactgaattcctttctaaggttagtttggcctatgcccaggaatgaataaggacagcatgaaagttagaagaaagactgagtcatttaggtctgatctttgtcactgccataatttcctcagttataatttttgcaaaggctgtttcagccctactcagaatcccccaagtatagtgccatttgggcaaaagcctccttcatgcttttttttttttttcttcaggtgcctgcctggacttagcacaggttaaggaactggacaagatagttacattcacatgagtttctgccaattgttcagtgcatcctgattaagttcttaccttccaagttgagatgcaaagagatgaactgagaataggagaacagcacagtggggtacacatgaagagcttatcacaattccccttagtaacgggtaagtagatgggactcatgctggttcaatacatcattccatcctcactaggaagctgggagagagggtccctcttttggggtggcagcagaagaaagggacttacattatttactgagcacccgttgtgtgtcaggcacttttttggggggcttagaacatgataccccaaagtatggcaccttggcatgctgagtactttgaactgaaggaaactgaaaaggcctcagaaacaaggtctctctgaccttctc

SEQ ID NO: 1241904 - DNA, 4001 bp, Homo sapiens
agagttccagggttctacgtggaggtgcccacctggagctcacaattcctgcccctctggaccaagctcagaatacccagaactctggaactcctgcccaggtaaccctaaccccacttggctgggctctcaggaccctaccctggatcacaagggcccaaggtgcctgtaattttatctccagtggtcagcgaaggactcactgagaaggcgatgtttcagcaaagacctggaggaatgggatgcctcgggggactctcaggcccattgacgtccactgttgggacaggtttcagggtcacaacctcaagcagcagctggctgtgcctcctgggcctctcctgccaggtgcaggggggctgcagccatgaggctcccctggctcaggtctgggcccccaagttctttgtaacgcaactctttgctcttggccttctggaaatagaaccctgcacggtgtgaaactgaagcctggtcgagggctggcagagtaggggacccagggaataaagtgctcacgcccaaaccaggcttgatgccagggcaaagggggctcagtggaccctccattttacagatagggagactgaggcgcagagagtagacgcatcctgccagagagtgcagacctggcctctgttctgtctcaattacaaagcccctcctctttccctgctgccagccatacctttaatggtctctctctccatccccagtcccctcagtccccaaatccaactggtcaggttctggagggaaacctagtaagttctgtcttagcgccctggcttgtaagtcacactgacaagtataaagccacatgtctattttggaggcttacccccaacccccaccccgccaacagcagcctccccgcagctcttggccctgggtgggcccagctctcccacagccaccttccttcccaccaagaaaacatgagcagagcaaattgcctaatgagacccatattttgctgagttgctaatcaaagaacaaacccaacctaccattaatttggtcttgggaaagaaacttggcctgcagcagagaaaggaaaacagtcaggggagggctccacctgaggttcacgcccccagccctggccaggccgacacagaccctcacactcaccattctggggcctcggctgctacccgtgggcttgctgctcccagaaccgcgttcagttccctttcctccagcctcaagtctaaagtctgccaagctgggtggaggcccgggtaataaatgctcggctgccatggagactgggcccgacgccaccagggtcagattccagcttcctgagcacagctcatgacccgccacctgggcaggttggatttttgaggaaatggggctgcagaaggctctccctgggctcagagtctctgcctccagaagccgaagcaaagggacaaatgccagtgtttcttcccgggagccctggactccaggaaggggtcttctctctctctcctgggactcggcggggatgccatcaggcccctactagagttggacactttacaccccgggtcgtattgaaggctcctcacacaccatcttgtaggaggaagggaacccttccaagacggcctaactcagagatgggcaccggggctcgcaggcttggggctcggtattgcagggatacaagcttcggtgctctcaggctgggattcagtcctccccgtctgctgacttgctgagtgactggcgaatcattctacctcagtctgtgcctcagtttcctcaccagctgaattacagggcagctggcaaaatcaagtggccagcgcacagccggttcccatcctgtgccagttcagttcccaccttctgaggactttaagggtggtggaggggcctgagccgggtctccagccccaccacaggctcctcgggggcttggagtgaggcctcttagtgccggttaccctggccaggaaggctccccttttcttccttcccttcctctctccaccctcagccccaccccttccgcagaagctgctgacgctcccaagtcttcaggagttcgtgctgctcccctcccccacataggaggaaatgggggcagggtgtgaggcctccccagcttcttccccttgagatcccatttccctgtttggggcgtgaggcttttgtccacagctgagtctatgaggctctacaagtaggtgtggctgcacaggtgtgccctacacaaaggcccccagcccaggtgcgagtggttgctggccaggggctgcactgccaataggaaggggggcattgtgccactttgcacacaggcgcatagacgggaggcgctgcctgtgccccactctcccctccccgctcctttcctgaccgcctctgtgtggaaagtgtgcttttctcccaaatcacatccccagaatcgctttacacctgtttctagacccagagaattttagctggggactccgactcctccctgtcagagtttgaggctccccctcccaaaccccatggcagggataagaggagggaaggctgcctctgtgcagaggatggagagaaggacatcaaggaaagtcacttgggactctggaagcctgaaggcggccaggccaacatgctccctctgaatccccttgcctgtgggaaggggctccagaagagatgaggtgcctccttggagttaggccagtgtgtgctggggtgccccggccaactccctccttatgtgtgtaggtgtctccgggggtgacgcacagatggaaaacaccagcgtggggcaatggctgcgtgagggttcacgatacagcaactcaccatgctgtagggcgcaccgtgtgtgctacacctcagcacgaaagggagaaaagacaaaaaacacctctaacaccacttggggctgtgactgtatttacttcattcttgaatcccgcgtccccgtggctgggggctgacacatccctgggcaccactgtgacttcctgtgggtcccttcccttctgtccctgactctgtagaccccccacaggaagggtcctaggtagggggaggttcctcctcccttgaaaccctgggccactctgtcaaggcaaagcctctgggcccagcaccttgtaaaggctttgatgagaggagctctggcttttgctcagggcctttggcaccccaccctccagcccccaggaatgcaggcgctcaaagcctgtggctaggctgcccgaagcgcgtgccgcagttcttctggagtgggagcagggggacagagctttgggtagaggagggtcacctgcaaagctggaatgccaggggagtgggcggtgcctccagctcctgggggccagggtgtctccatacctcatgggcctgagcctgggcaggggtctggagtgcacatagcccccaggcagggagagggcagtgacaggacagagccactcatctgtcccaaagctgcacccaaggggtgtcagcaaccccaacctactgacctactttgggaccacaggcccatctagtgcaaatgaggcccagaaaggagaaatgctttgctcaacagccacagtaggctgacgtaacctatgtaatgtagggtcagggtgggcctgagggatgagccaggtggtgggcaggtgacacaccaggtcccctcctggcctctgccccacccagccctctcctgcacggctaccagaagatgtccgggaagaacagactagccctgagtagggagtgtggtcaggtgcagaggagggcaggggcccggatcctggcccagaaacactctaaaacagaatccgatcctgagatgatccaaatcaaacagaaacttgacggaaatagtagagtctgaaaatgatgcactctgcgcacacatatacaagacacacacacacacacacacgaatccacgcacacgaggcacaccccactcatgctctcggtctctggttacacacccacaccccccctactcctgtattcagatgccctccatggcccaccctcccacccag

SEQ ID NO: 1241905 - DNA, 4001 bp, Homo sapiens
caggtttgttgttgttattgttgttgtttgagactgggtctcactcctgtcacccagcctggagtgcagtggcatgatctcggctcactgctgcctcaactccccgagttcaagtgatcttcccacctcagcctctgagtagctaggaccacaggcatgtgccaccatgcctggataattttttgaatttttagtacaaaagagataggttttcaccctgttgcccaggctggtctctaactcttgggctcaagcaatcctccagcctgggccttccaaaatgctgggtttataggcatgagccaccatgcctggcccaccttaggttaaagaaaaccatggctaatcaatagtattgggtctcagcttgtcatcatttcctcagagagggtttgtctccctggaccaggttagctctccttgccacatgatcctgtggcacccagaacatcgtctcctgacaatgtcactcttgttcaatgcccatcttcccttcaggaccctaggttccaagacagctggaattttggtctttcttactcactgctgtccccccagttgcttgcccagtgctggcactagtagatgctcaataaatatttctcgaattaagaacaagagtcacactggagggatgatcagagaggtgagccaggggaatgtgatttccctcctggcgatcactgtaaatgaaacccagaggctgggagagtttcctaaaacagaaagttttaatccgggctctgtcatgtgcccactagatatatttcactctagtgtgccttgactcctcacttatgaggtgaggtaggtggacaaaagcgattgctaggtctctctctctttaaccccaacattttatgcatgaaaaaatattccttgcctatgactcttctctttctagggtttctgtgtttcagaaagatatggccattggtaaattaaagaagaataacatcatgattttagccagagaaactgaaataatcttacaaagatgaataatatttaaaacgaacaggtacatctgggctgtctggaatttgttctgagaaaggaatatttatttttacaggatgaattaaactgagttccacccacttttataaaaagcaagatttttttttttttttcagagagaaagagccagagcataagaatcagccccacctcctgcgctctccctctggattttgctgagatttggtgaaatatctgagacctgttcctctcctccctgcttcacacttaaagacagagcccagcagagctgctgccaggatccttcccccagtgcccatgtgcacagctgagctgccggaggtgctgagtgagaggactcctccgtggggggaaaacccagccagcaagcaggaagctactcaccggaggtctcttccagacgaactggatggggaacttctggctataaaagagagaggtctcatccggtgggaactcagggtccacataaagaactttcttttctagacatttcttgtgaagttgctcgaatgtcttctctttcactccgataataggaaaattgcggctgatgatggctgaatagatgccacttgggtttccacccccagcctcagtggccttgctctgggccgggtgaggaactggccctggggaccggggctcagccgctgtccttggagccacagatgcgctaatgacggtcggcatggcaagtggctttggaagaaaaagctttttaaagaaaataagatacagctaccttcaaggaaaggaagcaactgcaaaggggaagttggagtaattctgtcatctgagagaaaagtgtccacatccagttcaaagttgaaagcccatcagaaggtcgtacaggttatgtccatcttaaaaaccgagctgtgattctgaagccataagttctcctgagaaatgagtgctaaaggatttctgaagcaatgttgacttgggggtctcctaccagcagcatgcatgccagagggagagagaaagagagtgagggttgtgtttcagtggcctgaagatgcttgagccaggaaaactaaaaatagatgtgaagaaacactgtgagtatgagagcaagagagactgcatggtagagagagaacctggctagggacatttctgttgccatgaagtgctggtgttgccagaaaatgaaaagggagtatctgagtaaggtgaacactggaaagaagctgagaactgctgacatgttattgagtaggcagttatacagaccacccaactactggccatcaaatgaatggaaaacaatattgcaaaaaagctagttagggtgaacgggaggtactgaattctacaaaaatattctgtgaattttagagaacatgatttttagtcctaaaattttaggatatcagaacattattcaatgttagatttggtatcttttttagaatgttcttgggtcagcgctcattggaaatgtctgcatggaaaatgctactcagcagagtcctcatttgagaaaatccctgtctctacctgcacacttgaccttgccacctcttgtctctccccatccacaaaatgaacactgggactgaatctgctaaaaagtggtcctgctgggccatgtggctcacgtctctaatctctgcactttgggaggccgaggcgggtggatcacatgaggtcaggagttcgagaccagcatggccaacaatagtgaaaccctgtctctactaaaaatacaaaaataagccgggtgtggcggcgggtgcctgtaatcccagctacttgggaggctgagacagaagaattgcttgaacccaggaggcagaggttgtagtgaacccagatcacgccactgcactccagcccaggtgacagaaagagactccgtcttaaaaaaaaaaaaaagtgcacctgagcagagaaaatcctcacttaacatcatcgataggttctcgtaagctgtgactttaagcaaaatgatgtactgtatagtgaaaccaggctaactgatataaacaagagttaagtccctacagcacacggtatgttttcgttaaagtcacagtttacaagcacctatcaatgatgttaagtgaggacttactgtacaggttatatgttgactcattcagccatgccacattaggcatctgagacagaagttggaattagatactgaaccagactgtctgtcaactcctgggatgtcacacctggtttcagggctcttagatgagagcataagtggctctggggaagggaagtgcctgcctggcctccaccttgtcttctacccacaatagctgctccctgggctgtaaggagatgagcacatttcaagtatggcagagtggaggcatgtcctaggctgcagtcatgcctgttcccatgcgaccagtctcaataatccaagattagaggctatggaagaaggtgggaagtgacaggtaaaatagggagtactatcagcctcctgatccctgggattgcggctttgaaggactctatgtctgggcttgcaggaaccatcagcctagccatctgtccctccaagaaaatgcccagggctttttactagtcttggagaggcagaatagaggacagtggtctctggtgactgaccacctcggttcaaagtctaggttggccccttattggctgtgcctgtgtaactttaggtgagttatttcttcctttctgtctcagatttctcacctataaaataggtacaattacagtcattctgttattaggttttggtaacaattaaataatttatgtaatacattttacacagtgccaggattttcttaagcactcaataaatggtgttgttagagaagacctgaatttaatattactttggagttagatcaggtcgaatgctacatttactcgctgacgcaaatcagcatccactcaatgggcattaactgaatatctgctatgtggacagcacaggaataggtataatctgcccaggctcatgtggtatgcagcatctccaatcagaagct

SEQ ID NO: 1241906 - DNA, 4001 bp, Homo sapiens
gatgacacatgtgaaaagtaccttgtaaggtgtaaagtgtgaaaaagcacctctgtttgagtgcccatgctgtgccagacacttcacatacatcacctcattgatgaagcctcacaaaagccttgcaaggcacattatcatccccgttttactgagtaggaaactgagtgagagggattacagaaattgtccaggtcaccccgctggtaagtggaggatccaagtgtcaacaccaggtccggcaccagcttactttcttttctctatgtgtgaaatccaatgttatccagtctcagaatccagtgttcgctgcggctcttgtcatcccttcctgtggccttgttccctccgattgttcaaattgcttctcctttccaggaccctcttccatatttcccagcccctgaactgcctcaatggcccccggtgcttaaggccgattacttctggccatgccaaagtaggatttgcagtgccaaggagggactgctcagcacagcccagactcccattccctctgccagtgcccattctcccctgcaccatctgtcccctgcatggtcagggaaggggaccctctggacttttcgcacagaagatctaaaccactcaccactggccgatccacggagatggtattttcaacttccctgtgaggaatacagacatgtggggtctcagtgtcaccagaagcaagcaggaggcccgtggacggtttgctctggtgcacggcttcctggcagccaagccagaaccagcctctagagaacccctggaacaccccaaccccaggaaccagccccatgtcagcaccatccccgacagccaagcccaggcacgcaggttcttgttagtattgctcagagccccccaaaggcatgacccagccacctacccatggacctggtgcatcttccaaggacagagatcagagtggcaggggctatgagctcatctgtggtggccagggacaggatgtggctttcctggccatgctaacctaaaatttcaagcatccccaacacctcctatccctcttccctactttatttttgctccatatcacctctccaaatctaacatgctacatatgtttttcctatccattattgtctcatgttagaatattaagctccatgaaggcagggatttctttctgtttacttcactactctatccttagtgcctaggacagtgcctggaacatagtaggtgctcaataaatatcacagaatggatgaatgaatgaatgggggtaatgtggccagtggctcaggagcagcagaaggaccctggaggagacgtgtctagctgcctcatgccttcaacctctggagtgggccatgtgagcttttagaaacacgtgggaaagctgggccagcactcactcagagaggttcctcttttcagagaagacccggaggatgaattccccctcctggtggggctcgtaggtggagggcacgatgacgtactcgctgggaggcaggcggaagcgctgggacacctcccgcatgttgatgtaggttttgctcctggccttggaggcgttgtacaggaagaagtccttctgcaggtgctgcttgttcccgtgcatctgagagatggggagagcccagggcacatgagcccctcgggaggaacatcctgtcctgccacagccacctccaagggtcccttcccaactccctggtcacccatgtcacagtttcaacctccctacttccgactcccaaggcttaaatagcctccctacctcacttcctcttccttttctgttgtgattcagagtgaatggcaaatgtgtcatccccacactcagggacacttaccagaacagctgctcctcagctccgaagcccctcaggctggaaggacccccaaggaggcctagaggacttggctgggttctgagggaagtgattcctccatcccaagcgggcagccaccctcagaacgcgtctgtgtgactgtgtgtgtggctgtaagcgtggaggagggtgagtgtgcaaaggcatgtgtgtgacgtgcagtgtctggtgcgagggagaaagtgcacatcctgggggtggtagtcatgggtcatgcaatgccctgaggcacctgctctgcagtggaaataacacaggcaaggccctctcctatcacagtcctgcccacaaaccccaccaggaagcttctcgacgagccacagacagactcggggccccctgggtagtgctgcacacaactgctggccgctgctgctgctatacctctttgggaaccttgagaagaaacagaaaggaagatgcttcagatgtgaatgaggatgaggagcctgcggaaggcaatgccagcaactgcagcccgcatgcggaagcctgacccccaggcacctgttctgccaggcccgctccactgcctctctaatgccccccctggtattttttgcttgttacaaacacaagtggtcctgataccaggagctctgtgggtcactgggtattgaggaagccagagggcccctctagaagcccctggaagcgtcctccctgggaaagtatgtttcctgggctggagccaatcaggactgcacacctcgtagatggcgaagccaatggtgaagagactggcccctagcttccggtccttccgccggttcttctgcatcagggccaccaggaagctgcaaatcacctccgagtcatcagggtcatcgtcctcctccaggagcttcagacggtactgagggttggtccagaaagtatctgcacccccagaaaggaagcacgcattcacagctgcctctcagagggcaggaaggggatgagacagagggagccatttatttctattccctacatctaggtgcttaggaaatatcaacagaaaacacgattcaggcatttctctaatgatttggggggggggggggcgctacctttattcagatggagctgtactgattgtatgtgtggcttttccttcctctctgggctttcattctcagtctttgctgatggttttgttttccttacctgccccttaaacgctgttggtgactagaatctggtcctgggcctcttctcctctcacctcacccttcctgcctccctaggcaatctttcttacttctgctttttaactgccccctacacgcgcatgatgcctgagccatatatcccagcctcaatctctctcacttttttttttttgagacggagtctggctctgttgcccaggctagagtgcagtggcgcgatctcggctcactgcagcctccgcctcctgggttcaagcgattcttctgactgagcctcccaagtagctgggattacaggcacccaccatcatccccggttaatttttgtatctttagtagagatgggttttcaccatgttagccaagctggtctcgaactcctgaccacaagtgatccgcctgcctcagcctcccaaagtgctgggattacaggcataagccaccacgtctggcctcttctttcctttattcctcaaatattttttgagttcttatcatatcaccaagtgccatctaatatgcgcatccgatgctctattacaaatcttcactgggacactctacaggaacctcaaactttccatgtcccaagctaaattcctttccctagaaccccacaattaactccaccaaaaacaaacaacacgctgatatttttctcttgtgtgtcttttttttttgaggcagggtctcactctgtcacccaggcaggagtgcagtggcatgatcacagtttattgtagcctcaacctcccgagctcaagcaatcctcccacctcatttttttttttattttttgtaacgatgaggtgtcactatgttgcctgtgctggtcttgaactcctgggctcaagtgatcctcctggctctgcctcccaaagtgctgggattataggcatgagccacccacccgatcttcttgtgtgtcttatgttgcaatgttgtcaggtccccaactgggaatcttgacatcatt

SEQ ID NO: 1241907 - DNA, 4001 bp, Homo sapiens
gtggccatggagcatccctgccaggcacacactggcaggcccgagtgtgggtctggacaacacaggccttgaagtgtagggggctggcatcagagaaagagggcaagaaacacaggttttggagtaaacagacatggtttccagttccattttccccactcattagttctgttccttgggcaagttcacttctttgagtctatctcacctgtgaaaggggaaaaataacagcacctactttgtagatactgttataattgggggggaaaaaaaagagagggactgaccccaagcacagtgcctggaatgtggtagtgcctgaggagtgtcagctctggtctgggccagcaccagtacctggaggacccctgtgatggatccatcaccaccaggcaccaccagaaatgctagcaccaaatctgatggtgtatgatggcctcttgtggttcaggacacggactctggacccagactgcctggctctaagtactggctctgcccctctctggctgtgtggccttgggcaagttagtcaagtctgtaccttttctccctctgaaaatggggatagttatagtactaatctcatagggctgttgtgaggaaggaattaatcatggaaagcacctaaaagagtgcttggcacgtagccttcccccagcaaatcgtagttgtcattactgcacgctcggccccagcagaagctcaggaaggagggggaggaagaggcaagtctggtgcatggatgcatatgagctcacacatgcacacttcacatgcatgcacatacatatgcatgagtacacacacttcatgctctctacccacacacctaccttggtttttttctttttctgcataagaaaaggaaacagtaaatgcagaataagtgaaaagtaagttctcagaaccgccagtggcttttggcttccctgtatcctggtctttagcttggggtggggctccagggtccagaaatctgaatcacatggagccaaaaaggggcatggagggtgaagggagaagagaattcttctttctcctccatgcccagacaccagtgactgctctgactttgtttttataatctactcttactgcatatggcaaggaaaaagatcttctggctaaggttttctttcttccttttttaaaaaatgaaattggtggccgggcgtgctggctcatgcctgtaatcccagcactttgggaggctgaggtgggcggattatctgaggtcagtagttcaggactatcctggccaacatggtgaaaccccatctcgactaaaaaatacaaaaattatccaggcgtgatggtgggcacctgtaatctcagctactcaggaggctgaggcaggagaattgcttgaacccgggaggcggaggttgcagtgagctgagatcatgccattgcactccagcctgggtgacaagagtgaaactccgtctcaaaaataaacaaataaataaataataaaaaaatgaaattggttactaaaacaccaaaaacatggctctctcaaactgacctaacaatggattttgacttacagaatattttttaaaaatttttgagcaagcatttaacatagggagattttctttggtaaaagccccagctgtggcaggctgccctgggcctgtaatccctgcggcaactatcagctgagccaagggccctgctccctgtgtcttccagattgccccacgccccaacattcctgttgaccctcgacactggagcgaaatgtcaattgagaactgcagacaactgtgtcagtgcagggacatcaaaacccctgcacctgcctgctctactcacgtgacgtgccagctcccataagcttttgggtttgcaggtcctgatcaatactgcacaccgatgaccagcatccagatgaccagaacagatccccacacacctaccactaaaaccaatcgcctgtggtcattcagaaggcacttggagacctggcactggctcagggtcaggattatgaccatgactgtcactgcccagaagacagttcagaggggcatttgtcctcccattggcctacgtcatccccacagagcacaaaggactgtcagctgactacagcccaaagccccaaggcagtcacaagactcctcaacacacagagcccaacacacagcactctgtgcttcggactttgggcttctcactgcctggggctggcctcagcgtggaggtgcggaaaaacctaagtctggagtcagagagtctgaatgtgagttccaaccctgccacttactgagctctgtgaactcagagaagtcattcaaccccattgagcctctgcttcctttcttgaacaccagggattataaccccatctacctctcagcaaccttgcaagtatcgcgatgacacatgtgaaaagtaccttgtaaggtgtaaagtgtgaaaaagcacctctgtttgagtgcccatgctgtgccagacacttcacatacatcacctcattgatgaagcctcacaaaagccttgcaaggcacattatcatccccgttttactgagtaggaaactgagtgagagggattacagaaattgtccaggtcaccccgctggtaagtggaggatccaagtgtcaacaccaggtccggcaccagcttactttcttttctctatgtgtgaaatccaatgttatccagtctcagaatccagtgttcgctgcggctcttgtcatcccttcctgtggccttgttccctccgattgttcaaattgcttctcctttccaggaccctcttccatatttcccagcccctgaactgcctcaatggcccccggtgcttaaggccgattacttctggccatgccaaagtaggatttgcagtgccaaggagggactgctcagcacagcccagactcccattccctctgccagtgcccattctcccctgcaccatctgtcccctgcatggtcagggaaggggaccctctggacttttcgcacagaagatctaaaccactcaccactggccgatccacggagatggtattttcaacttccctgtgaggaatacagacatgtggggtctcagtgtcaccagaagcaagcaggaggcccgtggacggtttgctctggtgcacggcttcctggcagccaagccagaaccagcctctagagaacccctggaacaccccaaccccaggaaccagccccatgtcagcaccatccccgacagccaagcccaggcacgcaggttcttgttagtattgctcagagccccccaaaggcatgacccagccacctacccatggacctggtgcatcttccaaggacagagatcagagtggcaggggctatgagctcatctgtggtggccagggacaggatgtggctttcctggccatgctaacctaaaatttcaagcatccccaacacctcctatccctcttccctactttatttttgctccatatcacctctccaaatctaacatgctacatatgtttttcctatccattattgtctcatgttagaatattaagctccatgaaggcagggatttctttctgtttacttcactactctatccttagtgcctaggacagtgcctggaacatagtaggtgctcaataaatatcacagaatggatgaatgaatgaatgggggtaatgtggccagtggctcaggagcagcagaaggaccctggaggagacgtgtctagctgcctcatgccttcaacctctggagtgggccatgtgagcttttagaaacacgtgggaaagctgggccagcactcactcagagaggttcctcttttcagagaagacccggaggatgaattccccctcctggtggggctcgtaggtggagggcacgatgacgtactcgctgggaggcaggcggaagcgctgggacacctcccgcatgttgatgtaggttttgctcctggccttggaggcgttgtacaggaagaagtccttctgcaggtgctgcttgttcccgtgcatctgagagatggggag

SEQ ID NO: 1241908 - DNA, 4001 bp, Homo sapiens
agaagaatgtgaattgtaatgctcaaccatgccaagtaggaagaccttactttaatactccaaactttcatggatttctacctactctgcccgagagtttttcagtctttagagttaagcatgcagcgcacatataaatgtactgattccttgaccctatcatagcatgtctatgttatggtgaagaggagggggttatagggaagcacttagctgagggccttaatcttcatgaaataagaaagccaggtagaggctgtcaacaggaaagttagaagctcacagacagtttaattcataatgacttacccttaagtgattttgatatgcaaagtaaaacttgtaattataatgggcatttacacacaaaaatgtgaagattaccaaagaagtgtatagaaaggcatctactatcctgcccagaaattttcataactctactatacctacagaagttgctaagtcataaactattaatatagttaccaatgagctaatgaaaacaaggattatttagtagcaagtatgattacagttcaattttaaactttttatatttaaaactttgtatagttttccatctgcataaaacaccaaccctaatagcaacttagctatacaaaatttcattctattttctttcaatgaagacactgacatgacattccactgcttaaaatttattttcagattctaatcttttggctgatttcattaacaattcaaattgagtagataatgatggatcaactatgtccaagacacaagtgtgtctcacatatagctcgagggcccatctatcataacattttgatcacaaaaaggcagtcatagctgattatttagttattcaatacatcaccctatagagattttaaaagtcacacagcttaaaaaatatatgatgactaccataagtagaggagtcagaggcggcttcgttctttaaataacgaaattaatattgatcagtgtgcacggaataaaaatgagacaataaccacaccaaacctggcagtcgccagatttgtgtgtctttgaaggtaagggggccacacaggccagatgattactactgccaactcaccagctgagcttagagaataggcagcatctgcacacagtccactcttgagaaccagaatttacagtcatttttttctggcagggaccagagaacgtggcactgataaactgggaaaagtctgacagaaacagggttgttgggggtgaaaggagccttcaggactgaaatactggaaggcataagacaacagctagcggattaacatcccgccccagaccccggggagaaaagaaaccatggggtttgaagagaaaagggtcgtccttaccttgtcatcctcgcatctcttcccgaggccctctctggcctgcagccggctgctgaggcggccgtagtcggcctccttctggtcgatctgtttcttgtgcgtgtccaccaacagcaagaggtccgaattgcgcttttccagccgcccgcgggccacttcggtgcgctggacctggccctgcagctcggccacctcctcctgaagcaggacgtggcgggaggagatgctccagtagttgaaggcgaggacgacgatcaccaccagcagcaccaccagcacgagagagggcaggcggccagcccgccggttggccccgaaacccaccatggggccaaatcgggctgtaccctaggggcctcgccgcagacacctgcaggcagaagcccaggcctcggctggagttgcccggcggacacggccccagggccggccgagggaggaggcgggcttaccggtcggctgcgagccggagaagggggcggggccgcaagccgcaggtccctccccgcccccctcctcaaatcaggccaaaacgcgttccggaggctttgaacccgaccctgcacctgcccaagggaaccgggagaacccagctgccagcgtcccccaaacccaacacctcacggttgggaggcggggaaaaaaaccggaaaggggcggatgtaccctggccccacccactagctggggccgggtcgtctaggggaccatttccgagtttccgtcgacacccctcttgtcgcgagaacgttgcttcctctcgtctctctctctctctctctctctctctctctctctctctctctctctctctctctctcgctctctcgctctctcgctctctcgctctctcgctctctctcgctcgctctctttctctctctctctctctctctctctctctctctctctctctctctcgctctctctctctctcgctcgctcgctctctttctctctccccgcccagagttttctctgtcgcgtagggtgttgtgttaattttggcggtctcagatgtctcaggtacctgggtcggagtcctttctgttgttatctactggattcccttgattcaaggcctagggagttcctgccctacactggccctcgcgaaaatatttgtctttgaggacgtctggggctgcgaccgcggaatagaaaaaaatagtaggtgagctgctgccaaaaaggagcgactagaaaggttttgtacttgcttctgtagaaggggaatttctcttttgtgctaatgatgtggaaagaaaaaacaaaaagactgtaaaatagcgatgccctaaacataatggagaaaagcgggagaaaccaagctttaggactgaaaggggtggtgccagtctcgtttcctaggttactgctttcacgaaccgaaagaatttcagaatgtggcgagctccaatttttaaacgcactgctgcttttgcctcagctgggcttccaaacagaaagtccagaagctgccctcgatgaatcgtaactaatgcactgttactgccagcgaacacattccgggttagaaataatagctctaacaaattgttttgcgcgcctagtctcatattatcttctcaacaacgcaattttacagatgaagaatccaagacacatagatgtttgggaactttctcttatctggttttaaataggcttgaatccagatcattgaactctaaacaccagtgctgtctgcatatagcagattgtttatatgttaagtgtgaatttcagtagtgcaaaaaaaaaaacaaaacctgcctcttttttttttttgcataattattttgtccgtgcatagagaaataaaaaggtactggctctaacctgtttaaggagaggatggggttgccttatttttcagacctcaggttgaagaacttccatgagtataaaacctcaagaaggaaaaaccttggtattttttattcgaatcagagtgatatgattttgaggcaggaagacttgtcatcttaattattctgtgcttcctatcctcaaaaattatttccctaagtcccgtagtagcgtagaattattgcatcttcaaagaacaatgattactctctcagatgcagtacagaaaaccaccaccaaaattattaatacttggttcacatcagaagtgagctctggcttcataagatctaacaaatcctctccactctcagatgacaagccgactttggcaaaaggaagcaaagcaaaaatgagaaatcattaactataaagagcctttccatctctgctttcctcaactcatattggccttgctctgctcaaccagcaatcgaaaattattctaggccgggcgcggtggctcacccctgtagcctcagctactcgggaggctgaggcaggagaatcacttgaatcggtgaggcagaggttgcagtgagccgagatcgtgccattgcaccccaccttgggcaacagagtgagactccgtctgaagagaaaaaaaaattattctataaagttatgttaactacttaagatttactgttcccacgagtgttttcatttttacataggcaaatctaaaagtataaatattgtacaaaacacatacacatacatttcctcaacagatgtttaatagaactattgggtaccattattccattttac

SEQ ID NO: 1241909 - DNA, 4001 bp, Homo sapiens
tccttcaatttctgtatttttttaaatggctactaagtttgggacatatatacttaatgtttggacccaaccactgtactcaataaatagactgttaggtatttctttgatctcagggtgccatgcatcaagaaaatttgggaaccactactctaaataatccgtaggtcctcaaacagcgactgagcccaattagcctttgagctaagagtgtttttttacccttttaatggattgtagaaaacaaggcaagcaataacaactaaacaaagaatatgtgacaaagaccatgtagcctgcaaagcctgaaatatttactatctggctctttgcccactcctacatttatacgaccgatatctagagttagtattttccgggattgtaggaggataagagtgaaatgacagagactctagacctgtgctgtccaatatagtagttatttacatttaaattaatgaaaataaaataaaatttaataatcagttctttggtcacaataatgacatttcaagtgctccatagtcccatgtcgctaatgggtagtatgttggagtgcacatataaaacattaccattttcacaggaagccctgttggacagcactgctttactggcaatatctagagtcagtatcttttacagtctattatttaacatcgaacacatcattaatactaccattccaaacattttaattcaatttacatgtatttatcatcttgtaaagatttccagccattcgcaaagtcaagaattatactgctttgaccctaacctttaattaccaaaattttaccacatattaactcccatctgtaaatcatctctccaaccaacgtccacctcaaatgcggtcttctccacaaatccatcaccaaaagcatcaaataagctctcccttttccgtgctcccacaccactttagaatgtcctataatcttttacattctgtcttgtattctagttatttgtgtatattagttatttccctttgtaaacccctctaggtttgggaatcatctgtccccggccctatcacaggataaggaacccaataaatatctacaggattcgacggaagtgaaaacatcaattttaatatctagactggaataagcttctgctttggtcttcatccacatcctttatctgttaatgcctattaaacctatctgtaaaattccaatcggcaatactttttcctccctcaaacttgagtatttaaataaacgtgaagaataagggcttaaatcctgaggaataatgaacagaagaggatttttaaaaactaatttgcgcagtactaatattgacttcatttgttaaggttattatacttgcagaaaacgaaaaatctgttacgtgcggccagcactccgagcagacaccttaaaccacgaagagctgagaattttaaaatcactcattgctgtcacttcatttagagccaaaaaaagcttaagtgagaaatacaaacagccgagaggtccctagggaagagcggcaggggtgcaagaagagtccgcgagccctgacagaggacggcagggcggggcggaagaggacgccaagagagcgacggacaagcaacccgagccgggtggccggaggggccgaggtgcaggcggagaagtgttagggaagcgggaggcggcacaacgtacaggccgaggaggggaaaaagggcacagtgtgcccggcccggggcaggggcgtctactcggcccggcgctaacggaggccgccaggctgagggagcgtaccctacctcccaccgcaggaacttcagggcgcccagacaaaacccgaagccttccctgaagcccagaacgaaagagtcattctctttacctgccgcggcaaacctcctcgacaaattttgcgcagacttgtttggggtccacacgctctgagtttccttagagcggaaacagacagccgcctctagcagtccgctcacaacgcccggctcgcctcagtgaagtattcaaatctaaccgcctaggtgatgcgcacgcgcaaagcggctctacgcgtcggctccgccccttaggttccagaccaaccctatttctaagactcctttagggaaactactttcccagactccgtgccaattttatttccttcagctttatctctttttcgaccgaatttcctctgcccctccccagtggagacctcccccacaatcgtgggagcggccatcttctttcgattgcttgctatggaagtgattggactttggcttccgtacaaaatggcggcttccataacattgcgtcacagccccttgatattactccctatagcaatcaggaaacagtaacttaccgggacgaggtggccgagtggttaaggcgatggactgctaatccattgtgctctgcacgcgtgggttcgaatcccatcctcgtcgatgtggtggcttacttttgcttgtaaccaaagtaaatttgcagagcagaataaattttttaataaccaaagtaaatttgcagagcagaataaattttttaataaccaaagtaaatttgcagagcggaaaaacttgaatacttattatttattactcaattaatctggcaccatcagtttcaggcctgaaatgttgaaatacagtatttggaacgttctgacatcacagataaagaaaagggagggaaagagactttccaggaatcagaaatcatgctggatttaatttctttttatatggagttaacaacagtgaatagaattccacaattattaccatcccatatgttccaatgctgctctgttccaactttaacacagctcctaactgaggagtttcaattattgtagactgttactctggggtttttaacacctgtcctgattatgagataccaggtttcacttcaaaagctaccatgagacactttatccggtatttattatctacaggcaccacatgttttacatgaattacatcactataacccttgatcatgacaaatatttttattactccattttacagatgaggagactgaaagattagcttgcccgaggttatacagcttctaaattgaagaaaggagagtgtaacccaaatctactagacgctggcttaatcacccttctaatctgtgctgtagattaataattagtatttatcaatcctacactgtgctgtagattaataatcagtatttatcaatcttttgcagtcatggtttacagattgtctcctccacaaggctgtctgcattgcaccatgctccacaacacggcctctggcaggtgcttcagcaaggtttgggcactgagtatggaaagcagtggccccattctctgctggctccagtggcttctttctgttacagatccaaatccgttgggaatgttgatacctccttgggctcaggacattgagtcacccttccttagccttgctctccaatgcattctctaccctgctgctaggaagggtttctgctgggttccacgcatttccaaggggtccatggatagaattcagtgggttatttggttcagaaaaagatttcatccttatttccacactccctaattgaaagcacatccttcaataacggtaagcaactaactacagtaatattaaccttatccattattttgtcaccaatagaaatcacagatatttttatatcagattactgttattgctttacgctcattgctacttcaaaattgtggtaatttttagacctgctattatgtcttgtaatgttatgcattcataaagaagtgcatgcattaagctgggcgcggtggctcacacctgtaatcccagctctttggaaggctgaggtgggtggatcatttgaggtcaggagttcaagaccagcctggccaacatggtgaaaccccatctgtactaaaaatacaaaaattacccgggcgtggtggcacgtgcctgtagtcccagctaccggggaggccgaggcaggagaactgcttgaacccgggaggtgaaggttgcagtg

SEQ ID NO: 1241910 - DNA, 4001 bp, Homo sapiens
ctgggactacaagcgcgtgctaccaagcccggctaattttttgtattttttagtagagacagggtttcaccatgttgcccaggctggtctccaactcctgagctccggcaatccacacgccccggcctcccaaagtgctaggattacacgtgtgagccggcgtgcccggcctcacttcctctttcatacaaggtcagttctcacctatttcaaccatcaatatgatcgtattcaaaaagaccaggaagatgatgaagtttttgaagagaggacctgttgtctcttaaggaaatgtacagagtggagttctttctgatttatgcagctgaaataataagagcaataacataagcagtgaaaatgagacagtggagtatggggagcaaaaaataagtcattaggcagatgatcaacagccaggataaaaatgagtgacatgaaaggatacactcaaggacccatccggcccacaaagaaagaggtggcctctgactgcagcgcacatgaagcctgctcaacagcctctgggcatgtgaaatctgttctatacgctgaggctttatagagaaacgcactagctggtgttgatctcccaatacaagtttcttctggcgggaaggatctacaacaaaaattaaaaagggatagtggataaatacaaacaaaatagaccaggtagggttgggggcagggatactggtcaggtaatgggttcccctaatgccttactgctagtccttctcttctcacagcaactaagaattctgtttggagtgagagcaaatgtattgcttatgaccaacactgtccatgcccacaaaagcagcaggctcactctcaaagttttaagagtctttgacagaaactcttcccaatcatccatggctagtggctatcctaggcctaaaagtgaaagacgtggattctatctcttcagttttatttacaagcccttgatttatcaagtttggtaaaccagcaactaaacctccccagaattttccactcttaaatgtagaggatgtggataggagtcttaaatttaaattagtgaagaaataggctgctgaccaagtaactccctgatagtgtgccgcggcacagcttggctcaagccttgcaaatgctcaatgagagagaaagtatcgatgagacgtgaacgaatggcatcagctcggggaagctgcatctgctcttcttgttggtaagcggccatgtctgctaagaaaatgtaagcatcaagtgtcatttcattcttggagctgcaccaaggattacaggttttctgtcccctcctccccaccctctttacccttaagattccttaatgtacccacatctacgaactaggagcagttgggaagaacaaacattctactaggactcagggtgttttgaaacaaaaggggctaagtggtaaagacattgcacagtcgaccaagcggccaggcatcttcactttgtgatggcatttctaattaaaactcattaaaaacaaaacaaaacaaacaaaaacaccgcaagaaaaaggagcagccacaagggcaggggcccggggctggacaaagaatctgggtcccacctgtgcctgagacaatcgggcaatgaggtggagttgggggaggtcttggcctgctcacgcaagagaaaccaagtgcagagaaattggacaaaatgccaaagcctgacattttgaaaatgggtcccgtcccaagtgtgtccactccaacactccttcgggggctagctccttctctcctccattctcgcttctgggcctcacctcagcccaggttctctttgcccactcagtccttatttcacgcttccgcctccagctcaggtgccccgagcctggctacccctatgcaagacgagctcagggccggctcccagcctcactgcgccccattccccgccccgctcgacccccaggtttcggctcaccccgggacccggccctagcccctacccacagcccaggaccatgcggagcaacgctcgcccagccactcgccgcctaggccccgccccgccccgctctccggccactcagcggtaaccagctggtcccgcccgccggacgaaggcgacgcgcagccaatcagcggctgccacacagcggcccgagccgggtttgggggttgggacctccggctgcaggtcccctgggccagacgcgccagcgcaggcagccggtttgtggtcgcgcgcccgacctccgcagtcccagccgagccgcgacccttccggccgtccccaccccacctcgccgccatgcgcctccgccgcctagcgctgttcccgggtgtggcgctgcttcttgccgcggcccgcctcgccgctgcctccgaactcacggacgacaacttcgagagtcgcatctcctacacgggatctgcgggcctcatgctcgtcgggtttttcgccccctgatgacgccactctgccaaggcgggggaagaagggccgggctgggccggggccgggggcgagggcgcggggaactgttgggcctacgcagcgccggcgcccttcattcctgtgggcccctgctgtggcgggcacatttctcattcccgggagctggaggtgcctcgccgagagcggtggagtcggtgctgatcggcccaaggaaaacccgaaggctgcgctcacgcagggcctcatccttatctcggtgctcttgtggcacttcctatttgcagagggttttgccaccccttcccccagttcaatatgtagctatattgtttctgcatgagtcagtattaatgttactccagtctacagactagacatcccaaagccttgtagtggaagcggacgtttcaccaaatgcagaagtcctggatccctagggtatttcctttcatcttacctcacgccgcacagccattggtttctagccaaggtcactgagtggctgcagaatggtcctaagtgctttcttgaggcaggcaatttgtccgtcacatggtgtacagtttctcccttcagctgatcacttacatctcagtaccggcagatacctctgtccaaacgaaaagagtacctgaacaagaataattccatcataatctgtccatattgtccattttaattaggatttctttaaaatgtcaatactccgaataggaacagctccagtcgacagctcccagcatgagtgacgcagaagacgggtgatttctgcatttccatctgaggtacccggttcatctcaatagggagtgccagacagtgggcgcaggtcagtgggtgcgcgcactgtgcacgagccgaagcagggcgaggcattgcctcactcgggaagcgcaaggggtcagggagttccctttcctagtcaaagaaagtggtgacagacagcacctggaaaatcgggtcactcccacccgaaaacttcgcttttccgacgggcttaaaaaacagcgcaccaggagattatatcccgcacctggctcggagggtcctacacccacggagtctcgctgattgctagcacagcagtctgagatcaaactgcaaggcggcagcgaggctgggggaggggtgcctgccattgcccaggcttgcttaggtaaacaaagcagccgggaagctcgaactgggtggagcccaccacagctcaaggaggcctgcctgcctctgtaggctccacctctgggggcagggcacagacaaacaaaaagacagcagtaacctctgcagacttaaatgtccctgtctgacagctttgaagagagcagtggttctcctagcacgcagctggagatctgagaacggccagactgcctcctcaagtgggtccctgacccctgacccccaagcagcctaactgggaggcaacccccagcaggggcagactgacacctcacacggccaggtactccaacagacctgcagctgagggtcctgtctgttagaaggaaaactaacaaacagaaaggacgtccacaccaaaaacccatctgtacatcaccatcatcgaaaaccaaaag

SEQ ID NO: 1241911 - DNA, 4001 bp, Homo sapiens
gtagctgggactacaagcgcgtgctaccaagcccggctaattttttgtattttttagtagagacagggtttcaccatgttgcccaggctggtctccaactcctgagctccggcaatccacacgccccggcctcccaaagtgctaggattacacgtgtgagccggcgtgcccggcctcacttcctctttcatacaaggtcagttctcacctatttcaaccatcaatatgatcgtattcaaaaagaccaggaagatgatgaagtttttgaagagaggacctgttgtctcttaaggaaatgtacagagtggagttctttctgatttatgcagctgaaataataagagcaataacataagcagtgaaaatgagacagtggagtatggggagcaaaaaataagtcattaggcagatgatcaacagccaggataaaaatgagtgacatgaaaggatacactcaaggacccatccggcccacaaagaaagaggtggcctctgactgcagcgcacatgaagcctgctcaacagcctctgggcatgtgaaatctgttctatacgctgaggctttatagagaaacgcactagctggtgttgatctcccaatacaagtttcttctggcgggaaggatctacaacaaaaattaaaaagggatagtggataaatacaaacaaaatagaccaggtagggttgggggcagggatactggtcaggtaatgggttcccctaatgccttactgctagtccttctcttctcacagcaactaagaattctgtttggagtgagagcaaatgtattgcttatgaccaacactgtccatgcccacaaaagcagcaggctcactctcaaagttttaagagtctttgacagaaactcttcccaatcatccatggctagtggctatcctaggcctaaaagtgaaagacgtggattctatctcttcagttttatttacaagcccttgatttatcaagtttggtaaaccagcaactaaacctccccagaattttccactcttaaatgtagaggatgtggataggagtcttaaatttaaattagtgaagaaataggctgctgaccaagtaactccctgatagtgtgccgcggcacagcttggctcaagccttgcaaatgctcaatgagagagaaagtatcgatgagacgtgaacgaatggcatcagctcggggaagctgcatctgctcttcttgttggtaagcggccatgtctgctaagaaaatgtaagcatcaagtgtcatttcattcttggagctgcaccaaggattacaggttttctgtcccctcctccccaccctctttacccttaagattccttaatgtacccacatctacgaactaggagcagttgggaagaacaaacattctactaggactcagggtgttttgaaacaaaaggggctaagtggtaaagacattgcacagtcgaccaagcggccaggcatcttcactttgtgatggcatttctaattaaaactcattaaaaacaaaacaaaacaaacaaaaacaccgcaagaaaaaggagcagccacaagggcaggggcccggggctggacaaagaatctgggtcccacctgtgcctgagacaatcgggcaatgaggtggagttgggggaggtcttggcctgctcacgcaagagaaaccaagtgcagagaaattggacaaaatgccaaagcctgacattttgaaaatgggtcccgtcccaagtgtgtccactccaacactccttcgggggctagctccttctctcctccattctcgcttctgggcctcacctcagcccaggttctctttgcccactcagtccttatttcacgcttccgcctccagctcaggtgccccgagcctggctacccctatgcaagacgagctcagggccggctcccagcctcactgcgccccattccccgccccgctcgacccccaggtttcggctcaccccgggacccggccctagcccctacccacagcccaggaccatgcggagcaacgctcgcccagccactcgccgcctaggccccgccccgccccgctctccggccactcagcggtaaccagctggtcccgcccgccggacgaaggcgacgcgcagccaatcagcggctgccacacagcggcccgagccgggtttgggggttgggacctccggctgcaggtcccctgggccagacgcgccagcgcaggcagccggtttgtggtcgcgcgcccgacctccgcagtcccagccgagccgcgacccttccggccgtccccaccccacctcgccgccatgcgcctccgccgcctagcgctgttcccgggtgtggcgctgcttcttgccgcggcccgcctcgccgctgcctccgaactcacggacgacaacttcgagagtcgcatctcctacacgggatctgcgggcctcatgctcgtcgggtttttcgccccctgatgacgccactctgccaaggcgggggaagaagggccgggctgggccggggccgggggcgagggcgcggggaactgttgggcctacgcagcgccggcgcccttcattcctgtgggcccctgctgtggcgggcacatttctcattcccgggagctggaggtgcctcgccgagagcggtggagtcggtgctgatcggcccaaggaaaacccgaaggctgcgctcacgcagggcctcatccttatctcggtgctcttgtggcacttcctatttgcagagggttttgccaccccttcccccagttcaatatgtagctatattgtttctgcatgagtcagtattaatgttactccagtctacagactagacatcccaaagccttgtagtggaagcggacgtttcaccaaatgcagaagtcctggatccctagggtatttcctttcatcttacctcacgccgcacagccattggtttctagccaaggtcactgagtggctgcagaatggtcctaagtgctttcttgaggcaggcaatttgtccgtcacatggtgtacagtttctcccttcagctgatcacttacatctcagtaccggcagatacctctgtccaaacgaaaagagtacctgaacaagaataattccatcataatctgtccatattgtccattttaattaggatttctttaaaatgtcaatactccgaataggaacagctccagtcgacagctcccagcatgagtgacgcagaagacgggtgatttctgcatttccatctgaggtacccggttcatctcaatagggagtgccagacagtgggcgcaggtcagtgggtgcgcgcactgtgcacgagccgaagcagggcgaggcattgcctcactcgggaagcgcaaggggtcagggagttccctttcctagtcaaagaaagtggtgacagacagcacctggaaaatcgggtcactcccacccgaaaacttcgcttttccgacgggcttaaaaaacagcgcaccaggagattatatcccgcacctggctcggagggtcctacacccacggagtctcgctgattgctagcacagcagtctgagatcaaactgcaaggcggcagcgaggctgggggaggggtgcctgccattgcccaggcttgcttaggtaaacaaagcagccgggaagctcgaactgggtggagcccaccacagctcaaggaggcctgcctgcctctgtaggctccacctctgggggcagggcacagacaaacaaaaagacagcagtaacctctgcagacttaaatgtccctgtctgacagctttgaagagagcagtggttctcctagcacgcagctggagatctgagaacggccagactgcctcctcaagtgggtccctgacccctgacccccaagcagcctaactgggaggcaacccccagcaggggcagactgacacctcacacggccaggtactccaacagacctgcagctgagggtcctgtctgttagaaggaaaactaacaaacagaaaggacgtccacaccaaaaacccatctgtacatcaccatcatcgaaaacca

SEQ ID NO: 1241912 - DNA, 4001 bp, Homo sapiens
agctgctgtttgtacccctaagctcagctctgttgggggtggggagaccctgcactcagagagttcccggtgggaggcaggccttgtgtgggacatggctcacaccctaggagtgcaagtcaaggccaggggtagggttggggaggggatcctgcaggggaggggtggagctgggcctttgaggtgcaggtgagatttgactggattgggtgggacttcagaggtggggaacactgagggaaggtgtggaggcccatgtgggctgggctctttggaggcagcaaagtacacaggtctgtctggctagagagctggagcaggcccacctgtttgcaccagccaggcccggaagctctgcttctgaacagagcgcagtggggagtcacaggagtttctagaaccagggccctgctcaccccaggtctctgctcctggttcccctcgaatgtcatctgggcctcccaaccacaacaaatctgtgcaaattgctgtttaaaacagacttcctgctccacagaagctgccctcccagggaggggaggcagttgcttctttgttcagcccaaggttatggcaaagaaacaaaaggagtgaattttccctttcttctgttctttctttcccttcctgctgcagcagagatgatgcctagaaagcttttgtgcttggcttggtgaagcttggaggggtggcagggccttggccggcagctgacctcagcccctgtctaattggcccctgcaggagccaggtgctaattgggcctggctgggacaatggagaccggctgggctggggtgggggcggggcttcctggaagatgctggcttcccattcctacttcccctcctaggcttttctgaacgctgcctgaccctcaaggctccattctgggccctcctcctccaggaagacccccgggctatcccaagacaggccatcagtcatgactccttgggtattgggccagagtccagcctctgctgacagcagattggggccagcccttgctctcagcccaggtgagtacagggctgggcattcagcaggtggtgaggggcaggccccagtcctggtctcacaggccctgttcactcttcctcaaagaacccttccccactggtcacctcctgccagaatcctccctggttagagctttgctgcctcaggaatgccccacattgggtgggggaagagccctggctggaacccagaaccttgggttctgatccagcctctgcccacagctgtcgaacgacccgaagcgaggcccttgcccactccgtgcctgctcatctgcaccctgtggggaatgacccttgttggggttgtcctctgggattcttgccaaaggggaagaagaaatgctttggcaactggggcccaaaccagaagggttagcacttactggggcggccccagcccccagtctgagctgctgcttccactggatgccccatctgccacacccactcctcctcacagctcggcaccacacatgcactaccagcaagccttcccaggctagcccaggctcagccactttctaggatccaaggctggacctccaagacaccagaggtagggcccagactagcaggaggcaatgatcacttcaagggattttcccagaagcccttctgtcctccctctctggattactgtgtgggctcaggtggcctaggctggagccaggggccttgcaaaagattcctgtgaccacgggcatctaagggccaaagccctggtcctctccaccctgcctcccacttaagaggctctgggaacacctctactggttgctgggcaacacaccccaacacacctgctgctaggcgagccaacccatcttcccagaaccagtgggcgagggggcgacttacagagaagctgtcaatgaggcctggggcagccttgggggctggaggggatgggggccctggctcccccatctttactgctagcagtcctgttccccaggatgggtccccagggactgttgctacaacaagtgcctgcctggtgaccaagcccagccctgagctggaagcaggcaggcccatggggccacttcccctttgttccagggtggggggtgtctgggtggggtggctgaaatcatgcaaggttcactccttggccacagaattgtatggagacagcagggccggggagggctgtggggcccttcagggctccggccttctgactcccctggcccaggctcagagtccctcctccctcacctgcccttggctacaccttggttcctgcctccccctcaactccctccgctcttctccactttctctgcctcctggttacccccataccctgtctcccctttctctcccactgagcctcaccctctgtccctgagtctcctcctccccctcccccttagtctctctgctccctgattcccccttgtcccctcaggagtcctccccaccccgcagcagcacaagctgggctcactctcctccctgcagctgcagtgtggcttagggccccacgcctggtccctggggacttcctctggctgctttcctgatgctctggacaaattcctttctctttagttcagcggagacatgggtggatgtttttgaaagaaactcactgggaagcaaaaaaaaaaaaaaaaaaaaaaacaaacccaaacaagccagcccgccacctagaaacggccctggtcatgaaggcagaatgtctgatataactggcttcagcctgggttgcggagaccccctcctggggcatggaggggcctgcctgcctttccccagctgaactgggttcagcctgtctgtcccagacaagcttggtcccaaaggctttcatgatagggccctccacctggacctagcaagatgctgaccagcactgggacttcataaatatttgtttacttgtttaatgaatgaatagatgacttacagtgttctttggggcctcaatggtggcacaataataatccctgactggacaagccaagacagtcacctctacccgtttcaaaatctccacccctgctgctgggtgcccagctcagcactctgcacagggttggggggcctctggcttctgccggtgttgtggagggcgcttccttttctcatttgcaggcctcatgtttcacttactctttttcttttttcctttttttgaaatggagtctggctctgtctcttgctctgtctcccaggctggagtacagtggcgcgatctgggctcactgcaagctccgcctcccgggttcatgccattctcctgcctcagcctcccgagtagctgggactacaggtgcctgccaccatgcctggctaatttcttgtatttttttagtagagactgggtttcaccgtgttagccaggatgctctcgatctcctgacctcgtgatccacctgcctcagcctcccaaaatgctgggattacaggcatgagccactgcacctggcccactccactttttcttaatggggacacttcctctgaacaatagggacaagtaggggagtggcacaagacaatccccatactcctattagttcttatttgagtgggcctggtgaagtggaaagatagtgggctctgttactaagcagctgtgtgactttggacaggtcacttaacctctctaagcctgttttctcctctgtaaaatggagtgcatcactgtgcccatctcataacgctgttggggattaaatgaggctgcgagtgtacacgtccgagcagcgtctggcatataagagtggctccagaaatattactccctcctctgtgcaactctcatgaggggctctggagggtctagcacccctccagggaaatgaaagggaggcccgtggtggagtcggccatcctccctggatggcaccagtcactggctggcactgagatgtgggccttaaatcttcctgctcctgcccctcagcctccccaccagggaaatgggtgtgtgccccctgctatccccaagatcctggggcaaga

SEQ ID NO: 1241913 - DNA, 4001 bp, Homo sapiens
attacaggtgcccgctaccacgcctggttaatttttgtatttttagtacagacggggtttcaccatgttggccagactggtctcgaacttctgccttggcctcccaaagtgctgggattacaggagtgagacaccaggcctggccaacgtccttttatttttgaggcagaatctcacactgttgcccaggctggagggcagtggcgtgatctcggctcactgcaacatctgcctcccaggttcaagcgattctcctgcctcagcatcctgagtaactgggattacagacgtgcaccaacacacccagctaatttttgtatttttagtagagatggggtttcaccatgttggccaggctggtctcaaactcctgcctcggcctcgccaagtgctgggattacaggcgtgagccaccacccccggccatgatgagcatccttataggcgattctacccagctatcaaaagcgcttctcaaagctactaatcaaagcaaccttggctcctcctcaggactcccacgcacactccccagatccccaaatccagctctgtggggcaggtggggaccagctggcagcttagggtgccaggtcaacctggtgaccggttctgagtgtgtggcattacagaaagaggcttaatggggagggcagagtctgcagggggtggggggcagctgtgggcagagaacatcaggaaccagagacatcaaaatcaagagtaatgaagtggaaatcacactagggcctgggcacccccagctatttggcttattcaacctgagtgtaactacaaagagggtatcccccatttgcaagtatctgtgtgcctttggtctcagctccttctgctatccctgtgggttaacaccatctagggcaggggctcagccttgctagtgagaggaaggtaaggggtcccttacattcaactgtttacatctcatcacactgagattctagtcccttcctgacagagccctgctgctgggccacagctttttattaagcacccactatgtgccaggcactgttctgagtgctggggatacggtgatcaacaaaacacacaaaaatcccttctcttcagagacccaagcatctgtgttccaggacaggggcctaggccccagaaaatcagggccagggattggagagcatgggggcaatgggggcatcagggctgccaagccagcagcctgggaatctcctgggagatcttggacaggggtaatgaaccatctcagtgggctctcagactgtgtgaccccagcaataagagtgcagaaacaaccaggtaagggtggtcagcattgacaacacctgcaagtacactgcattccagttcccgtgtggcccaagagtatagggcagctaacctgggagagccacagagaccacctcactccccatttcacagctgtgaaaactgagacccagggaagggaagcttttgtcatgattaaggagcaaacaaaactttgaaggaaggactttgaaggagggacggattcatgcaggtgcatggcccatgcccctggccttacctttttgtttttcagtcccatcctcttgaggccaggagtgtctggccttgtttaacaatcttggggatgagtacttggtatcagtgggtgatcaggaatcagtcctgcccagacagctggcctgggcgtcttggagtccttatgggtagtagacagtatggaggtcaatgtggtctcaggggtgccacacaccagccctggggcctggatgtggggggagggggagggtggccaggtgggagcaggtcctggatctctcagcagcgagatggtctgtgggtggaagggccttgggggttgagggccatggccagctggacagggtcagcaatgaggcaattgactcttggcacacctaggacggtggagagatggggcaggggggccctgtctctgcccaggcctggaaaacaataagctcttccacctagctgggtcacctgggcaacactgtgtgatgtcacagggcagggccgaagtcacacaggcacctgtccaggtgcagtgagctagaacgcgaagcccttttccctattcctggagctgtgttccacctgccgcctggcactcaggccccacccttcctgctcttggtgcctcaagtagtctccaccaaccctgtggtgtggccagccccatgctgctcaagctgcagcaaaagaggaagcagacactgctctcaagagtgttgcagcttgatcggtaaaacagctacttctgttgaagaatctaccagccatcgtgcctctttgggtacctatagtcttccatttatttgataataataaacacaaacttcaagaggatggtttcttcttggagggtgggtgggaagatcggggagagaagagggtaagagcatacattctaaacttttgggtttttagattgggtggtcagttaatggaaattcattacattattgaaaataaattataattaaacaattaaagaaagccatgatgggtcagtgatggcactagagtacgaaccaaagattatggttcagttctgagcactgcaagaaattattacaaagacaaagagcatttgctgcacgccaggcagggtcctaagtgcttttggtgaggtgagatggcagaatgaagagagactagtccttggcctggggtggggggttgctctatagagaggtgaggtctgaactgggcttcgaagaatgatcagaaatcctgggctagaagaggagggatttggggtactgggcagtgttcagaagtgtttggggggcccctgtggcctgcctcatttctacctattttgggccccaagttggagattcttttaatctggccgaagagcaggaccagcctggcagccaggaggcaggagactccggctttgcagaggcctcccagcctccctctctacccccactccagagagagcagcagcaaggatgtggttctccccagtttagagacagaaaaactgaggctttgcttttgattagaactgaaaggaccagccaaggtcacccagacactggtgggggatggtagtcaggaaccccactcctaattttctccccgtctaggcctgccaagagtggtactcctggggctctggggctgggggcctgaccaggaatggcctggctgtgagcactgtgctttatctcccttgtgggccaacatgtcccagcacagtgtgtatgtgtggaaaggtctcagtggctgctcccccagtctctctagagcgcatctcccccaacctctcaggcctgcttagtctaggaggctagggcagcaggttcagggggtggggagccattgctccttctctagcagcaggactgaagatgcaagccaggtgcctaggaagcaaactttaatgaagcactcattctcagggctgtgcgagcgctccgctcccgacacagagcctcacattttgtgccctggccaccttgcctgcctcactgtggtccttgccctgccctgcagctctgcctcagtccccggggctcggggctctcacccagctaccctccttggcatctgagctttctgcctctgcagccacgcccctgccatcttcctgcctgggaagataatgcgattgggcactggttccaggccgtctggctccagggtgcaagtgggccctgtgcactcagcagccaccagtagggcccttctacctcctgacttgctggttgttcacctccccagaccaaggacccctgagacaccagctcctgtgcctgtcctaacctcccccgagagctgcttcctccttgcctgtgagaaggccttagcagcatgagcccagctgctctaccttctcctccccttcctccagcaaggtgagctctatatccccagcccagagaagtgggcttgctcctcaaatgtccaggggccagccccaagctgtgatgattcagggagattccagggtgagggagagcagggaatgattaatctca

SEQ ID NO: 1241914 - DNA, 4001 bp, Homo sapiens
tgcaaagctattctgagtattcaagtgggcctgtaagagaacttcaaagcttattagtatttaatgattatttctcatatagtacccatatcacttgttagagatccctgcaagttaaaggcatatatttaaaaaccttcctttacagagcttggtaaaaagtaaattaagatgaaaaataataaagctataatattaatagttaataataggtctggttgtttaaaaaccagatgtttaaaacctaaactagctttgattcttatgccatttcacaaataagaaatgctcctgtatgcatgatcttttagaactacagctttttaaaatgaggttgccatagaatggattttctcttatattaaggacatttagaatggaagtagttttcttgagtaatatagttttagctcccaaactcagggaaggttggaattgtatgaaataaaaattgtcagttgaccttaacctgctttagacataatgtgcttggaaataaaacttgctaggaaaagcaactcataccaaaaaaagtttattatagaagtgataaacatttcattaaaaaagaaaaaagcaaaaaaccagcatgtcctatccctgagagttcagggtcccgactctaataaaactcccaacaaggggtttgagtggatctaccaggcagagagaggggccagggaaactcaagccttccctgaacagaaaggttttgactattaaataacgttatagaatacattattataaaaaattacttgtcagttggacttagatccacaaaaggatattaattaaatgctaaatgtattcaatctattaggattctcaaaagtcacacttcaatttcttccagcagcaactgccaatctgaaaaagtgtttgaaaatgtaatgcttatgggtagaagcctggtaatgtgactcaatttaaattcatctggataggaaaattggcagcttttatctaaccttatagccaagatgatggaactcaggtgtgtcagggccctctagctttcggcaaaggaaaaaagtaggtcccggtacaattcaagcccacaggaaaaatacccaaaacaccataacactttgatctctgcaaggatgaaataaatgaatttggacccttttctctcagtctgccacattggtccaaattatattcaaaaacctctgttacatttgagtaaagaaattaattttttaaggggacaaacccatttattagtgaacgtagcatggaagacttagcgtgccgaaataaatgggaaactcatacaaaaagaaatgtgaacaatctgaaaaacagcctggcagttgcctgatgaaacacgccgtacactttactgcctacagaacccttccagtcctcctcccagccgccatcacaggtcccttagttggcaaggagttgtaagaaagggggagggaaatcccaggaacgtggaagtagataactctctagcaatgaagagcactcggggatcgctcgctgagtactaggcctagtgctctgggggctcacttgacaggcgccatctcggaagcgctttcctacacttctcccaccccggggcagggaggggttaggggagggcggaatccagacggggaaaggcgggccggagaggaccggccgcagggccagggacgcgggcgaagcagtgagctccggagaagagaaaagcagccccggttgggacggagaagctcggagcagatgagagaagcgacaggggagctgtggggccgacggactcgcctctgagagcggtccccgggcacactcaccgtcgggcgtcggagcagcgccatgagggacggggaaggcaagagtgccagcccggcccagggagggacgcggactgaaaagggaggacactagcgtacgaggcgccgttaggactgctctccgagcccgcagcgctggggatcttcgacgctgtagccttgttccaggattcaaataccgcgtcgcttgcgccccattgggcggccctgcgcacgggtcgctgttctcattggccaacacaagatgcactctcgcactctcattggctgaattttcttagacacgtttgattgtcacaacagccggttggggtgttttttctgcctacagtcttttaaaaaaaaaaaaaccccagtctctgagacaaacaaaaaggaactgtctcattgggaaagcagacgtaggacgcctctgaattttgacaaggcctcatctacgaatttctctcgacgtttgtagtgggtgggcggaagttggttggcctttattcctcttctggtgtgttggggtttaagttgtgttggcctgggtgcaggaaccggcccctccgggttgctcagggatgcagtgtgttaggtggttgagatgcaaaagtgtgcttaaaaaaagagagaataatggcgtttactcaaaaacccaaattctcaagtaaggcaaaaaaaaaaaaaaaaagataaaagagatttgtgtgactggtgattcatgtaagttctccattgtattcccaacacctagtacatcgtttgtcgtatatggttggtgctcaataaatgttcgtctaataatcagcccaagcaaagaattcatgtctaagaccccaaaagcaaatgcaacaaaaacaaaaatacataaatgggacctaattaaactaaaaagcttctgcacatcaaaagaaataatagacaaccacagattaagagaaaatatttgcaaactatgcatcggaaaaaggcctagtgtccagaatctagaaggaactcaaatcagcaagaaagaaaataatgccatcaaaaaatgggcaaaggacatgaatagatatttctcaaaagatattcaaatggccaacaaatacatgaaaaaatgctcaacatcactgatcatcgaagaaatgcaagttaataccacaaggagataccaccttactcctgcaagaatggccatcattaaaaagtcagaaaaaaaggccgggcgcagtggctcacacctgtaatcccagcactttgggaggcctgttgggcagatcatttgagcccaggtgttcaagaccagcctgggcaacatggcaaaaccccgtctctacaaaaatacaaatattagccgggtgtagtggtgagcacctgtagtcccaggtactgggaggggggcggggggcggggggcggggggccgtgtgttggggcaggaggatcccttgatcccatgagtctgaggctgcagtgagccatgattgtgccacagtactccagcctgggcaacacattgaaaccctgtctaaaaaagaaaaaaaacctcaaaaaacaatagtcaaaaaacagtgtaggcgtggatgtggggaaaagggaatgcttaaacactgctggtaggaatgtacaacttctatggaaaaaagtatggtgattccttaaagaacaaaaagtagttctaccatttggtccagcaattccactactgggtatctacccaaaggaaaagaagtcattatatgaagaagacacttgcacatgtatgtttacagcagcacaattcacaattgccaacctaagtgcccatcgaccgagtgggtacagaaaatgtggtatatatacaccatggaatactactcagcaataaaaaggaacaaaataatgtcttttgcagcaacctggatggagctagaggccattattctaagtgaagtaactcaggagtggaaaaccaaaaaccgtatgttttcacttgtaagtgggagctaagctgtgaatatacaaaggcaaacacagtgatataatggaatttagagactcagaagagggagggtggaaggggagacagggatagaaacctacatattagataaaatatacactacctaggtgatgggcacactaaaatctcagaattcaccactatataattcacccacatcacagaaagccacttatatcccaaaagctactgaaataaaatttaagtgtattaattaaaaaatattcatctaataaatgatct

SEQ ID NO: 1241915 - DNA, 4001 bp, Homo sapiens
caaaggtatgtaggaggagagagtttatcactgtaggtacatgcagcagaagatatttatatcctttccaaacacctatatatgtagactgaaaaattaaaacaattgactatgaaaatcaaataaggcaatgaatatgccattttaaaagaatcttactcctatattaagcatacacaactctagaaaaactgagcatagagcatacgtggtcatagccaacatgtttactttcattagttttataataaaggaatatttaaaatgcataaatctttgttctagcaattctacttccgggaattttttctaccaatatacacacatacacagaattaggtaattcatcacgacactgtttgcagtaattctaagttggaaggtccagaacagtgtttatgtatcatttgtgtaaaaagaagctgacacatacagataaatgtatatgaatgtatatatgcacagaatatacgtggaataatgcaaaaggaactgggggagacaaaaatgagaaagtgggtggaaaggtaaacttaacacactttgatatctgttgaattttgtactatctacatatgttactgattaaatataaaaaataatataaaaagggtattatgcagtataacagaataggtagcttagacatcagatagaccttgatttaaattctagcccccctgcttttttttaaatcttaagctgagcttctgagcctccttgctcatctgtcagatggccatcaagtatgtgaaaacacccagcaaataaaaagtgcttaaaaaattatcagaagggaaacaaccaggataaacttcagactgaaccaatatttataagacctgcctactccgcgccaggaactgcacttggcaattcggtcttcacaacaatcctgtgaagtaaaaacggtaacctcactggacagatgaagaaaagaaatctcctggcgtgcgtgcaaaaggtggaaagaaaattagaggattcctaaggtgtaactcggcagcccaaggattccacgaaagtgaagcccacctgtggagacggcagtggaagctgagagaagactatggtcagagtcgtggcttcccttgacacagtcacagctgcctcatctggggggtggccgaagaggaggcaggtgccaatacgttagtgctgcacggacttggaagacttcccttaccgaccgagacttctcaaaaacacttcccgaatgtcgaggttagaattctatttcaccctctcaggtgctgaggtgggtaaggtacctcacagaaaggatgcagcgggggagagcagtcccctccgtgggggacagcgggaggaaaaggggtcgggacgctggaggaactgaggcaaggggagcccggaaggaggcgcactcactgagtcttctccagaacatctctcgattaaactcctcggtggtctcctgggcttcgccgacttgtgggtgtggcgtgtgggggccgaacggtggcgaatggaaaagctgaggtaagcggagccacctccctcgcccaagcccggctccccgccgccgccccagcccgccctctccgcgaccccgagcccggcctctccccgaccccgagcccggcctctccccgaccccgagcccgcccctgccgtcgcccgttctaactccgtcagctcaccccgcactcgaggcaggagcaaccgcagctcctccgccaagtgccggagctgctccaaaggcgaagccagggtggggactgcggctgcaggtgcagttgcgctcgccatctcagtcgcttgccgaaggccgcaaacacaggcctccgctgccactgccggagccgcactgcgacagccgctccacttccgggccacagcgtcaagggctcgtttccgtcaacaagccgtccagccccgtcccagaggccctgccctgcctcctcccgccacgaggcccggccccgcccgaggtccagcaccacccatcccgttatcagagaccaggcctggccccgcctcctcccgccccgccctgtcccctgaggtacagcaccaaccatcccactctcagaggccaggacaggccacgccttctcttgccccttaggccaggctacacaagcaagcctcaggctcaccgtctttcttattcatcattcattcatttatttgattagttgaaaacacttccgactaaggaagcagagagcccacaatcctgtgggaaaacaggcctgggaactaatatctcaggggtagtgagggtcgggcccagatcctcaaaggttccctgcccctgaaattgcacctttgacagctgctgaattccaagcacagcggtaagtgctttacatggggtaaccctaaaaaacacactgggcctcagacactcccgtacacacacccaacctctaccctgtggatgtcctagataagggttttctcttcacaaaggtaaatcaactctttgcctccttagggagggaaggaataaaggcattatttttgagacttttctgcagtccattctgcaggtatcagtagtgggtaatccctccaacgtccaggactccaaacgagcagctgctccctaaagctcacccaccaatcctggccctccacctgctactggggtagaggcctgggctacagacacagaggctgggcttctgcccagctgccagtggtgagacatggccttcaggagctcaggtggctttttaactgcaccatgaagattccaaacttggtggagttcagtgtccacacataacgaatgagaacaggtgtcagcagtgtcaaccaggtccgcaaaggggagaataaaaaagctagggtgccgtatgttgcataaagaaagtagcaggaataaacctgccagatgtacagcagtagcataagtaggtgaacaggcataattttcaagtattttctttgatggagatgagacctgaagttgtgaccaaagcaccgctgcagcaagctccaacacatgtaagccatcaaggggatgttaaaaaacgccagctggaaaagaacagaaccatagcttactcccaagtccttggaagagtttggtcttaataatgcattattagtggatcctaagactatgctgctatctgtcttggcgttagctaatttacttcaagcacagttgcttataacacaacagctgacttgtggctagttgtgtatttgcccatgtccttttattcatcttagaggcaggtatcatttaatttatgctgaagtcccaacttgtagtacagtatcatatacacagttaatacccaatggtgttaagctggaattgaactgagtaaatgtatacacacacatacaacaacccctcttttttggtggagtgaggggaggacttggctatcagtattttttttcttacctccatttttgtttgaggtagcatgataagtactggaatataaattagagtatctaaattataatccaagttgagctgctgtatgattcattcatttaacaaatatttattgagcacccattatgtagcaggcatgagctaggctccaagttggggacacaatggcaaacaagttagaaaaggtccgtcatagagcttacattctaacagggagaagacagacaaaaaaaaaaaccaaaaaatataattacagatcgtgattagttcaatgaaggaaagaactgggtcatgagaaggtaactgggagaaaggctctcagaggccagaaggacaagaatgaatcagcggagggaagtgcattctaggcagaaggaacaaatgaaaagcccagaggtgggagaggtcttggcctctttaaggaagtgcatgcagagcatgagccaggtggaaattggggcagtcggcaggacccagatcactgctctgcttcaaagcatttcaagctgaaaagtaagtgagctgattgtaaagtttttaaaagagcacactggatgctctgtattaagctgagagtaaggaggcaagaatatcagggagaagacccaggcaagaa

SEQ ID NO: 1241916 - DNA, 4001 bp, Homo sapiens
gccagatcttgtggctcactgcaacctccgcctcccgggttcaagtaattctcctgcttcagcctcccaagtagctgggtttacaggctaatttttgtatttttagtagagacggggtttcaccgtgtcggccaggctggtctcgaactcctgacctcaggtgatccacctgcatgggcctcccaaagtgctgggattacaagcctgagccaccgctctggaccctttaagtcatttctaaaagaagttatgttcactttttgttccatggtttacaaaattgcaattacactattttctaaactgttttcatctaagaaggagtatttcccacacctttaaattgtatttgggctgatttttaatcagcttttttgactgaaattccgccctcagcgtaaaaggttaaaaattatgaattaacgcccgcgcggtgggtcacgcctgtaatcccagcactctgggaggccgaagtgggcggatcacgaggtcaggagtccaagaccagcctggccgacacgttgagacccccccccccgccccgccgtctctactaaaaatacaaaatttagctgggcgtggtggcgggcgcctgtaatcccagatactcgggaggctgaggcaggagaatcgtttgaaactggaaggcagaggttgcagtgagccgagatcgcgccactgcactccagcctgggcaacaagagcgaaaccctctctcaaaaaaaaaaaaaatatgaattaaaataataccctcaccatctccatcttctgctatatgacctgaactcagaaaataaaagtaaaccattcacactggatgtgtgtgataaatatcccctgagacgtgtgggacccaatatgattctaatcttaaaagatacgatgcagtaatagcgatatttcaagcactatcctgtagattggaggagacaaatctaaaattcatagtactatatagttagctattctaactacaagaatgcccaactgtgtttttcaataaaagtagagcagaacagtgcaaacttcaccactcaataaaataccttacttggcgctcccaatagtgctaaacataaacaacgcgtacaaggcactgcatgggacagctgctaatgaggacaaatcgattagggagaccaaagctaaaggaggccactggaactggagaaggatatggagaggtatttgatcatcatcaggctggcgtgctagcggaagtctccgggcattatttaatatttaatctttctattcctgacatcacgggggctcaaatgtcatcaaaagacaggctggcattaaacccggcagggtgacgcacataacatcttaccatatggattttcatcagtccagaccgacaagcacctcaaagcctgcccagtgaaggaagaagggtggcccaggccgtcagctctcccacccttggcgcgcagttcggtatagcactcggggtttggaggctgcaagaccaccggaccggacgccccagggtcggctcgggcctccggagctgtgcactcgcgcacggcccgaggaggtcgcccgtgcggccgctgacaccaggcgtcaagtccccgcccgagcagccccagcctaggaggcggaccccgccactgctcctctactgagccgagcgtgtcggccagggactcagacagtcggcacaaaccccctcccggggtctaagcccgcctagtacagtacctgaaggggcagcgccacctccgcccgattgtgctggctgccccagtggcggcggtcacagctcgggcgccaatgacgcctcttataaaaacaacctgctcgcaggcgtctgcagccggcaggcggtgaccggctgggcgccgcagtgcatgccgtgacgcgtagtcccgcctgcgcctcctgcccggcagcggtgaagagaagaactaccactcccgaagtggagcgcaggccgccgccgggcggctgcgggaagctgggccaggcggccgcagatccccacaacatccgggagccggcgaccacttccagttgctatggttacgagttgcaacctccagaaagaattcgtggtttcacccgggaaaacagctccccggattaaacggataggtttacacatactgatccacccagctattcatcttctgtttgctgctttaattgggtgcggttaaaaggccacgtccctaggcgttcaccggctttcttgccatctgctgcatgaaaactgactttgccgaaaaaattaacaaagaagagcgaaaatgacagaccgcaaccgggtgagtttaggcagagggctagatgtttgggaatgttggtattcgctagtataatttgaggcaccacctactcctaccacccccaaccccacaaccccgaaaagcactttacaaggcaactactgagcttttacatttacacttgtaaatgcacgtttccttaagtccgaatagcctctgaaggtgtaaagaccatcgagattgtatgcattcataccctactgttgcaaactgttcagtgatggttttgaacaagaaaaacgtactttgttaattgtatacttatttaaattgcactgtgtcaaagaagggagttgttttgaaaaaggatttggtggccgggcgccggggctcaacgcctgtaatcccagcaatttgggaggccgaagcgggtggatcacctgaggtcaggagttcgagaccagcctgacctacatggtgaaactccgtctctactaaatacaaaaaattagccaggagaggtggcgcgggcctgtaatcccagctacttgggaggctgagacagcagaattgcttgaacctgggaggcagaggttgcagtgagccgagattgcgccactgaactgcagcctgggcaacaagagcaaaactccgtctcaaaaaaaaaaaatcttacatttatattcactctttacagaagcaataaaaagtttaggtttcattctctgtcccctaattgtggtaaaagtaaataaataaatggaaaaattaataataaacgtaaacattagcaaggaagacggtggacctgagcagagacaaaagagtgcctcaaaattagaccttttttattttttatttttgcttttctattaactatattcaacatcaacagtgacatcaaaaaatcttaattttataattacagcttctgcgatgggcattattaatcaatggcttgttttcatttatctttttaaatgtatatgtatctataccaaaggacttcgaaaggtcaaagtggtctggctttctctaactgaaaattaaattactaagaaagctaataccagctactggtagatttttatacctttcaagccactttcacaggccaattttaagatgtaatttcttctgaaaaatcatttacaattttaattaacctttttatcatttaataaaagttgatgacatgtggcagataatttgaactcatccttttattattctttgtattggctatttgtttcgttcttaactatagtcagtttgaactccacattttaagaatatcaggtttgaagaaggtgaaacccatattagaaaactgcagtggttgtctatgatgtaaagtataaagcaatggaccttttgtttctgaatctataaacatttgtgaattatcctggaaatctaaaaaatttttaatttaagatttagcttttccagattttatggtactaattatgccaacaaagtttatcagctaatttgtcttctgtttttactagatttcgttttctgcattatgttttgagccaaagctgaacgaaattctagaaccagtagtaaagagggtcatttgataacaagaagagttctcagctgggcgcggtggctcatgcctataattccagcatttaaggcccagtactctgggaggccgaggcaggcgaatcgcctgagttcaagagttcgagaccagcctgaccaacatggagaaacactatctctactaaaaacacaaaattagccgggcgt

SEQ ID NO: 1241917 - DNA, 4001 bp, Homo sapiens
tttcactatctacacttttataactgtgaatatcctttatttcttttctttctttttctctttttttttttttgtttttttttttttgtttttttgagataatctcactctgtcacccaggttggagtgcggtggccagatcttgtggctcactgcaacctccgcctcccgggttcaagtaattctcctgcttcagcctcccaagtagctgggtttacaggctaatttttgtatttttagtagagacggggtttcaccgtgtcggccaggctggtctcgaactcctgacctcaggtgatccacctgcatgggcctcccaaagtgctgggattacaagcctgagccaccgctctggaccctttaagtcatttctaaaagaagttatgttcactttttgttccatggtttacaaaattgcaattacactattttctaaactgttttcatctaagaaggagtatttcccacacctttaaattgtatttgggctgatttttaatcagcttttttgactgaaattccgccctcagcgtaaaaggttaaaaattatgaattaacgcccgcgcggtgggtcacgcctgtaatcccagcactctgggaggccgaagtgggcggatcacgaggtcaggagtccaagaccagcctggccgacacgttgagacccccccccccgccccgccgtctctactaaaaatacaaaatttagctgggcgtggtggcgggcgcctgtaatcccagatactcgggaggctgaggcaggagaatcgtttgaaactggaaggcagaggttgcagtgagccgagatcgcgccactgcactccagcctgggcaacaagagcgaaaccctctctcaaaaaaaaaaaaaatatgaattaaaataataccctcaccatctccatcttctgctatatgacctgaactcagaaaataaaagtaaaccattcacactggatgtgtgtgataaatatcccctgagacgtgtgggacccaatatgattctaatcttaaaagatacgatgcagtaatagcgatatttcaagcactatcctgtagattggaggagacaaatctaaaattcatagtactatatagttagctattctaactacaagaatgcccaactgtgtttttcaataaaagtagagcagaacagtgcaaacttcaccactcaataaaataccttacttggcgctcccaatagtgctaaacataaacaacgcgtacaaggcactgcatgggacagctgctaatgaggacaaatcgattagggagaccaaagctaaaggaggccactggaactggagaaggatatggagaggtatttgatcatcatcaggctggcgtgctagcggaagtctccgggcattatttaatatttaatctttctattcctgacatcacgggggctcaaatgtcatcaaaagacaggctggcattaaacccggcagggtgacgcacataacatcttaccatatggattttcatcagtccagaccgacaagcacctcaaagcctgcccagtgaaggaagaagggtggcccaggccgtcagctctcccacccttggcgcgcagttcggtatagcactcggggtttggaggctgcaagaccaccggaccggacgccccagggtcggctcgggcctccggagctgtgcactcgcgcacggcccgaggaggtcgcccgtgcggccgctgacaccaggcgtcaagtccccgcccgagcagccccagcctaggaggcggaccccgccactgctcctctactgagccgagcgtgtcggccagggactcagacagtcggcacaaaccccctcccggggtctaagcccgcctagtacagtacctgaaggggcagcgccacctccgcccgattgtgctggctgccccagtggcggcggtcacagctcgggcgccaatgacgcctcttataaaaacaacctgctcgcaggcgtctgcagccggcaggcggtgaccggctgggcgccgcagtgcatgccgtgacgcgtagtcccgcctgcgcctcctgcccggcagcggtgaagagaagaactaccactcccgaagtggagcgcaggccgccgccgggcggctgcgggaagctgggccaggcggccgcagatccccacaacatccgggagccggcgaccacttccagttgctatggttacgagttgcaacctccagaaagaattcgtggtttcacccgggaaaacagctccccggattaaacggataggtttacacatactgatccacccagctattcatcttctgtttgctgctttaattgggtgcggttaaaaggccacgtccctaggcgttcaccggctttcttgccatctgctgcatgaaaactgactttgccgaaaaaattaacaaagaagagcgaaaatgacagaccgcaaccgggtgagtttaggcagagggctagatgtttgggaatgttggtattcgctagtataatttgaggcaccacctactcctaccacccccaaccccacaaccccgaaaagcactttacaaggcaactactgagcttttacatttacacttgtaaatgcacgtttccttaagtccgaatagcctctgaaggtgtaaagaccatcgagattgtatgcattcataccctactgttgcaaactgttcagtgatggttttgaacaagaaaaacgtactttgttaattgtatacttatttaaattgcactgtgtcaaagaagggagttgttttgaaaaaggatttggtggccgggcgccggggctcaacgcctgtaatcccagcaatttgggaggccgaagcgggtggatcacctgaggtcaggagttcgagaccagcctgacctacatggtgaaactccgtctctactaaatacaaaaaattagccaggagaggtggcgcgggcctgtaatcccagctacttgggaggctgagacagcagaattgcttgaacctgggaggcagaggttgcagtgagccgagattgcgccactgaactgcagcctgggcaacaagagcaaaactccgtctcaaaaaaaaaaaatcttacatttatattcactctttacagaagcaataaaaagtttaggtttcattctctgtcccctaattgtggtaaaagtaaataaataaatggaaaaattaataataaacgtaaacattagcaaggaagacggtggacctgagcagagacaaaagagtgcctcaaaattagaccttttttattttttatttttgcttttctattaactatattcaacatcaacagtgacatcaaaaaatcttaattttataattacagcttctgcgatgggcattattaatcaatggcttgttttcatttatctttttaaatgtatatgtatctataccaaaggacttcgaaaggtcaaagtggtctggctttctctaactgaaaattaaattactaagaaagctaataccagctactggtagatttttatacctttcaagccactttcacaggccaattttaagatgtaatttcttctgaaaaatcatttacaattttaattaacctttttatcatttaataaaagttgatgacatgtggcagataatttgaactcatccttttattattctttgtattggctatttgtttcgttcttaactatagtcagtttgaactccacattttaagaatatcaggtttgaagaaggtgaaacccatattagaaaactgcagtggttgtctatgatgtaaagtataaagcaatggaccttttgtttctgaatctataaacatttgtgaattatcctggaaatctaaaaaatttttaatttaagatttagcttttccagattttatggtactaattatgccaacaaagtttatcagctaatttgtcttctgtttttactagatttcgttttctgcattatgttttgagccaaagctgaacgaaattctagaaccagtagtaaagagggtcatttgataacaagaagagttctcagctgggcgcggtggctcatgcct

SEQ ID NO: 1241918 - DNA, 4001 bp, Homo sapiens
agcacaggagtctagagtaagctggaaagcttactgcaggcaggagaaaccaccagtaatgccataaggacatggaagaactccaaaggtcagtcatgggaccctgactgcatcactgaggccacttaatgcaggaacgaagctctctcccgccagcgtccccttgccatacaacccctcagaacaaaaactgaggtccacagggctgacccaaagtcatgaaggaaaatttcattcacatcaggatactccagtaagctgacggtgacgtatgtaaatttccacggtcaacagttaccctaagtgttagtgcttaatctcaagaactccagatatcaggaaaatgtactcacccaaaatactcccttgaaatgagccacttcataccctacagccccatagccctccatcctgccctgcactcagatcagctcaacccatcggacaggtttagacttcaagtttagacttcagttcccctcagcctcaaactgtcccacctatttgcagtcccccacactacaaggaaggctgcacagcatcagatttcctagggacttctgggaggccagagggaactagaggaggccgcactaaataaagaactctcttaaagacaaagcagcttcattactttctaatatagaaactaactgctgaagacatgcttataagaaaaggaccccgggctttaatgaagagatcagactcatttacaattatccacatccaatttgaaggtaaatcgtttttctaaattaagacaactaacacccccccacccgccacacacacacacacacacacacacacacacacacacacacaaatcttttttgctttactatttgcttaatgttttccctcagtgatagatcccatatctgagtcatctatcacgcttttctcattagagcaggtttggcttagaaataaatcccctgccttaggctgccaaacctgccaattcgctagctaaacggtcgcagggagggccctgggcgctggaattcaatcccctcccttctagtgtgcccccactcggggtccccacctccctccaccgtcgcccgcatctcctctccatcccacctcaccccccacctccctgaggcttcccaagcccaaactgcccatcccaattccctccccacccccaacacctattcaccccgtggcccctgccagccgtctctacctgtccttcccggaatctgacccctcatgctgcccacggctgcctgtggaagtgcaccagtcgcccacaccttcgccctgctgggccctgcagagtggacacgcctaaccactcgccttccctccccgccgctcccctcccggagctgggcgttttcctctgcaggacccgagaccccgctaacctcccagcgccggccggtggcttcgttaagcttcaacacgggacagatctgcccccatgcccgctccagacccggggcctgcaaaagcgcattcacccacccggcccggtccgcagcttccggggtctgcaggtccgacggcgcccgggcccctctcaacccgaggaaaggggggcggggtaggatccgggagcccccagctctccgcgggccccacagcccagggcaggaggggcgcccgcggttcccgggactcctgtgcgaggggggccgcccggacctgggggagggcaggggagcaggagcccggagggaaggcgccctgctcagctcctgcagccctgagcgggaacgtgcggacctccgcgggatccaggcccggcccgcagcagacaaaggccgccccaccccgcgccgcccgcgccacgccagcactcaccgcgccgcgccgactctgggactcagggacgcggcccagcctggctcagtcgccgccgcagcgaggcccggcccgaatgggggccgggggcggcccggggagtccgaggggcggggcgggccgcgccggagaatccgcctgaggcccggaaaggcggctccggtgcgtccctgaggccggattggccccgcggtggcggctgctgaccgaggcctgagccagcccgctgggcagagcacacggcctggcccccgcccccgccccgccccgcccccaggcctgaccctggcggggaaaaccctcggctcccggagcagggcgctgcccatcccccaccccgttcccacacttccaagagccgaatcttcctttctgcgagaggggataggtgactgactggtcatcgactggcggcagaacagggctggaatcctgctgtccaaccccagtcttgggttcttcctccacaccatgctggcaccacagcccagaaagggttaactcgactgcgaggaattaagagctgcaaggagctctctataaatacagtgtcgtgggcgcctgagccaaccgcaggacaatttccactgagctggttttcctcttttccttccacccacggccatccgaccagccctgcccccagccccaccccagactgctggccggacttggctccaacaggcctgacacctagtggccttgggctctgtccttacagggccccgctccagcctgggaggagatgggggtcgggcctgtccagattttgctgtggtgcagcccatccctgcacctgttcttggatctgttcttcctcacagggacagtgacagctaaaacgtagggagacttttgtgggccagagttaggttaggagctttccatgctgggcctctttagttcctccaaacagccccgccggctagatattattattcccatttcacagatgagaaaaccaaggctcaaagggatgaagggactccaaccttgtactgctgccaggctcaccaccagtgccagtggcagtactgggcagggcttgggaaatgagtatgaaaacatgtgcgtctctctgcatgtgttgccactgttgtaagctctttaccattttatctcatttaatcttcacaacaactcattgaggtgaataccattattctcatttttacagatcggaaataaggaaattaagatacaaagagattaagtaacttggggacacatagctatgaagggaggaaccgggatttgccctctgaatttaagtgtgcgtgtggtgtatgggtaggggtggtggtgcatgggtgtgtatatttgtggggggtttttgtcttttttttttttttgagacagagtctggctctggagtgcagtggctcaatctcggctcactgcaacctccgcctcctgagttcaagcgattctcctgcctcagcctccagagtagctgggattacaggtgcgcaccactattttggccaggatggtctcgatctcttgaccttgtgatccacccgccttggcctccaaaagggctgggattacaaacgtgagccaccgcgcccggccgggtgtgtatatttgtgaacacattcaagcaactctgtatttgagtctacgtgcatatgtgtctttgaatcacacagcagctgtgtctgtgtaattgctgactgctcctagggatgacagcagagaggcccagctgtcttgtccctgaccacctccaggaactctggaccattccacgctgctccccactgccctgccaggccctgaccagcctcgtccagcctgggtctggccttacaggtctcaggatgagtagcctccagttggcccagcaacctggggaagtagcatcacatggagaggtgtccttgggctgagggagctaggagccctgctgcaggaccctggaggtggcattgaacagatctagagaaacttactttccttcccttcacaaagagtcagtcctgtgccttgtgccttgcggtggtgacgctggtcctgtcctaagggatttataatctggcatgactcagccatggtggacagtgaaggaacatcacagagcagtttatagtgtgtctatggggggagattttaaaataatcattcaagagcagaggtcaggagggaaggaaatgtgtattggctctcattcctggaag

SEQ ID NO: 1241919 - DNA, 4001 bp, Homo sapiens
tttctagaccccatgtctcaaaaggaggcttgctcactgacctaggacagctggacttagttcagggtcgctgtccttggcagtcaccatcctccgggcagtgaggagctgaaagacgaagaaaagctccaagaagaggtttggtaccaggttctctagatagatacaaaaagaaagcccatggtatgggcaccatttggagccaaggctcagttccaagtgccttaccaattctcttacccataagttctacaagtgtctccactcccgctccctccgctctcactcaccagcaatgcacgaggagtaaacaagggctacaagctccaggcgctggcgggaagacactctggcagggtctgcaggttcatctgtgaggcttcctgtccggctggggaggggcgaccccaattctggggtgggacaggtgggggtaggtgactgctgcagctgcttagagctatggaataaagaaatttcatgagcagtcagcttggcttccctgctacggccacactcaggtcactccagagaagataccaacagcccaggagacaaacccagagtccccaagagggaaatcaatttcagggaaaacccctgaagatcccccacagcgaggaaaccgatatccccaggagcggccaggccataccgctccttcctgagcatctctcgctcctcttgcagacttctgcaccctgggggaaggccaaggccccaagggctagtgtccagggctgagggttgggaactggggacacagctgattgggggtgaggtgaagcaggtcttgggcttggagagtgaccgctcttcgctcaccggagttgggttgatcctgcgagaaggcttcgtcctgctgagagtagccacaggtttttctcaaattcctatcttcaaacatctcccctccaccaccgcaacagctagacctcttgccaaaaaaccccacaaaaaccctcaccatcacccccagccttctacccatcctggcgctccactgcggagcgccgagctcgaatgactgactccccagagccttcgtggtacccatctcctgcatgagagctgagtctcaccctgtagggccggggggaaccgagcctacgggagggaactcctccaggttgctgaggtttggcggatcagacagcgtgaggctggggcggctggggctgccagagcccctaagcctccggcccccggctccgggcaggctctccccgctgaccccctcctccaggccgcggcctccacgctcgcgggccggccccgggccccgcctcctgcccccgcggcgggccagaggggcctcggcagcggtgctctgggcctcggtcggagggaaaagctggctgcgcgccccgcggctaccccgcggcgggcctcccggcctccctggcaaggctgccgaggcgcccggggtcttggcgggggtcgggggcccctgcgggaggacgcggctgctctgctccctcaggaagttcaacaggaacggtacgaattctttccgcagggcccggagtgagctcagcgcggccgcctccccagcgttatcctagggcagaagcacaggtggaggggcgagagggtcagccgccggcccgcgggccgtgagcagccggggccgtagggcgcgcctcgggtgggcggcccgggcagcggcgcccagttggagtgcactcggcccggctggcagccaggcgccctagaggaaggggactggagggctggactccactgcgggaaccggcttcgagtcagacctgggggcgtgtcaccgctgttacctccgaaccctgggtgctgcgcgcgatccaccgcacgacggctgcgaccgacacctcttctcgcagcagcgactccaaaacggccgccatcccggtcggggcgctctggggcgactgcgcaggcgccggcgcgccgcgggcggccagggaggggcggggccggcggcggggaacgaccgttgggtcgcgggatggggagggacccggctggcggggcggggcggagccggctgttgcccagacccacggagtcaaggcctcgctgagtcctcaaccccggccgagaggccggttgttaggaggtgaaatgtggatcacagcgcctggggaggcccaccttggctgcccgccctggagcgacctgaagggagggattcgagctgggagtggggctgccgcgggtcggacgcccctctagggagacccaggacccgggagagaggtagaggggagcagagacagccaccagcttctatcttctgctctaagcacattctttcacgagtttaagtttcctagatccaactggcaccaccccagagaaattataatctaatctttcattttgactttgttcttctcaaaggccgatttttcaatcccttggccgagcagtacccatcggcttttcagcgctcaccatcaactgaccatttaggaaagaattatttctaggaggttcttaataatccccaagccacaacccttaaagtgcctcgggccaccctgcacacagaattgcttgtatgtagctttatttacttaagtgggtttacatgaggttaatatttcaactactttgcagtttagatgtcagtaagcatatcatgattagcttctgggagcttgaggtttgtatttttgggtttggtgttttttgtttttgttttgttttttttgagacagggtcttgctctgttgcccaggctggagtgcagtggcgtgagcacggctcactgcagccttggcctcctgggctcaagcaatcctcccgactcagcctccctagggctatagcccagctaatgttttggccgggagagggcagcagatccaaagtgctgggattataggcgtgggccaccacgcccggcctgagtaatttcttaatctcctttatttaattttattttgagatggagtctcgctctgtcacccccggggctggaatgcagtgggaggcagaggtgggcggatcacgaggtcgagagatggagaccatcctggccaacatggtgaaaccgtgtctctaataaaaatacaaaaattaactgggcgtggtggcacgcgcctgtagtcctagctactggggaggctgaggcaggagaatcgcttgaacctgggaggcggaggttgcagtgatccaagatcacgccactgcactccagcctgggtgacagagcgagactccatctcaaaaacaaaacaaaacaaaaaaacctgagagaggattttgaaggttgctgctcagtgacaaatcaagcaagggaatccaagcggagaaaaacagatggcacgaacattccatgtcaaaccaaaccaggaggggtgaggcagtgcccttgtgaatgcctcctgagagttgctctggttcaaaggaaggttacgggcggaaggatgagggtgggggtgcaggaatctctctagtggcagaaggggtatttcctatggagaaggaaaaagtacctccagccagacagaataatggactaaaaaggagcttttaatattttaattttattacaggaaaacatctcctaactgcagggacacttaacacctagcttctattcagtcctgggctgctttttctagggaacttctagatgtggtactgcatttacagtaacactatctgctccccgttgatcttgtaacatctggtgtattcaataactttattaaattagaaaaatattttccacttttgaaatccagaccatcacacaaacagaactagattttgcatgcggaatgaatattttattactaggttataaaaataaaatacaaaataattttaaaacagaacttaaaacactgtacaaagctttaatatgatacaaatgggaaaattaaataaataattacacttttatgtacaggtggcctatacaaaagcactccatgtttctgccgatactctgtccttggttgcctgagcaaaattgtataaagggagctgcttggaggggaaaggaacacaat

SEQ ID NO: 1241920 - DNA, 4001 bp, Homo sapiens
gcagaattagagctaaatgaaaagagagaggatgagggaacagttcagagactgatagtgagaagagtgagatttaagggtattctatacacttcccttattgtacggatggcctacaaagattagctttgtatgtacatcctgaaatcaatgtctaaaaataagaaaatgagttactacagagggatggacagacaggcaggtagtgggagtgcattagaaggactctagatggtgaggtattgtcctttcatacacccattaacacaatcccagcccaaagggtggaagctgtactcctagccagatggtcctagctcttctattggcattttctcgaagtgcctacattagtgtgccaaggaaccctacgaggcctccaagttgaagaggtggcagtctgattccagctctcagtccttaggaatgtacctttagctgttacccaaggcccaccactcctctcttaggaagatcatggaggatagttggtgactctttcccagcaaaaacttgaaagcacagcatggtggtggtggtgggggaggagataagagtgttccttctcaaatcatctccccttctcctgcccatgtatgacatgtgactctggctctcttactccagccctgcctggacagacttttctgcatgtaaacaagcctcctccctctctctacaggaagaaaggggtgtggccgaacaggaccgtgtatctctctagaaagggcagggagaagatctccttctgtctcttcagcctgactcaccctgagaatgggcctggactgggaccagcctgtgaggggagggaaagaaagaggccataaagaggactggggaggagcaaagaagaggcacaggagtgaggggattagagaaggaaagaagtgtggatttagctgagagaaatccaagaagaaagggacacagggtggcaggagttcccagctgaggtcagggttctgaactgaaatcaaaagaggtagagtgcattgggattctggcgaagggcaggagagattggggctgttgttgaacatgagggggtgtctggaactgagagcctcctgggaattgaattggattttgtgttagacaggtctgggttctgaagaaggggagggtttgggtctgcggtgttttaggttggcagtctgagagtcaaaagaaggctcttgagggggatggccggactaggaggccagaggaggggtgcaagtccaagatatgcatgtgggtggttaggcctgagtgaggtgccaccagatggaggattcaggagtgtttgggctcagggtttgggaaattgagggtattcgagatctagaaggtggaataagttttcaaattccagaattttaggtctgatgggagaggtggtggaaaggtccaattgaaaggcagggactgctgggatgtgagaggtggaggccaggaatttggaggttagagtggagaacatgttaggggaccacagtgataatcagagggaggatgtcagagagaaaattctgtgatctgggaagggggctgggctgaggtggggctgatattggactggtgttggactggctctcggcagggctagggctggggctgggctggggtcgggccacactctaatcggattggggctgggctgggctgggctgaccccgcgcacctttgtggaggccggtgagccggtccttcagcaccgtcagctcgtagatgcggccgaactcctcgaacagcggcttgaggtcctgctcgtccaagccccgcgggatctgccccacgaagagcttgatggcgtcgtggtccttcatgggtacggcgggaccggggtttagcccgctcatgccgacgccgctgtccgcggtgctgaaacccaggcgcgggccggggccagcgggctgcgctgaccctcccggcgccgcggccatgtccccgccctgtcagccctcccgccggtcccactggtcccgcctgtcccgccgtcccctccctggaccggtggcgagggccagggggagggggcggagcccgggcggagagggcggggggctgcccagggggcggggtccgggtggaggggcgtagagggggtggggcgggcaggaaaggggcggggccggggcggggcgggcccgggccgaggtggcggctgaacgctggggtctggcttgaggtccccgtgcggctctctctgggctcccgcccgagctctcccagagccgagccccgagccccagcccccgtgcttggtgacgtcaggcagctggccgccgagtctacgcaaatgatttgcataatgaggaagcagccgccaatcagagtgggagttgactgggctcgccgggggcggggggggcggctgggctcacgcgctcctgctcgccatggcaaccggaccctcgaatgccctgtgtgtgtcgagtgtgtgcgggcgtggccgtggatcgcgcgtgtgcgccttgggccgcgtgaggggaagcagcttcgtcatgcgtgatggtgtctgccggagtcggggctaatccccaccgcacacacaggcacacacaggcaaacgcaggcacacgcaggcacacacacctccaaacgctggtgcgtttcctgcgggggtggatggggattcctcttctctattcccactatcgagccagtccctcggagccaatcccaccccgccccatcacacatctctgtcttcggtgtctttaaccactttcttacccctgagcctcagacacattcgtctcccttgcagccttaaaaagaaaggaagaataaaataaaaaccccttaaacactccttgaacacggattcctccttaggagagtgagggaacttagccgtatttactcagaacccattatgcaccaggtgcccagttcatcccagttctgtgaactcaggagtgttctctttttccggaaaaggaagctgaggttctgagggtcgaggatgttagggccaggcccaccccaacatttgttgggcccagcgcaaaataagaaatggaaatcgacatactgtgcatctaaacatttaaaagatacaaatcaaattacaatttgttaaatatgttcccctcttattttcacaaatacaggttcagaattacgaaaatgaaagacatatgtacagctacgctttctatatgactgaaagttggcaaaatatcagagctgatggaattttattactcctgcacatgtctaggtattctcttgatggatcagtgatgtttgcacaaagtagtaatacaatgtttggacaaagacacatacttcataaattatatatttattccataatatatttttcatgcctctttcagtaaaattgctaattattttaatagagatttcctttttttttttttgataggttatcattctgtcacccaggctgtagtgcagtggtgcgatctaagatcactgcagcctcaacctcctgggttcaagcgatcctcccacctaagcctcccaagtagctgggatgacaggtgcacgctaccatgcctggataattttttttctttttttttttttgtagagatggtggtttcaccattctgcccaggcttgtctagaacactcctgagctcaagtgatccacccacctcggtgccccagagtgctgggattacaggagtgtgccactgcacctggcctaatagagattttaacataacttgtgtccattgactattctaagaaactgctggagaccagcagtagcaactggaatcatcaaaaagttcttaaaacaatattcaattcagaagcaaatcatgatttttaaatgatttatttttctggctgagcatggtgactcacacctgtaatcccagcactttgggaggccaaggcgggcagatcacttgaggtcaggagttcaagaccagcctggccaacatgacaatatcccgtctctactaaaaatacaaaaattagccaggcatggtggcgggctcctcctactctggaggctgaagcaggagaatcgt

SEQ ID NO: 1241921 - DNA, 4001 bp, Homo sapiens
gcaattacaatgaaggaatggcctcaatccgaaacggactgtgttttctgatatcagaaggatatggagaaggagaataacccccacctgattcttaaaaacaacaacaacaacgaaaccctgaaagttccatgtggcaaaacaggaatgatctctctccaagggtaagtggcaagaaccccctttctctatcactggcatctgtttaggcccttcttgcctcttctgggcctgggctccccagaaccccagccctgctcagtctgagcagggaaggctgagctatttctggggctcagcaactctgagccccacctgtccccttgacccagggaggctctcatactaaatgggtaggacagactccaggtgtgggcccaccctcccttacacgggttgcagcctgaggttggtcagacagggaagttacctcctcggccctcactggcagctggcttcacttggatcggacgattcatctgaaagacatcggaccaacacacccattcagcgtgactgcctggtcctggagcccccagcttctcgaaccctggactcctcaggatctgagccctagcccctttgaactctgcactctaccacttccaaactgggattacagattttctccaagattccttccttaaacccaggaatttagaaggtgctgaaactggcagggatgggtgacaggaacttagtggcaagcacaaggtggaatgaagcggctaaagagacttttctgcctggggctctgggcaggggctatgtgaggcctgtccctttggcttctggacttacttaaaggctttgcatgagaggattgggaaggagggtagaattgatactgcagatttgtgttttatgtctaaaatggagaatatcacgctatgtgtcatttagatgagagtctgggaatcagactcagtgctatctgccctcaactctagtcatttaatggttgtatgactttaagtaagccaccttttctcagattcaatttttctttttctcctgtgtagctgaaattacaggcacgtgccaccaggcccggctgatttttgtatttttagtagagacagggtttctccatgttggctaagttattcttgaactcctgacctcaaatgattcacccgcctcagcctcccaaagtgctgggattacaggcgtgagccactgcgcccggccagattcaatttttcaaatgaggaaaacatttcccaagctgctgtatcactagagtctccacgctcacctgctccatcccctccctagggtccccttccctgaggatgctggagttttccaaggtgccgttctcagccctttttgtctggctcttcctacttttcttggatagtctcatccacactcagcctcagctcctctccacacagggatgacttagagctctgtgtctccagcctgcattctcctctgagcttcagagccatgttaccagctgcctgctggacatccccactagaaagtcccacgggcgccttcactcaacacacccaaacgagagctcatttgtttttttttttttttgccccaacctgatcctcccagtcacccaagctataagcctggaaagcagcttgacttctccttccatcccttccccgctcccaccaacttcatcttttaattcaggggttcctgaggaagtgtagataaaaatcacccaggaaccagatgaggctcttaagttggggtattgcataatttgaaaacgctcctaggtgatttcaatatatcgcccccacatccccatcccccaaccaccctgagtgaattcatgattgaatccccatctcaccttcctctcatgggtgttgtggggatcacatgaggtaatggggacgcaaaaggtctttgtaaactgccaagagctgggtgcgtgggaggtgaggaattattgttggggggcaggcagctgagtgccaggagggaaaaacagcggccttcccgttcatggaggaaggggtactgatgcccatctggcctgagaaggtgatgatctgaccccctcccctcaggaaatgctctgcttctgcaccaatcaggggccactccatcccttaccaatttgctcgttgccgagacaacaggcagcttcctgttaccatagccacaagtgctacccagtaaccatggtaacgccctggcagtcacagttgagcaatttcctttggatcaaatttgggggtgggaggggcagggagggcttactaaaaaaaaaaaaaaaaaaggaaaagagaacaggccaagtctgaaccagcgcaactcccctcccacccagggctctgacacacccacccgctggtggtggagcacctgcagtgtaccaggctgtgggtgggggcggagacaccaacaggactcaggttgcagtctagaggggatgacagatcaatccaagcagatcagggcgagcttgacaggtctggactggcctggaccagggaccaggaggacaggacccgtccctgggcatggccacctgtgattgtggaggaaagaccaagagacagagccatggagagcagagacacagggagagatgaagaaacactggcagacagaaatgatgtgagagaaagacagttctagaaaggggcaaggaaagagagttactggtggagaggggaaggaaatgaggagaggaagggtaaggaagcgggtgcaggagaggcagggaggagcctggtagggaagaaggccaaaagagtagaagcctggggtggggggcagtgagggtgagcaagaccatcattattttattagttcttaaatagatcctgagaatttctctctggagcctagagtgacgagcacacgtgacagcagcagtttccatggcagctgcctccctggctgggtttcctgggagatggtgctctgggggacgccaccttctctcctcccacccacttccccacccttcaacagagagtgggcatcgggtggtacatacatgttcccccctggacctgacctaggcctcccaccacccaggcatgctgccagcatttcctgaactctgtgatgagccccaggcagcctttcgtgggagacagtgatgatctgtatggggatcctctcttcataggctcgcagaggggaagataatgttaccatttcctgagagcccactctgtgccaggcccttcctgggacactttacatacattgtctctaaatccttccaaccactcttcaagggaatacaagtgtccccatatcatagatgagaaagctgaggctgagggaggtgaaatcacttgtctaagatcccatggtgggtaagtggttgagctgggatttacccccagatctgtctgaggctgaagcccatgatttttgcactggagtgctgctcaaatccattcttaaggcatgaacacaaatagtgaggcacagagggaccagggcctcgggggagtgcaaggtcaagagctgtggaagaggcagactccagctgaagaggttgactgaggaaagctgcatagaagaggcaatgtttgacctgagccttgcaggactggggtcattggccatgtagagataataggagaggtaggagtggtggctgagcacgctgaatggctagggtacggacagggagctgcaatggctagggtacggacagggagctgcaagcctgaaggagcaaagtttctagtgagcacttggcatgggagtagccatggtagagcaaattgcttcctagcagatagatgtggatttcaatcctggctctaccacttgcttctctaaggtctctgagcctcaatatccacactagtgaagagggaatcatgatcttaacttgcagcgttgtgatgaaaatgacaactgctagatcttagtagatacctcagatataaaaagttattgtttttttttgtttgtttgttttttgagtcagagttttgctcttgttgcccaggctggagtgcaatggcgtaatctcgcctcaccgaaacctctgc

SEQ ID NO: 1241922 - DNA, 4001 bp, Homo sapiens
ggtattgtcctttcatacacccattaacacaatcccagcccaaagggtggaagctgtactcctagccagatggtcctagctcttctattggcattttctcgaagtgcctacattagtgtgccaaggaaccctacgaggcctccaagttgaagaggtggcagtctgattccagctctcagtccttaggaatgtacctttagctgttacccaaggcccaccactcctctcttaggaagatcatggaggatagttggtgactctttcccagcaaaaacttgaaagcacagcatggtggtggtggtgggggaggagataagagtgttccttctcaaatcatctccccttctcctgcccatgtatgacatgtgactctggctctcttactccagccctgcctggacagacttttctgcatgtaaacaagcctcctccctctctctacaggaagaaaggggtgtggccgaacaggaccgtgtatctctctagaaagggcagggagaagatctccttctgtctcttcagcctgactcaccctgagaatgggcctggactgggaccagcctgtgaggggagggaaagaaagaggccataaagaggactggggaggagcaaagaagaggcacaggagtgaggggattagagaaggaaagaagtgtggatttagctgagagaaatccaagaagaaagggacacagggtggcaggagttcccagctgaggtcagggttctgaactgaaatcaaaagaggtagagtgcattgggattctggcgaagggcaggagagattggggctgttgttgaacatgagggggtgtctggaactgagagcctcctgggaattgaattggattttgtgttagacaggtctgggttctgaagaaggggagggtttgggtctgcggtgttttaggttggcagtctgagagtcaaaagaaggctcttgagggggatggccggactaggaggccagaggaggggtgcaagtccaagatatgcatgtgggtggttaggcctgagtgaggtgccaccagatggaggattcaggagtgtttgggctcagggtttgggaaattgagggtattcgagatctagaaggtggaataagttttcaaattccagaattttaggtctgatgggagaggtggtggaaaggtccaattgaaaggcagggactgctgggatgtgagaggtggaggccaggaatttggaggttagagtggagaacatgttaggggaccacagtgataatcagagggaggatgtcagagagaaaattctgtgatctgggaagggggctgggctgaggtggggctgatattggactggtgttggactggctctcggcagggctagggctggggctgggctggggtcgggccacactctaatcggattggggctgggctgggctgggctgaccccgcgcacctttgtggaggccggtgagccggtccttcagcaccgtcagctcgtagatgcggccgaactcctcgaacagcggcttgaggtcctgctcgtccaagccccgcgggatctgccccacgaagagcttgatggcgtcgtggtccttcatgggtacggcgggaccggggtttagcccgctcatgccgacgccgctgtccgcggtgctgaaacccaggcgcgggccggggccagcgggctgcgctgaccctcccggcgccgcggccatgtccccgccctgtcagccctcccgccggtcccactggtcccgcctgtcccgccgtcccctccctggaccggtggcgagggccagggggagggggcggagcccgggcggagagggcggggggctgcccagggggcggggtccgggtggaggggcgtagagggggtggggcgggcaggaaaggggcggggccggggcggggcgggcccgggccgaggtggcggctgaacgctggggtctggcttgaggtccccgtgcggctctctctgggctcccgcccgagctctcccagagccgagccccgagccccagcccccgtgcttggtgacgtcaggcagctggccgccgagtctacgcaaatgatttgcataatgaggaagcagccgccaatcagagtgggagttgactgggctcgccgggggcggggggggcggctgggctcacgcgctcctgctcgccatggcaaccggaccctcgaatgccctgtgtgtgtcgagtgtgtgcgggcgtggccgtggatcgcgcgtgtgcgccttgggccgcgtgaggggaagcagcttcgtcatgcgtgatggtgtctgccggagtcggggctaatccccaccgcacacacaggcacacacaggcaaacgcaggcacacgcaggcacacacacctccaaacgctggtgcgtttcctgcgggggtggatggggattcctcttctctattcccactatcgagccagtccctcggagccaatcccaccccgccccatcacacatctctgtcttcggtgtctttaaccactttcttacccctgagcctcagacacattcgtctcccttgcagccttaaaaagaaaggaagaataaaataaaaaccccttaaacactccttgaacacggattcctccttaggagagtgagggaacttagccgtatttactcagaacccattatgcaccaggtgcccagttcatcccagttctgtgaactcaggagtgttctctttttccggaaaaggaagctgaggttctgagggtcgaggatgttagggccaggcccaccccaacatttgttgggcccagcgcaaaataagaaatggaaatcgacatactgtgcatctaaacatttaaaagatacaaatcaaattacaatttgttaaatatgttcccctcttattttcacaaatacaggttcagaattacgaaaatgaaagacatatgtacagctacgctttctatatgactgaaagttggcaaaatatcagagctgatggaattttattactcctgcacatgtctaggtattctcttgatggatcagtgatgtttgcacaaagtagtaatacaatgtttggacaaagacacatacttcataaattatatatttattccataatatatttttcatgcctctttcagtaaaattgctaattattttaatagagatttcctttttttttttttgataggttatcattctgtcacccaggctgtagtgcagtggtgcgatctaagatcactgcagcctcaacctcctgggttcaagcgatcctcccacctaagcctcccaagtagctgggatgacaggtgcacgctaccatgcctggataattttttttctttttttttttttgtagagatggtggtttcaccattctgcccaggcttgtctagaacactcctgagctcaagtgatccacccacctcggtgccccagagtgctgggattacaggagtgtgccactgcacctggcctaatagagattttaacataacttgtgtccattgactattctaagaaactgctggagaccagcagtagcaactggaatcatcaaaaagttcttaaaacaatattcaattcagaagcaaatcatgatttttaaatgatttatttttctggctgagcatggtgactcacacctgtaatcccagcactttgggaggccaaggcgggcagatcacttgaggtcaggagttcaagaccagcctggccaacatgacaatatcccgtctctactaaaaatacaaaaattagccaggcatggtggcgggctcctcctactctggaggctgaagcaggagaatcgtttgaacccacgaggtggaggttgcaatgagccaagatcgtgtcactgcactccagcctgggtgacagagtgagattccatctcaaaaaaaaaaaaaaaatgcagcagcaaattatgattttcaaaaatcatttttctggcgggatgcggtggctcacaccagtaatcccagcacttcaggaggccgaggtgggtggattgcttgagatcaggagtttgagaccagcctggccaatatg

SEQ ID NO: 1241923 - DNA, 4001 bp, Homo sapiens
cagaaaaccgcatagttgcttttgcaaatgcatccgattgccttctctataaatttgctctatttgatttcttctccattctatcattaatcgtaaaactaatatatcctcccaatcccatatgtactaaataaataatttaatttgatggaacacatgaacttgtgccctacacagaaaacagtttgagctggatccctaattatgtctggcgtaattgtatctggcattatctcactgcctgggtcggattctcaggggccatactttcctaacagctctgaggggtctccgtggtgtcatagaaaagccagagaaccacagagtgcccccgggaggtcctgcagaactgccggctcagctaggacctggtcacaaaccacagactcctgagggctgggctgcctcctgagtggtaataccgagggccccagcggactctcagtccctttcctctttcccagcgccccaacgccttgggtctgggaagaaagcgcacgacttccccggagacccagggccacagaccccgagtggaggaagtggctgggagctgtccatggtggcgtcgcgcctgggcacgcagagccgccggctccccgccctcgggcgcgccctggatcactttccagaccgcagggatggagagacgcgctccccggctcaccgtccctggtatggggctgcagccaggcactggctcacacatcagaagattagtttttaaagggagctctcacctgtgggtagcgttggctgcttggagaaggactcaggacctcaaacccggcagctggcggaactcctgggactgccgtagcgtccgacccttggggaacagcggctgtcgcagagagtgtctgcggctgaggacccagggcgcacagcgctcctctctcatgagcacacgcatcccttggggtccattccagaatgtcactggccttcgttcccagagcggcgagctggagacctggccagcgttctgccaggactctctgcctttcctcacaacctaacgcgacctttcttggagccgacgtcctttgccagggaccaccagaccttcttccagcgatgccacgtttggagtctcagtctaaacatcagcagagccccccgggttcatctaacattgcaattgcctcagctcggccccgcgccagcgcgtcgctgggtgcctagcgctgtcccggaggcactgggaggcgagggaaactgggaggaagagcgtgctgaggcaggagcagcagggcgcagacctgttgctaggcgcacgcccgctagagctcggcgtgagctggctcccagtcggcaggacaccgagacctgacccttgtggtactccctcctcggcgagacactctcccgggcgcaagcccccggtgccattcagaagggggaaaatctacggaaagcaggagtctgccccctctggatgccctctggggactccagcgccccccggcacctgcagcttgtaaagcatcacaagatctcagagaaatcccacagaggacagtgccaagagcgtgtgcccatcaacagacgcatggacaaacagacagatagaggtagactgcacagcacagggtggacagacaaacagaaactgaggcgggtaacgtttaccctgtgccgggtggaggcgcgggcccccacttcttacctctcttccgtggcatgggccgtcagctcatccctgacgcccccagccaggccctcttacctctgggtctgtagccgagacagtgtcacgcctcgcgggccaggagcgcagcggccccggacgtctggtcgctgaccgccaggcgccgcgagctcccggggcgtgggcaagcggagtggtagctagtctgggaaatctgggttcagaccctggccgcgctcagccccgctggctccccgcgccgcttgcgctcgccaggctctgtccgatagcaccgcgctgggctctgcttgagcgctagctccccggccctcagccgagaggccgcttttatagccacttttactgactcctcccccgaggagcccctgacgcccgcgcggcaccgaagctccctccctcgccccccgatgaaacttccctccacgcgcccccgccttgcccaagtggggcgggggccctgtgcccgggccggaccggggcgggctctggcggcggctctgggagacgcagacctgagcccgcggagcccgggtgcgcagagtcccgcccgcagcagccaggtgagggcgctggaggccaggactcggtggagcggccgcggcggaccgcggagagcaagtccccgggcctccaaggagccagggtcgcccgtgccccgctcgcgccccggggcgccctccgaggcaaagaggcagtggaggacaggagaaaaggtctgcgcctgccacagaatcgccgcgagtcggggtcccaggctaagtctcaggatctctttttaactcagcagcaaaagagtagcccgagaaagagattttggtattggcctagcagttaatccgagaggaagatgcttgggtgttcactgaaaggcaccttggtttgaaactggattcagacatgccagttacaactgtgtacaggatcttaacccctcccagtctcagtttcctcatcaggaaaatgggttctgtgatgcttcctcactagaatggtgaggcttaaatgagatcaggaaagtccaagttctaagcacataataggtgcttggtaagttagaaacattccctgtgggtaggagggctctgtgcctctttaactggacaggccaaagttctgaagggtcaaagcaagaaggtgcggctggtctagacattccctcgcgggaggaaacagtaccagtaggaaaagttcatcacaacacatccctagggcatatggagtctcctctcaactctgccgctaacctactgtgtgaccagggccagctacttcccctgtctgagcctcagggtggtttttttgcagggaggtgaggagtgtttgtttttcttgttttgttttaatctgtaaaatgagggcgttgatacctgctctctgcctcttccacctttcagagtgtgactcagccccctttcctggttagcagaggcctcctagaatatacatttctttcttccttcctgccagtgttctctgagaaccagctcctcaggcaaggtctccattctgtgtagtacacactagctccgggactctaggtctggactttaaggccaggctgtggtcggcagaagctgtggaagtctgtgatcacatctgggctgaagcagaagcctttgtcacctggttaaactgggaagtcctgcaatccacctctaggcctcttccagaaagcggaacttgatccttactgggggtggtggtcaggattctcagcccttctttgatttattgggaagtaatgaactggatccaatggcaagccctcctccccaaccttttctttccagccgaataaaatggagcccccccgacccagggcccctctccccagtcctcaccatgattcctgtttatgtttttcttccttaaggagctcccagaaaccagacccacaaagagttgtgtgttaggggtttgggggtgctgggcatttggcccaaatggagaaaggtcgaccttgaatcagcctggcttggcacgacatgcaggattttccatcaacagacagtagatttgaggcctgagtggagccaggtagctctctggtgaggggctggctccacagccatctgggagatgaagtggtaaaggcagggtcctgtctagggatgggccctgagaagtgcttggctatgttttctcaaagcactgaaatgcccagcacattcctctggtatccagttttctttatcacagaccaatgcccaggggaaaagagcagtgctgatgaattacaaacaggctccgaatgtctaaaaccagattctccagccagttctccattcagcactgccattcagcactcagtgatgaacggggcgtgccg

SEQ ID NO: 1241924 - DNA, 4001 bp, Homo sapiens
actataagcaccctgaaggcagaattaaaatgtatctgcctgcttgcacatggtgggtacataacaaatatttgttgactgaatatgatataggcatgttaccttatacgaattcattacttcaataaaattttattgaatacccactgtgttccagatcatatcctagatgcacctaagacatggtaccagccatgaggagctcactgtctctgctcaccctctcttagatagagccactgatataaacagttacaataacatattgtaataaattccgtagtagatgaaagtacaaagcacaaattacttttcctaagaagaaaggatagtttagagaagttttacagaaaaaaaagagcttttagattagaaataaatcttaaaggacacaatatggctataagtggttctaagaatgagggcactcattcagacaacctgggctcaattctggctcttctatttatcagcagtgcaatcttgagcaaactgtttctgcttctacgttaaagaaatgggggtaaaaataatacctacttcaaagattgattctgaggattcacaagatactacatgtaaagtaattagcactatgtaccaatcaatacattgtagttttattactattatgacattattactgatgaataggagtctgccagctaccgaagaggtttagggaataaagaggattccgcatatctgagaaaaggtgaatgtgcagcctatgagaaatgtcacttctaataatgcaacctcctatggaacaaaaatgccaccctccttcaagatgccctcccaagcctgttcccccatggagctggccactcctttgcactttcagactgtatttcttatgcttttcttatggcttcaacttcagcttctctttagttgagtgcattcacctgtctagggagtgcatgttcattgtcacgcactatgaaggtataaggtgataataggcttaaatcagactcaagttcatgactacgatataggaagggttataaacccccacaaaaggggtttctaagaactgcacttggagttgggaaattctacttacttgctgacataactcgccttctagaatggaaatagccagagcacatagcccggtttagacttgcaacacctggtggagacaccttattcattcattcgacaatttaccaagcactgttcaagattacaaagtttaacaggacacgatgaagggaaagaaaatagacatataaacaaatgatcacaacatcttgtgatcagtgctaataacagcactttggacaaattgattcaagttgcccagagggcggagcgagtaatgctaatacacaataagcatccacaggctgagcgaatgaccttgaggaactgtttggcgtcagctacggcactacaaacatgaccaaagccgcacggggcccaggatgcccggggctactggcttcgggtgccagcgtcacttgtactcggtcaacacacgtgcacagagcacctactgtgagccaggcgtgacgccagggtgaccaaggcggggtccgcagagtagggtctcagggcgaccccagcagcctggaaacgaggcgggcttcccatatgtcacttctaagtaggatattggaggaatgaagaggtctaaatgacacgttaaggtaaaagctgagcccgcaacatgcgggcagtccaccaccgcgggatttggggagggggcaggtcagcccccccaggaaccctcagccagcatcccgaggaccccgcaactcctctaaccccaggtccaagctcacccgtgaatcagaacttaccggaggccacggaggctgttaccgcgaggaaactctagtcctggcggaagaccaacttctagcagatccccttaccctggctctagtccactagctccttcctagtcacaaccgaactcacggggcggaggcccttaaggagcactcgcatccttcaatcgccgactagaagctcgcccggtgggcggagccgtgccagctcagggcagagcgaggaggcagaagtctccgccttcctcaagcttggttgagaagtccacctgcagttgcaaagtacggctgtttgaaagcgggcgccagaggtggcgggaagctccccctgtgcgcccattggtggattcgagagccaattacgaggaagtcaccccggagtgggcgggctgatcggttgcctagagacgccgaggcgcttcacccgctaccttcggccagggtgcagcagtcttacggggaccccttgcccgtttggtaccggagactgcaaaggtgactcgtgcctcctgcgcttcagcacacagaatcccgcagattccccaccgaactcttgccttagaggttttttacatttgcccttgttttctaaggcgcctgcttccccattatttaacagccttagatattttgctttgtcttctaccttactaggtgccgctttgtttacatttttgcttctttaattactgataagatggcacatttttccacgtgtctatttactactctaatttcctcgggtgtgagtgttcttgtcacttaggtgtatattattaacctgcccctaaagacagcgccacccagtcctcagtaaagcccagtactgtgtctatcttctctggctgaaagggttccagtgaataatcaaggaattggtggcggcaggttcacatatcctttcaaccctttcccatgtgtactggcacggagtaaaatggttgttcgaggctcttcatactgtggctggttttcctttgctacttcaccgtccgcccccatgatgcctacactgacccctgtaaccccataaactggtatagggtttggcaaacaacaggtaatttaacccactgtaatagaatgaacgaaatcacagcctgagctaacaatggttcccagagcgctttttttctttcacctgctgtgaaagctgtttctttcacctgcatcgcctctaccttctcctgctacttagttttgaagacagactagcacctcctttgaagcctttcatgacacacactccctcacttcgcaaaaatgatctttcctacctctgtacacagtgtatcctatatatcctattatagttcttttatctactgtaagtttttgtgtgtcttacactcagtacaacgtgaatatcttgaagtactcactttacttcttgggtgtctaacatgaccctggtaggcactcaaaacaattatgttaaatgagtaaatgaataaatgaacaaatagatgaagattttggcaggggggcaggcagaaaaagcaaataaaaggccttcaagtaaatggcatttgttgaatctgagccaaggcatcttagtgagaattaaatgcacttttcacttttcacatcccactgaagtcgattggcaaactgtatgttgcattctgtgctgagggttatgatggagtgctgcagcaagaatgccaggtgatccccatgcacaaacaactgcttcttagaaggatgaaagcataaaacgtgtcagggtaagcacatgaggaggcagtgtttataatccattacacagtgctttacagattggtaaattctttcacaagcatcatctcatttggttctcactacaacactgtggggggttaggacaggtattcctacccattttccagttgaagaaacttacataaaaataaattaaatgacttgtccaaggctacacagctaatacaaggcagacagaatctgaaaccaggtcctttatctccaaacccagagctcatcactacatacaaaatattttagtgagactagcatatacgtgacaaagagggaaaataaagaataaatcaacctcccatcctgccatgcctctaaaaatggtttttggtggagttatggatatattcaactaaatttctttgaccacctatcctgtttaagtcctggcctaggtgcagggtaggacccctatgctcaaggtaccaacactctgagtta

SEQ ID NO: 1241925 - DNA, 4001 bp, Homo sapiens
agcaaaagatccttatttggtcacgcatggcaacagtagaagtaatgtataaatcatgcgtattttcatggtaacaataatggctcatggcttccataatcggcaaccgccacagtgaccgttctcacatattggagcaattctgccattgcattccttacaagtcaggaatgatctattcttagtgtgataaatcagacactcaaatgcatgccatgctaatactatgtaaagtaaatataaaacatggagctaattagtgcataaaataccactgaactcttctatagttccaattgtggaaataattagtatgcaataattattactaccatagggcactttctgtatatgtaacgaatttgtcttggttcaaactcagtaacaattttaagaatgtaattcacaataaatacatgttatatcatgatctaatacaaatacccctacaaatatatatgtatatgtatgaacatatacatatatatatatacacatgtatataactgaaaccacattttcataaaataatacttatctatgctatctgtttgtgataaactctgttgcctattcaggtcaaatttttttgtttgtttgtttttgagatggagtcttgctctgtcacccaggccggagtgcagtagtaggatctcagctcactgcaacctccacctcctgggctaaagtgattctcctgcctcagcctcctgagtagctgggattataggtgcccaccaccacacctggctagtttgtatttttagtacaggcagggtttcactatgttggctaggctggtctcgaactcctgacttcaggtgatccacctgcctcagcctcccaaagtgctaggattacatgcatgagccaccacacctgtcatattcaggtctaattgagactgtttattttgaaaactgttggtgtggaccctggcactggttctctgttggttaatgcatgacgatgcacacttacgctgcccaaaccaacctaactggactgctttaccatctctacactccacatactacttagattttgttctcatttcaggtgatttaaaaacattttctaatgagagttttgaaattgagggtaagctcaaatatcagagtgattcagtcctctgaactatgaccacaagagaaggcttccttccttccttccttccctcccttcctctccctccttcctttctttcttttttttttttttattagaagttttgctcttgttgcccaggctggagtgcaatggcgcgatctcggctcactgtcacctctgcctcctgggttcaagcgattctcctgcctcagcctccccagtagctgggatcacaggtgcccaccaccacgctcggcttatttttgtattttgagtagagacggggtttcaccatgttggccaggctagtttcaaactcttgacctctggtgattcgcccaccttggcctctcaaagtgctgggattacaggcgtgtgccaccgcacgtggctgtgggtgggtgcctttcttacctttgaggtcctagcatgtataattctggacccctgatacatgttttgaatttgagaataagtaaaagggtatctttagtgttcgtttagtcatgatacagggctaataactgctacctgggaaaaacaaagcacaccgcaggaggctttgtagccgggggaaagggggtggtggcagtggaatcacgtccaggcctccagcacatttcagtgctccccactgaatcccccacctcggcacccagcaggaacctgggccagatccctgtttacctgggtggggttagcgtccagaggaggggggcccaacccagcaaccctcttctcaatttgcaacgtagaaacccacgaaagtaattacaaacttgttaaccgctgggcactgtcgccctggagcgctcctaacggactttgcaaggcccagtacacgggggctgccgcgagcggggagcgcgactgggccccaggacaccatctgtgcgagcacggggactctgggccttgacctgcgcggggacacgggccctctctcggccttgacctccgcggggacacgggccctctctcggccttgacctgcgcggggtcacgggccctctctcggcctaggtctgcgcggggacacgggccctctctcggcctcgacctgggcctgcgcggggacgaggaccctcggccggggtctgggcggcacctgcggggggcgcggtcgggcagccccacacaccgcggtgagcagggcccgatgccctcttccctccacctgccgtccccgcacccgccccgggccccgcacctgcctcctcctccgtcctgggccgaggcgggtccgcgaggccgggcggggggtccccgcagcggtgcatcccgggacactgcccctccagcccgggtcgagggatgcccgggtgcgggccgagagagcgcccaacgaccgccggctccctccctgggcgcccttttcaggtactgcgcctggaccacactcgtcctacaccggcctcgcgagacaccatcactcgtgactgggtgagaggggctaagcggctcacctgcgctgcacagctggtacccgggactgctgaggtttgcacctgggccttccgtgattccgaacccagcgccttacacaacctcttcagaaggtgaaaacacgaagggtctacaggctgttgataggaaggggaagcccttctggagtaagtccataagcacccatggattatctcagccagcaagcccaggtctgcagccatttcccattatgaggctgaattaacagacacggaaaaatagaaaatagataagataaggcaatgaaaccatccccagcgagagagaacagggagcattgtttctctgaatatttgattaaaatacaaatctaggaaaaccatttacatgcagtgagctgtgctggcaccactgcacttcagcatgggtgacagagtgagaccctgtctccaaaagacaaaacaaaacatttacagaggagacagtgtagcagagtaggggaaaacaggcatgatagccatacagccctgggtttaaactccactcattcactaactttgggatgtgtgacttcaggctttttagtgctttttttttctattttattttattttatttattattattttttttaagatggcgtctcacactgtcaccaggctggggtgctgtggctcactgcaacctctgcctcctgggttcaagcgattctcccccccagcctcccgaatagctgggactatagccacgcggcaccacgcccagctaatttttgtatttttagtagagacaggatttcaccatgttggccaagatggtctcaatatcttgacctggtgatccacctgccttggcctcacaaagtgctgggattacagaagtgagccactgcgcccaacctctttttttgttgttgttgtttttttggagacagagtctcactctcacccaggctagagtgcagtggcacaatcacagcttaccgcagccttaacttgctgagctcaggtgatcctctcgccccagcctcctgagtaactaacgacaggcgtgaaccactatacccgactaatttttgtatttttttgtagagatggggtttcaccatgttgcccaggctgatctccaactcctgggctcaagcaatctgcccaccttggcctcccaaagtgctaggattacagatgtgagcctccacacccagccttgttagtgctttttaatagccttttgacacactaattccctcatgagtaaaacctgttttggatgtaatgaattgaattgacacggaagaagatcaaatcgggtatgaagaagtaaagaggaccaggcgtggtggctcatgcctataatcccagcactttgggaggccgaggcaggtggatcacctgaggtcaggggttcaagaccagcctgactaacatggtgaaaccccatctctactaaaaatacaaaattag

SEQ ID NO: 1241926 - DNA, 4001 bp, Homo sapiens
gaatgtaattcacaataaatacatgttatatcatgatctaatacaaatacccctacaaatatatatgtatatgtatgaacatatacatatatatatatacacatgtatataactgaaaccacattttcataaaataatacttatctatgctatctgtttgtgataaactctgttgcctattcaggtcaaatttttttgtttgtttgtttttgagatggagtcttgctctgtcacccaggccggagtgcagtagtaggatctcagctcactgcaacctccacctcctgggctaaagtgattctcctgcctcagcctcctgagtagctgggattataggtgcccaccaccacacctggctagtttgtatttttagtacaggcagggtttcactatgttggctaggctggtctcgaactcctgacttcaggtgatccacctgcctcagcctcccaaagtgctaggattacatgcatgagccaccacacctgtcatattcaggtctaattgagactgtttattttgaaaactgttggtgtggaccctggcactggttctctgttggttaatgcatgacgatgcacacttacgctgcccaaaccaacctaactggactgctttaccatctctacactccacatactacttagattttgttctcatttcaggtgatttaaaaacattttctaatgagagttttgaaattgagggtaagctcaaatatcagagtgattcagtcctctgaactatgaccacaagagaaggcttccttccttccttccttccctcccttcctctccctccttcctttctttcttttttttttttttattagaagttttgctcttgttgcccaggctggagtgcaatggcgcgatctcggctcactgtcacctctgcctcctgggttcaagcgattctcctgcctcagcctccccagtagctgggatcacaggtgcccaccaccacgctcggcttatttttgtattttgagtagagacggggtttcaccatgttggccaggctagtttcaaactcttgacctctggtgattcgcccaccttggcctctcaaagtgctgggattacaggcgtgtgccaccgcacgtggctgtgggtgggtgcctttcttacctttgaggtcctagcatgtataattctggacccctgatacatgttttgaatttgagaataagtaaaagggtatctttagtgttcgtttagtcatgatacagggctaataactgctacctgggaaaaacaaagcacaccgcaggaggctttgtagccgggggaaagggggtggtggcagtggaatcacgtccaggcctccagcacatttcagtgctccccactgaatcccccacctcggcacccagcaggaacctgggccagatccctgtttacctgggtggggttagcgtccagaggaggggggcccaacccagcaaccctcttctcaatttgcaacgtagaaacccacgaaagtaattacaaacttgttaaccgctgggcactgtcgccctggagcgctcctaacggactttgcaaggcccagtacacgggggctgccgcgagcggggagcgcgactgggccccaggacaccatctgtgcgagcacggggactctgggccttgacctgcgcggggacacgggccctctctcggccttgacctccgcggggacacgggccctctctcggccttgacctgcgcggggtcacgggccctctctcggcctaggtctgcgcggggacacgggccctctctcggcctcgacctgggcctgcgcggggacgaggaccctcggccggggtctgggcggcacctgcggggggcgcggtcgggcagccccacacaccgcggtgagcagggcccgatgccctcttccctccacctgccgtccccgcacccgccccgggccccgcacctgcctcctcctccgtcctgggccgaggcgggtccgcgaggccgggcggggggtccccgcagcggtgcatcccgggacactgcccctccagcccgggtcgagggatgcccgggtgcgggccgagagagcgcccaacgaccgccggctccctccctgggcgcccttttcaggtactgcgcctggaccacactcgtcctacaccggcctcgcgagacaccatcactcgtgactgggtgagaggggctaagcggctcacctgcgctgcacagctggtacccgggactgctgaggtttgcacctgggccttccgtgattccgaacccagcgccttacacaacctcttcagaaggtgaaaacacgaagggtctacaggctgttgataggaaggggaagcccttctggagtaagtccataagcacccatggattatctcagccagcaagcccaggtctgcagccatttcccattatgaggctgaattaacagacacggaaaaatagaaaatagataagataaggcaatgaaaccatccccagcgagagagaacagggagcattgtttctctgaatatttgattaaaatacaaatctaggaaaaccatttacatgcagtgagctgtgctggcaccactgcacttcagcatgggtgacagagtgagaccctgtctccaaaagacaaaacaaaacatttacagaggagacagtgtagcagagtaggggaaaacaggcatgatagccatacagccctgggtttaaactccactcattcactaactttgggatgtgtgacttcaggctttttagtgctttttttttctattttattttattttatttattattattttttttaagatggcgtctcacactgtcaccaggctggggtgctgtggctcactgcaacctctgcctcctgggttcaagcgattctcccccccagcctcccgaatagctgggactatagccacgcggcaccacgcccagctaatttttgtatttttagtagagacaggatttcaccatgttggccaagatggtctcaatatcttgacctggtgatccacctgccttggcctcacaaagtgctgggattacagaagtgagccactgcgcccaacctctttttttgttgttgttgtttttttggagacagagtctcactctcacccaggctagagtgcagtggcacaatcacagcttaccgcagccttaacttgctgagctcaggtgatcctctcgccccagcctcctgagtaactaacgacaggcgtgaaccactatacccgactaatttttgtatttttttgtagagatggggtttcaccatgttgcccaggctgatctccaactcctgggctcaagcaatctgcccaccttggcctcccaaagtgctaggattacagatgtgagcctccacacccagccttgttagtgctttttaatagccttttgacacactaattccctcatgagtaaaacctgttttggatgtaatgaattgaattgacacggaagaagatcaaatcgggtatgaagaagtaaagaggaccaggcgtggtggctcatgcctataatcccagcactttgggaggccgaggcaggtggatcacctgaggtcaggggttcaagaccagcctgactaacatggtgaaaccccatctctactaaaaatacaaaattagctgggtatggtggtgcatgcctacaatcccagctacctgggaggctgagatttgggaggcagagtttgcagtgagccaagattctgccattgcactccagcctgggtaacaagagcaactccgtctcaaaaaaaaaaaaaatgtgggatgggtttataaaagacatcatattgccattaaccaaaagaatggcaaccaaaagacatactctgatatacaaagtctcagaaaatatatctttcttcttaggaaattgttgggatgcttacataacccagccatttttcctggaaacattaccaaagaaaggaacacaaattaagattttttcattagacacatcatgaaatagagtaaagactaaataataaatataatggtgataacaagatgt

SEQ ID NO: 1241927 - DNA, 4001 bp, Homo sapiens
ggaggctgaggcaggagaatcatttgaaccagggaggccgaggctgccgtaagctgagattgcaccattgcactccagcctgggcgacaagagcaaaactctgtctcaaaaaaaaaaaaaaaaaaaaaaaaaaaaaaaaaaacacatagagggccaccccctaagaaaaacttaaaaccactgatttgtggtcaggtagcaacatcagggtggaaattttaatgcaaacatcatatttggggtacaaaagtaaattaaccaagatccccggagactatcacattactaaaaagggcagtgaaaacacattttcttgataaaatatatgacctaatttagccaatataagcatggttacattttccttagtcctacttctctatcatttttaagaccatgtgacaggtgtctcaggtgtcatctcagatgtgccatgttatacactgtgttctgtctgcagggcttcatcatacttccagaataagtttaatctacaaaaatggacttatgttaacacaaatatcaaccacaaaaccttaaggatgttgttagctttggctttttgaaggaaaattctccacatttatgcaactccattatctacgtgggggagtctccggagggtctccaaaagctgaccaaaccctaaagtattttttctccttttaatctgaaatcattcccgaatatgacaagtcaaattatcacttggttttccctgaataggacaaccctgtattataaccttgaccctgacaaggactgctcggttctaatgcctacactcccacctccttggcagaaagtgccctggcagtattgactgtaaacagagaggtagaaacaaagggatcttcagtaaaggcaccatctactgtctaaagttggaaagcaccaatcaacaggttcttcaggtggagaggtggattagggaagagctatgaggacctgagatgagttctagatcaggactgatcttgagccgtccgaagagtggctggtgggagcaactctcaaagcagaggttttcaaacttgcctgcacattagaatcacctgcggcgtcttaaaaattccattgtccaggctgcaacccaggcaagccgaatccagatctctgggagtgggacacaggcaccagtattttttaaaactctccagatgtggggccaagtttgagaaccaatgcccgcaaaagcattcccagcgagctttgagcaacgttttgagcggcataagcagagtcgggagggcagcggccttagggtgaagaacacacaaagcaaatatacaaagtttcaaaaatcctgtgtaactaactccaacatgacagccaagtacctgtctagaggccaaacagtgatgcaacttggaaaagtcccggggagagctagaatgtgtgctccgagtgaggcgggggctctctcggggatgacctccctgggcggcgcagtggtctggaggatcggggagagaaaggtcacacgcccctttctttccaggggatggtccggccgagcacgccgaggacttgtgtacgacaggataggtcagaaactgcttcgtgtgagtctctcccagctgtcactagagccggagggtccaggcaggggtgcgaaggcagaaagtccctcttcactaaagggaggttctgcagggcctcctccctcccaccccgccccgaagcgggttccccagggatcgcccgcatctgttctgcgcctgccctcggcggggcgcggcgcgggagtccgggtcgcatcttcgagccccaggacacgcgcggcgcgggtcaccgagagtggacgcgcggactgagcacagtgcacctggctgagcccgaacccctgggggtcccgccgccctgggcggcccctagcaccccgaaacccggctgccggcgcacaccccgccccgctccagcccggagctcactcaccgccgccgccgcctcctcccgcgtccagctcccgccgcagccagcagagcccggccggagtgcaagggccgcggcgccgccgggaggccgagcgagcccgcgccccgccccgcagtcgccgcccgccctcctgggaggaggggcaggggctggccgggggcctggacccgccggggctgccggcgggcccaaccctcccttcaatccgcccgcggcccgtcgggacgaacctacccaggaacccccgcaccacccgccctcggctccgctgggcccggggctgcgcttagacctcaccccttcccggagccgttcgtccttccacctcccctccgccgtcaccgggcatttttcttctcccagcctcggcctctccaaattcctggcctgcaggaagccctccctatttcgcgctctcgactgcgccgagctcagtttacccctttcccttcctttccctgcttagcctttttccccctcactgtcagaaacttaagggatagcgctcttctgccaccgcaaacccacacctatttattgagcacctactgtgtctagacactggtggggaggttatcccacttgcgcggtaacaagaaatgtctgtctctgttggagaaacagtaaagtgaggcgcctcgtaaggtcacacagctggcggtagtagggctgggattcgaatacagtttttaggtccttgtttagacccaccccacgataaactgcggcacgcctctcgctagctgtgagaacttgggcaaaatgttatcagttctaaaccccagttcactcatccgtaaaatgaaaagctggatacttcaccagctatgaggattccctgagaaaacaacaacctgtactttttttttttttttttttttttggagatggagtcttgctgttttgcccaggctggagtgcagtagcgcgatctcggctcattgcctctgcctcccgggttcaagcgattctcgtgcctcagcctcccgagtagctgggactacaggtggccaccactacgcgcggctaatttttgtgtttttagtagagacggggtttcaccacgttggtcaggctggtctcgaactcctgaccttaagtaatctacccgcctcggcctcccaaagtgctgggattacagatgtgagccactgcgccctgcccaacctgtacttaatacatgtttgctgacatattgaatgaaatagacccttgaaaacttaacaattcaaaacaatataaaaggacttgaaaaagtaataggttggtgcaaaagtaattgcagttttgctattactttcaatgggaaaagccacagttacttttgctccgacctaataatagtgattcattgccaggaaagaaagaaaaaaaaaaaaagatgctacttatcccaagtgggcagcatggtcaagggagtctttttggaggaagcggtattgcactattccagagttagcaggtctaggttggggaagacagccaaggtgatggggtgtgtgaacagtgcccagagggtggaccagctttcctgagcagaggctgcctggggcaggacacacatgctagaaaatgggatgaggcatactagaaaggtggatggggtcagagggtggaaaaggcatcaaatgccaaagtgagggggctcaaggcaaccaaacagtacttggacacctcaaaatgactagaatggaacctgcatgcaatagagggcacctaaatggccctgggaaccagatgggggagacccatggcctaggaaccagcagagtcatggggtagatggggagttgcagcagggagggacaggaaagaattttccaactgggtgcagtggcttatgcctgtaatcccaacactttgggaggccaaggcagtggatcacctgagcacaggaattcaagaccagcctgggcaacatggcgaaaactgtctctaccaaaaaaaaaagaaaaagaaaaagaaaaaaagcgcatacacacacacacacacacacacacacacacacacacacacacacacacacacaaattagccaggcatggtagcatgtgcctgtagtt

SEQ ID NO: 1241928 - DNA, 4001 bp, Homo sapiens
caggtacttcagggccttgcttacctgctccccttgcacttggtatgccacgccccaagtgcagccctgggaagaaatagggacacccggggtcagtcatgacagctccttgctgctccctctcctatcctaacatgccacccccacccaggactgtgctctataagggaggctgtggtcggctgatgagccatctggtggcagtacctcaagcccttgtactctctttgttaagaacagttgaaaggccaggcgtggtggctcatgcttgtaatcccaacactttgagaggccaaggcaggtggatcacttcaggtcaggtgttcgagaccggcctggccaaaatggtgaaaccccatctctactaaaaatacaaaaattagccaggcatggtggcgtacgcctgtaacccagctactcgggagggtgaggcagtagaatcgtttgaacccaggaggtggaggttgcagtgacttcagcctgggtgacaagggtaagactccgtcttaaaaaaaaaaaaaaaggcatagttgaggccaggtgcagtagctcatgcctgtaatcccagcattttgggaggctgagggtgggcagatcacttgagatcaggagttccagaccagcctggccaatatggtgaaactccgtctctactaaaaatacaaaaattagctgagtgtggtagcgcatgcctgtaatcccagctactcgggaggctgaggtgggagaatcgcttgaatctggaaggcagatgttgcagtgagccaagattgcatcactgcactccagcctgggcaacagagcaagactctgtctcaaaaacaaacaaacaaaacaacaacaacaacaacaaaaaaaaaaaacagttgacaaagtggtctagtaccagggaagacaggattcctcctcaaagtgtggtccaggatgtggtggcatcacctgtaagctagttaggaatgctgtgtctcaggacccattctcatgctactgaactaaaatctgcattctaacaagatcctcatgtgatttggtgagaagcactgagctagaacacgtttctactctgccagagaagcatcagacagagctagcctgcagccaagagcctatgagctctctctgctggtcccccttcacactgggccagggttccccttcatgattcgggcacttacctcatgatcttcaaggagcgtcaccacacggccaggctagggagggaagaaatattttgaaatagacaagttagaaatcagctctgccatcagcaaggaaacctttatcaatcccgctgacccgggcctccaagtgccccactctgcatgctgagtcccattcatgcaggggaaggtgggggagcgatgcacggatgtaggagaaacgtccagaaacactgacatgtcagtggtcccagttggtgatcaacacagggatccacaggttcacagactccagccatcacagtgatgcactgggcacatacatttaaatgagccacaaaccccagacacaggtttacacatttctttctattggcccagagagccccggacattccagggcactggcgcccagtatcccgcccccaaccccctcactcccctgggcacggttggatgctcaccatcttgtcgctgccccgatggaaggtgtctccctgccagaaacggcggctgtagccgcgcacgaagcccacacggctgtcgctgtaggcgaagtcgggcctccacaccagggagccgtacccgaaaatccacagcgcttgagggtcgccgtcgtttcgggggaactgagcggacggcgtaggggactgcgaggtgggcggggtgttcggggctgcagactcctgcttcatggtgcctggcacagggataggcccaggcggcctccggggctggtctccggcgtgggcacggaaagaccgacggacgcacacacctggcctggcaccgctcggtagctccagctgagcgccccccatggaggcgccctttaaaccttcttgccgggagaccacgcccaccgcggccagctgccgcggtgattggggtggggcaaatccccttttggccaatcaacttcggattctgcttctcacttaaccgcgccgcgggcccagcgcgcccgctgattggttcagctccacctctgtggcaaacctggcaggagtgatgcaacggcaggggaggtttctccagcgccggcatgcagcaagggcgcctcggattgcgtcaggcggcgggcagggggcacccgccgggcccagggcgggcaccgggcgggcgtctccccagccgccccctcatgacctgggccccttggaggtacggcgagcgagtcccaggcggtgtcagcccagccttgccgctagtgcatctggccgagtccctgccagcctaggcggcacagactcagtcccaagtcgagtccagggcacgtccagaaggagcgctctgggcgtcgtaaacttccgtctctggggcccctcctgagatcatgcactgcgggaaagctgtcggaggcaccgtccgcattccgctcaagtgcctcacgccgttggccattgtgagcaaatggagaaactgggccacggggctgcagggggttctgcagagactgcggggctgagttaggtaggccaggcgcccggagcttgcaggcctcacatgggctacgccccggaccaggtgtgggacccctcgagcccaggtaggctcggggaagagcctgttagagcgcttggaccgaccggcagtcactttggaggtggtggctgcacctgcggagaaaggctataaagatgcaaaagccaggctagtcttgcccccaaggcgatgggtttaattcttcctggacgtgagattttgcagcaatgattaatccataggcacaaggttccgggagcagcgggcaaggagggcccagtgaggcccccacaagactatggccagctactggtcttctccctcggcttctggcctcccagccgagtccacaggccgccgggggttgacccaatacgcagcaagggactgccctcaggggatgtcactgactgtaaaagggaaacagaggcagctgaaggccttctctctaaactggccaggagatggctggcaggggcaatgtgcaacatggcttctcattcgattctaattcaatatttaaactaaacgtgatcttcacacttcacatattcattccgaaggtgtcgcagatataagtgggaaacttgcacaacagtgtgtatagtacaaagctatttctttaaaaacaaaaagtattcgtgtaataaataatctggaagaatatacctaaacagttagcagaggctggcaccagaggaggactttcagtatcaaacttaaacagtaatgaaaaagtctggatttttacagggagcatgaattacttttccaatcaggaaaaaaaaaaaattaccagcaaatggtcctttctggttattcctttctttttcgctttctctccatttcccacattcagtctccctcttctcttctatcctgtcccctttcgttcatatgagcacctcctttgttggtagcttcttagaagaatgtcctcttttccactcaccagctgtgggttgtagtccgggaagtgggaaactggtatccacatattgctgaagtatctgaattggcacaaacaaccctttgagaaagcagcttggtgatacaagtcaagaatcacaaaatatccctgccctttgacccaatactccttcaggaaattattcaaaatacgggaaaagccatatgcctgaagattttcaatgcattgttactttttttttttttttttttttttttttttttttttgaggtggagtctctctctgttgcccaggctggagtgcagtggcacaatctcggctcactgcaacctccgcctcccaggttcaagcgattctcctgcctgagcctcccgagtagctgggactacaggcacctgccaccacgcctggataatttttgtat

SEQ ID NO: 1241929 - DNA, 4001 bp, Homo sapiens
attaatatacagaggtcatacaacaaaaacatcttagaggctttattacttcatcactaacaaggtactccaaggaatgtgaaacagatcatgatttgcacaaacagtacatttttaagcttcagaagataaagcattccagacgactctgtcgaaatacatcaataaatttaaagcagctacatctaaattgtgaggataaaatacatctaccaacaggaaatcaatgtcttaagcatacaaatgcaaaccttaaaataatttaaatgtaaaatatacaactgcaaatattaatcacagtaacaaacacaaaatagaagtatatattaagagtattccaggatttctgttattacagatttgatttcataaatgcaggaactctaaccatcaagtaaaggttttgataaatcacatcaaaatttcctaaaatgtcaagtgtatcaaaagaaatataaagtcacataaaaatataaactgagaggcatcagtcaaagggtcctttaagtgattttgtttttaaatgtacattttttcattcatataactttctgatatgtctatttactataatttactactacaaggcttctctatggccctcagttacaagtttagatatcctggattcttcaaagaaaaaatttgccttgtatgtaaaatggtgcaatgcagcaatggctaaaccgacaaggtcatttttctgcagtacaaaaacctaaaaactgaaatttactgacagaaaaactgtacattacagtaaaggcccctttgaataaaggtaccttaccttttgactgctgtaagaggccttaagtcacaactcaactttcataaattgctaccaaaaaattagggtgtggcatattagcaatctcaaggtcatgctttaaaaaacgaatccaaattagaaaaacacaataaaacagacagcaatccatgtctgtcaaggtaaacaattgtaagctgaggtttctcccccaaaaaaaaagacaaaaaggaagaaagttgatagctcatacctcgatgcattgctgtgtagcgaactgtcctcctcttggcttttgtccttatttctcatcatcttttaattcttaaatattaagggggagggggaatctgtgtttgctttgaagtcctgtgcccaggtatttactgtcaaaagttgaaagaaaggtaaggtcccggcttctatcgatgctttttattatcaggaacaaagtcctgacgatgttaacgatattgttataacacaacaacggtaagcaccaaaaaactaaatatttctattttttccttaaaagaaaaaacaacaggataaaccgaacagtggaagcatcactatcaataaggaaactttctcaaagtagcacactagatacaaataacaatctctgtatcttattgcgtcatccaagaatttctcgtatttacagaaaacaaggcaaacttaaacaaataaatctttaaaattatcaccaatgatcgtgaacttacctgatccatgtagtatgtccaaaccaagagtcctatctactagtagaaaaatatcagatcccaaataattaaaaataaaggcaaaatcctccgttaaaaaacgaaaaataaataaaataaccctcaaatatgttaactggtcaaaaaaataaagcaataattaatactaaaacaggtccgaaagaaaaaaaacctcattaggagagcgcacaaaaatggaggtgcgccatggcttctaagctggaaaaaacaacgacctgggctctcagtacggctgcttctttccaacaaggcacgaaaagaaagctcctaaaagctgcttttctcccaaaaaaaggttcgaatcgaccccagtaagtccctaggaaaggcagggggctacgggggccccctgaggctgcccgaaagttagggaaagttgcgtaaagtgaggcaaaggcagggagcagagcgcgctctctctaaggcacagccgccatctagagcctccttcccagctctgagagctctgcctttgattgacactctctacatttaccccacaactcaggtgatgtaccatagacccaccccttcatctccaccaaaaaaaaaaaaaggagagagagagagagagacagatcctccatcccagggagcctaaggacccccacccccacacctccctgcccctccagaccaccccaacagggggaggggggagggcttcttaaccccctctggctcaagcaccctttttaagccagagagaaatgtaatttgttccttttgtctaaagatctgctaaatatttcagtccttgagctaaaataacttcctccctggacaggaagtggtgttttatcaagccattttgaaaaagggataattcttagagaatctaaagctcagctaagtactaatctttttaaaaattaatcccccaatgggtgaaatgattgctaaataaaagtaaaaccttaatttcataatataaattcaagtttttccttctttatgatgcctaaaaataatctaaagacaaaatttaagggggaattttccatctccactggaagaaaggggtaacttttacaactcaagagcgcctccctagtgttcaagttgcactggagcaaaagttaatgcaaccaatttttattcaagaatatccatttttctttgttctttcacaaaattctttaacccattatataaccttgaaaatattacactcctccccccaaagaaacttctcataatcacaatatatttacttcccatactgattcaggcaaaaattcaagagtatggtccaaacacgatcacctttaaatcagtaacccaagaaactccacgtccaaatccaacagaaaacacatatcccaacacttcccttatatttcaaatcaagtaagtatacacccatttcaacaatgttattaacaataggacatacgtgattgcaaattatcaaagtaatgtcacaaagcaaattctcctaaatatcaaaaccatgagatccacagaaacaaattactaattccagaaacaatatcctaccaagcactccattcagacaagcatattcacacacccaaaaaaatccaatcaactttccttattcaacataatctgccagaaccatgtctctccctcactgaagaaatccactttagatttacaccaaacaaaatcaacaatgtccaatctaggtaaaatccataatccaaactgtttcaattccatactctacacacaaagataaatttcgtagcaagaacaatatccaaaattccatttttgaatttaacaaagaccaaccacctcacatcagtcaataacaaatggtgctcgtgtattaaccatggatgtgtatgctgcagtatttgacatgaatcacaaacagtatgattaacacaaaacaatttaacctgaactatttattcttctcatgtaaaatgggaaaacagaatcaagaactcattttgtctaccaaaataatgcctaccacctttgtaatagttaccaaaactggtatcagttgattagtaataaatgaaaacctggcatttaaaaatcaaacgtaagtaatctatggcagggtgcaattcatttattctaaatccccaattgtacaaaataaagacgatacaagatattaatcctacttcaaagttatataaaatggattacacacataatttcaaatttaaaaaattgtgaatactccaaggaccctaacccataaatccaacacttcttcctctaatagtaagacaataggagacattaatttaaatattcagatgaatattctatagcaagatgtatttatagtattaaaaagcttaagaaaccatttcaatcaacacaaaataattcagaagtatatgtgtatcactcatcctgaattttcgagcaacaagcagtttgtttcaagttcattaaaatcttgtggcagattaaaatcagattctattattacccattgagttgttttgaaaggtgtttcatgaaagcac

SEQ ID NO: 1241930 - DNA, 4001 bp, Homo sapiens
cacaaatactttaattcggtgtcaccctagacctaaagtagtactaattacaaatgtggccagaagttatggccacaaaacgtaataaaatgcttgttgaatccaaactgcttgcgtctccactccgagggtcagagtaagtcagtggccaaacaagtactgcaaattataaagagctaactactttgggtcattcaaatcgtgaaaaggactgccttggtaggtggagaggttaccatcattaaatgtctttacagagaggcttaagggccatattttaggggaggctgaaagaagcaaaccagtccagaaaggggtggggctagaaaacatcccttccaacttgaaaactccagaaagttgaacttgtcacaaagcagagaacagcacttaaacaggcctgaaaaattctgtagttccccatagcactcctcagtactatctgcatatgggccggagtgagttactggtcatgtcattatcaaagacaagtatgatgaagagacagagctcaggtgctacatccttcattaactcaataagaatcataaaggtttactgaaaagataaaatattgtatgcatcaatacaattgtatcatacattgcattatcaaggactattcaaagttatgatggtattttacagcgcttcagaatcccgagtccttttgctcctttgttcagactaatgaggaagagactggactataaaaaaaaaaatcagttctgcagggcacggtggctcacacctgtaatcccagcactttgggaggccgaggtgggtggatcacttgaggtcaggagttcgaggccagccgggccaacatagtgaaaccccatctctaccaaaaatacaaaaattagccaagcgtggtggcaggcacctgtactcccagctacctgggaggctgaggcaggagaactgcttgaacctgggaggcggaagttgcagtgtgccgagatcacgccactgcactccagcctggttgacagagggagactccgtttcaaaaaaaaaaaaaaaaaaaatcagttcctagtacaaattcacacggagatttttggagcacatccaatttcaatagcgaataaaaaagtacaccagcatagtagaaatcaatacatatatgagattaggacagcaagtatcgtcgtgtaagtaaaaaactggtggtcacagtatccgtgttttttctctagaagttcagattgaaagaagtctcacaatcccagacccctgattgtttaaaggtctccaggcatcgggtcatgtctcccaaagccttactacacggtcttgctttctgggtggttttcccaatttgtgacaagaacttgtttgtaatttcccatagttgtcagaggttttaggtccttacccagaaacggattttctacagaatccatctcgagttcctgaatttgcttctcgggctttacctactgttcaggatgcctcttcatagggaagggtggtgcgaggcaacagaaaggaaaggagttcggggactttgatgggcagggtgcagaaaaggggggcgtcgacgctctacgagtgatcaagagtcccgattttgaagggaaggacagccccacagtagctagagccccgctccaggaagctgcagctggaagaacaggtcttccagctctcggtccccaaacctggaggctgcccaggaccccccaacctcacaggcacccgagctccagaccttagcgacagccgcccttggttgtgaggccagcctgaggcgcccggcgttcccacccccaacccgaactcacagccggtctccttcttgatctcctcgagctcttcgtcccgcagtaacgtggaggcccgagaacccatcgccgtgccgggagctcctccgggagcagcggcgccagaagagacggcgacaggagggaaggagggagggaaggaagggctaggggtcaagaagggagagggcagtgtttccactgcggacccgggagggaacccaggggtggtgcgctggggagggcggccccgaggacccgccaatcaggcgcgaggcagcgcccggctcaggagccaacgtcagcgttcgagttccagccccgaatgaatcagcccagctccagcccaagtcctgctgaagacggaccccgcccccggaaccgcagctgccaccggccttaaaggggcgatgccactcggtcgctaacgacgcaattaaaagggcaacgtcattgaccaacagttttacaacaaactaacctgcgacaggcagcgtagtctaccttttctcacaggaatcgaacactaggaatcctactcgataggtggcacggattgcggagagaaacttcgcgtgggggggaaccctagggtgtacccttcggggactgcacgcgctcttcatctttcctggctgccgtcctcctcccggccgcagggggcgctggggagccggcctcggggccgcgtgctgattggctcctcgggaaacagacgagactggacgttgggccgggcgggcgtcgcctctgcggcgtgtgtccccggcgtcgcggacctttctccaggttttcagcctgtgatttgataaccgccgccgggtggcgtggagcgtcccgagacttcttccttcattgcagcccctcttcttttagttctagactgaagttcgaggaacgcaccacttggctgaaattaggatccagatttcccaaacttccttcggaggaaaaagccctaacgatggaggacagtgaattcctagcttatggtccgccatttatttgaagttccttattttgtcttaaaaatgagaaattttgcattttattctcatggtgtattgtttgttttgattaaaaaggtaggcctggcacggtggctcacgcctgtaatcccagcactttgggaggccgaggtgggcagaacacctgaggtcgtgagttcgagaccagcctgaccaatatggagaaaccccatctctaataaaaatacaaaattatccgggtgtggtgccgcgtgcctgtaatcccagctactcgggaggctgaggcaggagaatcgcttgaacccgggaggcggaggttgcagtgagccgagatcgcggcattgctctccagcctgggtgacagagcaagactccgtctcaaaaaaaaaaaaaaaaaaaggtaaaagccacccgttaaattagtgcctactctcaggtgaaccagttcttactgcttcacctgccttaccccttcacacctgtttggttagaacacgtataagataaggaagaaccgaattctgactgctgttagtacccaagtaccaggatatttttgtcgtagcaggctttcccaggtcaacttaagttactagttttaagtgttacctaaggctttacagcttagcctgaggccccacacgttccctgcaagctgaggttctagtttgaagaactagagttttgtttgtttgttgttgttgttgttgtttgagacggagtttttgctcttctgcccaggctgaagtgcaaaggcgccatctcagctcaccgaaacttccgcctcccgggttcaagcgattctcctgcctcagactccctagtagctggggttacaggcatgcgccaccgtgtccagctaattttgtatttttagtagagacagggcttctccatgttggtcaggctggtctcgaactccgtatctcaggtgatctgcccgcttcagcctcccaaagtgctgtgattacaggcgtgagccaccgcacctggcttgttttgtttttttgcgacagagtccgggctggagtgcaatggcctgatcactgtgcattttcggctcactgcaacctccaggcgggttcaagggattatcatgcctcagcctcctgagtagctgggattacaggcgcgtgccaccacgcccagctaatttttgtatttttagtagagacagggtttcaccatattgtctaggcgggtctcaaactccagaactcaggtgatccacccgcctcggcct

SEQ ID NO: 1241931 - DNA, 4001 bp, Homo sapiens
tgtaacatataatgaaataattgtacaactcactataatatagaatcagggctgggcacggtggctcacgcctgtaatcccagcactttgggaggccaaggtggccagatcatgaggtcaggagatcgagaccatcctggctaacacggtgaaaccccgtctctactaaaaaatacaaaaaattgttggggcatggtggctggcgcctgtagtcccagctactcaggaggctgaggcaggagaatggcgtgaacctgggaggcggagcttgcagtgagcccagattgcaccactgcactccagcctgggtaacagagcgagactccctctcaaaataaataaataaataaataaataaaaaataaaaaaactacaaatgataagcaacatagaatagatatgtaaggaaaggctttaaaaaggaaaataagatcaatataaactaagaaagaattattacagaacaaagagattctagggagaagacaagagtatcaaaatcacttcgtaaagatacttgtgaatatattacatgtataaaacaaaacagaggccgggcgcggtggctgatgcctgtaatcccagcactttgggaggctgaggcgggtggatcatgaggtcaggagatcaagaccatgctggctaacatggtgaaaccgcgtctctactaaaaaatccgtctctactaaaaacacaaaagttagccaggcctggtggcgggcgcctgtaatctcagctactcgggaggctgacgcaggagaatcgctttaaccagtggactgtcaagagaggtaggctgcagtaagccgagatcgcgccactgcactccagcctgggcgacagagtgagtgagactctgtctcaacaaaaagaaaaaaagaaagaaaacttttttttgagagagagagagagaagtctcgctcttctcccccaggtttgagtgcaatggctcgatctcagctcactgtaacctccgcctcccgggttcaaacgattctcctgcctctgcctcccaaatagctgggattaagtcgcctgccaacacgaccggctaatttttctattttttagtagagacgggtttcaccatgttggccaggctggtctccaactcctgacctcaagtgatcagcccggttggcctcccaaaatgctgggattacaggcgtgagccactacgcccggccaaaaaaccgaaaatcttaaaggcctttccccttccccgcctgggctccaacaacgcgggagccgccctgccccgccctgtcgcggtccctagagcaggtgggctgactgagggcgaccatgggtcccaagagggctcccgcagcggcgggctcccacctcgaggcgcagcgacaggggccgagaggggccagcagcccccaagccagccccgcgctaggagttggagagacgcgccctccgccttctcccacccaagcctctgccttgccgggcgggccagttgcaggagaaaggggcggggaaccgcggcctctctggggcagcttcccctttctcctgggactctgggcacccgctttccgccctcgccctgccccgccaggccgccacccggcgactcaccttaatgttgcggtggggcgtgagccgcggctgtggctcctggttctcctggaagatagaggccagtaacttcggtttggccttgaacccggacatggacatcttcccctcacctccggcgggaggggcgcggaaaaggagcctgtcccgagccgctgtcatggccgcgaccaccaggcggggcccccggccgagctctcgcggctccacctctccccgccgccgtgaccctcgtgggagcgcggctggaaaatggcaaggggcaccgaggacttggcgggagctatgtggcggcctgcggggctgctccctttataaccgactccaccgacaggaggcgcggctcccgtcaagccgcagtttaaaagggcaacagcaccactgcccccgctaccgcctgggaaagggctgcccctaccccgccccggtcctcgtcgcccctcacctcttacccctcacccctcacccctcaacccggcgcgccccgcgcgcacccggcgtgcccgcgctaccggctgccccctcctctcttgacccagcacctttctgcccgaccgatctggtcccttcctcacactcgcgactgggcggcacaaccaccaactctgtgtgtgtgtgtgtgtgtgtgtgtgtctatgtgtgtgtgtgtgtgtccctgtcccaagggggcgtggctcacgcctgtaatcccaccactttgggaggctaaggcgggtggatcaggaggtcaggagataagactatcctggctaacacggtaaaaccccgtctctacggaaaaaatacaaaaaattagcagggcgtggtggcggacgcctgtagtcccagctacttgggaggctgagggaggagaatggcgtgaaaccgggaggcagagcttgcagtgagctgagagcgcgccactgcactccagcctgggcgacagaccaagactccatataaaaaaagaaaagaaaaaaaacctcaaaggatcactagtggtcagcaactgtgtgcaaataaataggaaaacctaccaaaaatggataaatttccagacacatctaacctaccaagattgaaccatgatgaaacccaaaacctgaacaaaccaataacaaataatgggatcaaagtggtaataaaaagtctcccagcaaagaaaagcctgggacctgatgattcactgctgaattctagcaaacatttaaagaagaactaataccaaccttacccaaacgattccaaaaatagagaaggagggaatacttgcaaactcattctacagggctagcattaccctgataacaaaatcaaacacacagaccaaaaaagaaaactacaggccaatatcactgatgaatattgatgcaaaaatcctcaataaaatattagctaactgaattccacaacacattaaagttggggtgcagtgtcccaggttcactcaacccttcccgttttcctctctgtgtgtgtctactttgccgtgttccctggtggcggcggcggtggcagtgttggtgcatgggcctcccaggacaaggggaaagtgagtatgcccctttcttgccccctgccaggtgtctgcagcctggcacaagctctggccaggtctccaacaggggacctggagatgtttttttccaatttctggattggtaacttgaggcagattctgggcactagagtcagaactaagaggagactgaatcaggggagtctggggtcctgagaggcagatacctgaaaccgtctagagcgtgtggggagctcggtgcatgttcacgccagttgtttttctctgtgcctcaatgttccaggtacccttggaggtgctgagatcctagggattcctggagcctggctgcatggcctggccaccctgatgccactgtgttctccatgacaggacagcaaggctgaggagaatggctccgacagcttcatgcactccatggacccatagctggagcggcaaatggaaaccacccagaaccttgtggactcctacatggccattgtcaacaagaccgtgtgggacctcatggttggtgtcatgcccaagaccatcatgcacgtcatgatcaacaacgtgcatgcactgcctcataggggcagggggctcctatagcactggggatgcaggtggccatgttggcctgggggagatgctgaccagccctatgggaccaaggtccagggagggaggcacagtccagaccagagctgtctcatagaaatataacgtgggactggggacagtggcccatgtctgtaatcccagcactttgggaggccaaggcaagaggatagcttgagcccaggagttcgagaccagcttgggcaacatagtgagacctgatctctacactaaaattttaaaaatagctgggcttggtggtggcacgtacctatagtcctagctactc

SEQ ID NO: 1241932 - DNA, 4001 bp, Homo sapiens
aaggtagtattcatttgcccagccattgtcattagaaggtgagttatagaaacaaagcccccaaattagtgggatatgagtctctgtttacattacaatgagtaaataaaatccagaacacttaaggaatattgttatctgccccctttaattccatttattggaagcaaattgagcatagtagaaatttcatacttttgtccaagttaattaaaaaatctttaattataatttaaaatattgattaatattcttcatttaaaatatctacatatttttgaatcatgtctgtttacaaactgtaataccataataaggagggaacagatgaaaagaacccttaagggttcagctgtttctcagtgtaggtaaacaacaacaataccacccttaacttttagttatgtctggtatgcataagaagtattttgagatttctaaataaacatttttttctctgaaacaaattgttgtattagataatcactacttgtattaaattgctgctttcctttggtactggaaaatgacaggtaagtttctgtaatgacttcagatgtaaaagacttatgatatttaaggttatttatagactgtcttgaaaagcctgaagggatcatataatttactcccttaactaaaatttgaaaaaaggaaagaattcagtgaaatggaagagaatttctaatttgactacttttagacaagtattgaatacttacttctgataactttatgtatattaccacaagatctccgtagttaggtgtgatatgctcttgtttccctgtctcctctcttctaagataatataaatattatttgttgtaggacttctttatgataaggtgctttggacctaagttttccaatgaaactcatgaaaaccaatgtggttgggatttctgctaaatgataacgttttgttgtttttacataagattgtcactctagaagtctcattatgcagtgatttctagggaatttcttaaaggcactgtatcttttaaaatcctttgatggcttcactagtgctttgcattttacagtttggaccactgacctgagtcaaagcttttgaggttttaaggtaccagacatctttcatctttttatcctcttgttgaatcagaaaaatgtcttcatttagtctgttataaaaatgtctagtatctttaggataaattagccctatcctacaagagtgttatacctcgatttagtagagattatttttctttagtatgaatgaaatgacatcacagcttttttttcttagtaacaatagaaatcagtcattgagcttttgttcctttatatgaataaaaatatttaaaatgcttattaatttttctttgttttatcaagtactctgggaaactaagttcatttgaatattgttggtaaacattatctgtgaatggctcttatgcaccattcagggctctcttcatgcatttttttcaagctattaaataaaacaaaattgggataaaaataaagacaaagatgagacaaattcaatgaaaaatgaatgggagttttggatgctttattatctagttctgagtgacttgtttatgcagcataagtaaaaacaagcgtttacctcagcttaaatctgcaaaagcttaaggaagggttgcaagaaattcaaatccactatctcattcacagcacgagcagatttaatttcagtagacaagatataaattaaggttataaaattaaatcttacctggcagtggtttgtttgaagctcagtaatttgaactctggctggaaatagtaagcttcgagacccaaaatgccttctctactttcctttcatgttttattttgccagtgttttatttcttgcagtgtctttatatctgtattcctgataatcctgtagcattagttaggatagtatgcggtagatgaagactccatttggataggattatagaaccagaagggtgagttttgcctttatctggtaacagcagttgatctgatcacaaacaatctgagtgttgagaacttattaaagattcattgaatgcttcagcaatgagaaatcctggttgttcctatatgcatttgaccccctggaaaagttctgcttgttcgtatttcagaattacacacgcttccaaatcaagctgctttaaaaaacattatctggactagaagcatggatgttcttgcactcttgctttcctttctccatacgaacttttcagtccatcagcttcctttctgtagaagatgaaggcatttcttctgtcctcctcatgcttttgtaacccatgcttctggtaccctgttttttgaatagtgaggtaaaaatccagaaggaagtacggctttatcatgtctctggacggtgagcgtacttggcatgaatgaagagctgataggagctattcaaaccagacagcaaactgatgggatgacgctgccatacataaaaaactcattaattacttcccctgctggacagcagtatatcctgaaaggaagaaagaaaggagcagatgatgatattcgttttgataggtgttctctgtttgaacagcttgtcattgagaagagaatccaggaaaagctgcagcttcagagtgtgatcaggtagaatgggcaagagttatttgacagacagttaagtgacgtattttgggaggaaaaagagggcttagcatggaggtagctggaataaggttccaaaatgcttttgaaaatgttcattttttcctgttagtctttttggctagaagcttttttttttttttttttttttttttaagctttgctaggcattattcacagacatgttgctgagttattttctcatatggttttccctaaagatggaaaataatttttaaaagtctttgagatagaaagagtatactgtgagttttaaatatttgtagcagagaaaaggctgccttttttttttttcctaaatgtatgcctgtttttatacatcttttgggcatatgcgttttgttgctttggagtaaagcattataagtcctcatttgatacaaacttttaacagggtcttcattaaagcttttccttaagttagatgaaatccatattagctgtataaaagaatagatttttaaatgtcaatttcataatttttgcacttcagtttttaaatttaaaattcaaatttttaaaactgcacttcagtttaaaatttaaattttaaatttaaacgttttttccctgcctgagttctttatgagtgtatctagacaatataatgtttttaaattttaaaaaattattatggaacatttcaaacttacacaaaactctgaaaaataatacaaaaataatacatgaacctccagaaactcattaccaagattcaacaattgtcagattcaattctttgctaaaatattttaaagcaaatctcatttcacctatttgtactttagtatgtatatttttaaagtatggacactttttcacatgaccctgtgccattatcacacctaacacattggctataatcctctggagtcatataatatccagttcattttaaattccttgtgtctcagaaactatgtctttatgtaggttttttctgagtgagaatccagacaaagtatacactttaattgttagccaatagaattttaaacactgacagatgaacatgtatgagaaagaagtgaattttagttttatagtggtctttgacacacatttgtaataggaatatttatgcaagagaacatatctttagaatattttcttgaacttttcccacttaacattgcatgatactgaaaaggattgtaatttcatatggtaatgattggtcattatatactggtcacttctataataaataccccaagttttaagccactgattattaagccatttcaatgattgaatgtgacttagagttcagtggagatccaaaatgagagaagtaaaaatctatcaaatggggccattgtgtttatgaggatcgatgactataa

SEQ ID NO: 1241933 - DNA, 4001 bp, Homo sapiens
ttgttgtgaaggaagtgcacagcttggtgctgcggtaagaggtcaagaactattcgcaatcttttcctgggttgtttctgccgggtgggggtgtggggcaaatgctgtctgcctgggtacagccactcactgcttccacgatggaaagatggccagtccgctcccaggggcagggccaaccacggtcgcccaggcccaggtcttctacctcccagcctccgggagaacacagcccaggtctgggcctctcctgcattccaccctgtaggggtggccaccagccctcttagaagccaaggcactgtgtgactcccgtgatctcgtgtgacccccagctcttgctgatgctgtcttcatatcctgatgaaagactctgacctctgcaacccttgggcacccctctttgttcctaagccacaccccagcacaagtgaggcataccgggtcagctgtcttctgattcccacgtacagatctgggggcagcttggggaagcgggaggagaatcctctaggaagttgaatccaacttcctcaggtcttgaaataggatttttcctgctccccactctccttccccaggatgaaagaagggtcccaggcaggaggtcggttgagagcgtatggcgttctgagtagtgcaggcctcggcaccgagggcggaaagcgctctgagctcacagccgcacgacagaccgccggcctgggccctccaggaattccctgcagccttgcccggtccccgactctcgctacccaccagccctcccaggcacccaagagcctcccagcggcgggccagggccggcttcccccagcaggctcctctggagagcgggaggaagacaggaggcgctctcccggtggagggtccctcagcgacgcagccaggagcgctaggaggctacaaccggaggagaggctggcgctccagctccagccccagtcccgaagcgactcccctcttcccgaggtggccttggccaagtcttcagccatctccgtcaaatgaggaggtgggcgggatgcagacggtggagcgggaggcttgggcgcgccagtttgggagccagtgcgcggggcagggcgacgggcagcgcggggacgcgaatccccaactcctgcgcccaagacgaaggacccggtctcgacctccccatcacccggcgcgtaccagcgcccgctcagtgactcccaggtttggtggtggctaggggtgggaggtgagccgaaagggaaaaagccaccccacccaagtcgccgccgggctggagccagtctgcgcgggttccgagtccccggcgacggcgccagccctctccgctcgcccgcgcggtgttctcgccggcagcccctccggaccccgcgccccttctcgggcgcccgtccctccggagccctaacgcctgtgcgcgtacctggcagcagagacagcagcagcagcagcagcagccgcggcggcgacagcgccaggggcagcgagagcgggccagagcccatggctggtggccgggctggccgcggacccggacggtcgggagcgggcgcggcggtcgcagagacggcctctccccgcgcggctccagcgcagaccccagacctggagccgtgcgggcggagacgcgcggggctcctctccgcttcgccgccgctgggtttccagcgccctcggacccgcgggaggacaggaaccatccggagtgaagctgcgccaggcgcgggcgggcgggcgggcgtgcgcggggcggggcgtacgtgcggtaggggaaggggctccaggtcccagtccccagcgccgggcgagctccttctccgccgggctgggtgctccggccggcggcgtccgaccagatctgagcaggtgctgtcaccaccaccaggaaggagagggactcagtttctgtcccaggtttccggggcgtgtgcagctcccgcagggggttgggaccaccgggctaggcgggcgccgtaggagagacgctaacacaccctgggaaggacgccttgtgtatctcatgctattaaataattgttaaatattttagccgggagcagtggctcacgcctgtaatcccagccagcactttgggaggccaaggcgggcggatcacgaggtcagagaccatcctggctaacatggtgaaacctcgtctctactaaaaatactctacaaattagcccggcgtggtggcaggcacctgtagtcccagctactcgggaggctgaggcaggagaatggcgtgaacccgggaggcagagcctgcagtgagccgagattgcgccactgcactccagcctgggtgacagagtgagacttcatctcaaaacaaaacaaaacaaaacaaaaaaacttagatatagtactggtattttttttttaagtccttatagcttaggggtgggtggaagttagttgaaacaatattggctatgagttgataattgtcgaggcaggatgatggtacctggaggtttgttatactgttctcttaactttggaatacgtttggattgttccttaatgaaaaattttttggggtgatcagacccaaccccaggccatgggggtgacaaagtcaggcggagtcaaaagaatgagaaaagacaagagagaaagcgggaccaggcggccaacgtatggaggctacgaaggcccccagctgtgggagcccacgctatttattggtgatcaaagaaacaggtggtgaggatgtgggggttgaaaggaagcggtgtatcaagcaaatgaactacagctgtgacggtagttcacctcccatcccaaagtgctgggattacaggcgtgagccactgtgtgcagcctcatctgctcttctgatggagcaatctgagagggcaatggggttcccaccctagtcccctgcagaacctgtccccttccccgccaccatctgcaaccccaagaatgtgcactgattggccaggcagggtgccctggagcctcctgccctctctgaccacccaccagggatggggggcaccttgatgttggcttctttgacatccttttattgcaggaggaagttctgtcataaactctcctcctggcattcagcaaatggagagtcacctttatcatttccagaatgtgctgtttacccatattaaaaccaaacaaaaggagacagtttgtggaatggaaaatgtaagaattgggacccacctctcaggcctccaattacagcattctcaactcttggcaaatgtcccccattgggacaatactgtaagttatatatccaacaaaggacttgtatccagaatgtataaggaactctcaaaactcaacactaagtgtagatgcatatgaggggtcttactggggtgatgcagatgttctaaaactggattctggtggtaagcttacgacaactctttgaattgtacttcaaatgggtggattttatggtatgtaaattatacctcaataaagttgttttctaaagaaagtctcaatggtaagaaaacgaacaattttttaaatgagcaaaagagttaaacagactcttcaccaaagaggtatacagaagacaaaaaaaaaaaaaaaagcacgtggaagatgttcaaatcactagccatcagggacacgcaaattaaaaccagggtggaatccagttgctgaacaactggatctctcatactttggtgggattgcaaaatggtatagccactccagaaaacagtttgacagtttctttctctttcttttgttcttttttttttttgacagagtctcgctctgtcacccaggctggagtgcagtggcacgatctcggctcactgcaacctctgcctcccaggttcaagcaattctcctgcctcaacctcccgagtagctgggattacaggtacacactaccacacctggctaatttttgtatttttagtagagacagggttttaccatattggccaagctggtcttgaactcctgaccttaggtgatctgccgccttggcctcccaaagtgttggggttaca

SEQ ID NO: 1241934 - DNA, 4001 bp, Homo sapiens
atttcactttgttataacactgaacaccatgcatgaagggagatagctatttacactatttaatgcttggctacagtgttctatattaaaagacatgaaacagatttttaaagttcagtttcatcaaaaggggtagagaactaccattttctcgagtgtcaggcactgtgcctggcattttatatgcattatttaatcctcaaaagaactctgagaggtaagcatgattattacccccatttcttttcttttctttttttttttttttgagacggagtctcgctgtgttgcccaggctggagtgcagtggcgcgatctcggctcactgtaacctccgcctctcgggttcacgtcattctcctgcctcagcctcccgagtagctgggactacaggcgcgcaccaccacgcccggctaatttttttgtatttttagtagagacggggtttcactgtgttagccaggatggtctcgatctcctgacctcgtgatctgcccgcctcggcctcccaaagtgctgggattacaggcgtgagccaccgcgcccggcccgccatttcttaaagaaggaaaacagctgagagaagttcgtccagtcaggatgcaccagagccataatttgaatacaggtttgcctggctccaaaatcacattcctttctttctgtttaactctctctgcccaggattttcttcatttgtttaaatcaccctccatcttatttctcttcggtctacactaagcaatacatcctgcaatgaattattctagtcttattacttcctaaaatcaggagccatagattaaaaaccttaacaaaggaaaggcaagaaaaggttcttgcaatatttccactatttaagaaactcactcataaaacctgaaatacagacgtagtgaacttctgtaatcatatcttgcttaacggatgcttagcttttctacgtttagatcacaccatagctgctccacaaacgtgtttttcttcaaggtattgagagaactgactctaaaactttcccaagcacttgaaacatgtaggactacgcgatttcttttgttgtttccattcctgtccaaaacctcttgaaaaacagcaggctgaaaaaagctgtgctctaaggagctagtgaggaactctggatgcaaacgattagccccgaagccagggaagttggccgcctagcctgctacaacacacacctttcatctccggcgaaaggaaaggttttcaaatgctgcggtgggtaggggacagggatggaggaagaggcggcgggcaggaggtggaagataagtcccaacccctagaatgaaccccagagtctctatatcccgtaaatgggcaacaaaatgggaagcttggctgccaccaggacaggaaagccctgctggacaagagtggcatcttttactgaaaaagttgtgtggaagtatacgctaagccagcctcgtagtctccagcgatgcaggtcgtggaacaacaaagaaaacccacccaagtagccctttctctgcatttaaatgagcaaatctggacatttaaactgaaacctcactccaagcccccaggagaaaaaaacccacctcccctcgcaaccaggttttccggcggccgtcgcctggcggcttcctgggcaccgcgatgtggagtccgggccagctcccgccccgcccctctgcagcccgggcttacctctctgcgcgccgcccgccgcgcccgctagaccgcagcgccccgcgaccagctggaccaagagcagcaggcggagcgcgcggggccctgacccccgcgccgccatcgccccgcgcccgcgcgggaccgcgggcagccgcctctcgaccgccgcgcggggaacgcgaactcttggggaatggagcactgagtgtgagtcgtgagacaaaacgagggcagacgcagcagaggggccgctccgcgccacagctcccgccgggacagcagcctcagcctagcagcttctggcgggctcgggacgcatgtggaagctcccggcgcctagccccgcccctatttccctctggccccgcccaatcctcgccttgttccttttggcccagtccggtctattcatagccccgcctccgatccccaccaaccctttccccaccccgccccgcctctggtccaaccctgtctgctcctagctcctctttttccacgcctggcccagccccatcgccctggcccccgcctccaggccttcctttgggcaggtgcgaccctggagcagagttccaggaaggcaaagacttgaggctggcatcgcaggcgcgtccttctctaaccaccggatgtccttggcctagtcactgcacaccttaagataacagctattcattgatgtctgctctgtgctcagcaccaaaaggggaagcagagggacagattgctcccagctgatagaaaatgtaaataaagtaattccgagttgtgatcagaaagaaacaagctggaggctggggcagaatcacagtggtgggggacttgctccaggctgcagcgctctccatgggccccgctgcccactcaagtctttctcaccaggaagtaccagtcgcagcttgactgcctcctggggctgtcgtgtcagccaaggggtccccaccaggagacctgtgttgtggaccagcgagacaaccctgggcaagtcactttcctctctgggcctgtttcctcgtctggaagcgaggaaccgaggcagataaactagaggactcgggaaggtacagctctgacactcactcaagccatccccggaaatgatatgcagtcgcctcaaacgtgggcatcgccctccgtgttgtcatcaattaacatttgtaaatattagtgactatctgctacagacacttagcacctctggtggagattggtgccgactgctggaaacccgtctcaaatccctccagaccctatatttcatcctctctgtccataattagaaagcttcatttggctgaagggattcaggcgaattatctttaaacttcagtggcagagggagccgctgactcttcacagaacgctttatggaggtgacacctctaagactcattgtgagcaaaaatttcactccaccctccagactagtaaatctgtgaaaaactaaacctggttgcaaagaatctaaacagcaaaattcagtgaagatgctcttcttaggtccaaatacagctggaaaaatgtaaattacatccaatggagccaatctgtttaaacaggacttaaacaaaggggccacagaaaagggatgcacaagatgttaaccagattagtaattaattgcacttctgcacagaaatgaaagacagtacctatcatcctttcactgcaaatttacattttactctgaagaatttatgggacttacaggcacttatgcaattcatcctaacagtgtttggatgactttaaaatgttattctgcttttacagctaactgatttgaaacagaggagttgaataactgctgaaggtcacagtacctgtcagtggcaaaactagaatgaaatggttgtcagtgcagccactgcaagtataattggaactcctagatgttatatcaataatcatgagaatgatggttatttacataatctatgaaaaacactattaattgttgctattaagtgaaaggcaaagcgtgacatttgttgggcattttaaaatccaaacaaataatcagaatataatgtctacatcttacatggtttttccagggggatacgccaattactcatggttgctggatatggtgctacacctgactctgataacaggcatcttcacactgctaggagacattagctgaccaaatgacaatgaaaattgctgctgttgctgcagccaccacctacaaagttcccctaaagtggcatctatctaccaactttctgagacttagccaaagggactattacacagttcttgcatcccagacaccaccttttcctctgaagattgtggaatttttattacac

SEQ ID NO: 1241935 - DNA, 4001 bp, Homo sapiens
ttctttagttgatcacaatgactgacagtgtgcattttattagccggaaagccaaggctcaagatgcttaagaaacttacctaacagcagccatccagaaaccaacacagacagaacccaccgaagatcccaagtacaaatcctgagctctttaaagcaactgaggaactgctccataaacagcaacttttgctgctctgcaacacatgagactgaacctgccttcccctacagctcttctcatgataacttttccacatcatcacatatacattcaatattttaaagcatgattctgtctgtaggaggaagaacacatttgaggcgagtgtagcgttggaaaggaggcaatgtatgatggcaattttaactaggttaagtgatataccattcatcaacatgatagtgcgggtaactgtttatttgtaggattatgaaatatcacctcttacctttttccactttgccaggtagctcttagcactatttcttttttaaccagtaattgtggctattctctcacctctttcccatcatgctctccctcccaatgaacattattatccctgtgccccaccctgccacactccagggtgctccacaatagaatccgatactccgtatagacaagacaccaaacccacttataatgaattaaacacttgtgtgaagtatttgtattgtatggagaatataccatgaatattgaatatccaaagcagcatagaggaacaataggcaagtttacacagattggctaactgaagtgggcactagcaaggctgcaaggcaagagacccacggaactgatggcagctgcctggagggacagacacatgtattcctgacggggaaccctgagtcctcggagcaggactcccagtacctgtcctcaccaggaaggcaaagcatgcccattcctaagatggggtcacagtgaaagttcacagctggccctcttgccctctgcctggatagattcgccagctgcaaagctcagggccaggcccccaccaaagaagttacataccataggcggcagaaaagtctagaagtggctaaattgacaatgctggaatgcaagtcaacacttacaccataagggagattaaaaagtgaacttcacctgttcttgctactgagtcccagctcaggatgcttgagtttctaacctgagagaaaggtgggacccaagtaaccatgcacaggtggccagggtgatggaataagctttaccaggtccctccttggctggaggggaaaccgagaaatgagacactcaggagagggcaggctggggacagactcagagcatggccctgcctagcttggggccaactagagtgccccagccgagctccaccgcctggccgcccgacgctgtctaaaaagcccctcggagcccaggaaggggagagggcagccctgtagccaggcgggactcaccacgtccatgatctgcaggaggctcagggagaagtagacggtgagtggttgcgagtcattggccacgggcctctccaagggattgtagttcttgaccagctccttgtaaagcttcctctggaactcgccttgcagggacacttaaggagagaagacccgggcagggggctcagggcaggccggcgggggtacccccgactccctcctgccggcgtcccccgccgcccacccggtgcagcccagacaagcagcccccgcagcgcccccgctgcccctccccggcggcggggagatcccaaacctggcccaggcgcggggcgcacagaggcgcccgggatgtgcccgggatcccacggaggagtggagggcggggaggcagtggctttaccgtgcaggagcgacgcggccagcgccagccagacgcctcccggcgagcagcgcatgttgagtcccggagctgcagcgagccggcgcgctccacgtctcggctgtcgcccgggcctgcgcctgcggccacagaggcacctcgccgctcggctcgcgcgcctttaaggagccgggcgcgcgcccccgccccgcccgcccccgcgcgcctctccacgtgacgagccccgcccccgcccccgtccccgcccccccatccctccagcccgggccagcgtctcggcggccacccagggaactgcagcccgaggtgtgagcgggaggtactcccggcgctgggtacgctccgggcacctccacccccagtctccaccgagcgggctctcggcctcgcgcctctggccaggccaggggctgcccaaggccaggctctacctctcccttgcgttctttgtccccactcagcccgctcccgctctcagccagaagctgcgctgggcactcgggagaaagccgggacaattctggggtccagtcttcccggactccctcctccacgccagcgaccgggtggcagctatagggaaccaggcttcggaagtcttgccaaccagacaaaacagacccgaggaagcccccctcctcccgctttccgcgagccccggtttgctttccgcaccgtttgctgggcgccagcagccagactctcggctgggatctgaagtgctggaggcaccctgtcggggaggagagatgccgccaatgtgtgtgatgggattcccagtggttaccctaatgtatggctcattcttttttaaaggagattaaaaaagattgaaaagttaactcctaactctttgctggaaggacagccagaacttggtgttcttatctaggctcttttgagccagcgcattggaaagagtaaatgaggagaggctctgagaggtccagggagtgcggagagttcttgatgttgaagagggggcttgattttggaaagaggaagggagggaggaaggcgccaaggggcggcttccagggtggctgaagctccatcccatttgctcccttctgctgagcacagcagcgccctgcgtccgcgtagggggcgctgccaccttctttcctgcagcccccgggcatccgagctccaccagagcaactcccgtggaccacgcagcggcaatgcctgggtttctgaactgccgaaaaccacgggattcttttaagactccaagaactagggaaaggctcaccaaaaggtgactgagcttgactgtaccccagtagcaggaatgggggactgagcccaactatttgatttggaagaataacgcagtatattgcccttgccatgaagtgtcttaaatgtattactgttaatgtacacatgtttaaacaaagggtcagcataggctttcataactgcggtaagagcctagaagaaggattagctgtttttggagagtggttaatagaagaggtgacagctgaactggattcacctcaaaggatagcagtcattctgccaggagaaagggacgccaggggtccctggagagcagacaggcgtgcccttagcttcatctggctcttgagtccccctaccacttctagcagtccggacatcacagagcaggcacttgatgaattaattatctacaggggattagttgttggtaaagggagaattagaagaagggaaataaaacccagtagcagaatagagaaagcccatgaagcatcagtgaaaagattctcagtggcacatcccctgcactggtcatgggactgtaacaacactcttctacgagcgctgaaagtacctaagagccctgtcttcccttctagaagagcatgagcccatggggccaagggaatttattgattttttctggagtatggctatcaggatcacattcctgaaaccagaactgcttctttaccgccattgcaccccataatatcagaaacctagaaataaaccattttcaggtgagacaagcaattcgtaaatatttatttgtcctctgttctcgctaggcacctggaggacctgcaagcgcagtccactcactcagcttacaatgtaggactgctggaagttggaaaataaacttcagtctcccctgtgccataggtaggtctgtgagtttggctgtattgac

SEQ ID NO: 1241936 - DNA, 4001 bp, Homo sapiens
gtatgtccttaactgaggaagggaacatgatatttatattaaaaggcagctatgattttcttttttctgagacggagtcttgatctgtcgcccaggctggagtgcagtggcatgatctcagctcactgctgcaacctccacctcccgggttcatgccattctcctacctcagcctcccgagtagctgggactacaggcgcctgctaccacgcccggttaattttttgtatttttagtagagacggggtttcaccacatcagccaggatggtctcgatctcctgacctcgtgatccgcccgcctctgcctcccaaagtgctgggattacaagtgtgagccaccgcgcctggcctatgatttttctttatgtagagaatttatcttttataaagagcttattacatactattagtgcttcttcaatcatgtgtattaatcacctggattcctaggctttattcccagagattctgatcctgtaagcctagggtgggacccagaaatctgtacagggtgatacaggctgccccaggaccacacctaagaaacactgccactggcccccacacacatccaagtctccaaatatgtaggcagggcacattctctccatagaacagatggggaacctgaggtccaggatggtgaaagaaatggcacagggtcacccagctagtagaagagccacgatacacagactgcctgcagacaccatctttgatgagagctccacctctttataggagtagtacaaactactttctgtagtttgtattccaaaatgatgggtatatctttccattttttcaatgtaaatttttagattggatatgctttcccaaactggacacacactcacagtttagaattccagctatggcttcctctcagattattagctccttatatattccctgactcctacctcctgcctcccctatggtgggtctctatccaaggaagaggtagccctggtcctctaggctgactggggcttggaggaaaagcctgggtgactgtaggagctagaagggcccttggaattcaggtggggaaactgaggccctgagaaggcagtcctcacatttgcattctacctggagaagggctgggtctccttcctgagtggcaggcccaacttcaccagcctggccctcagtcaagctggctgtccaggcccggcacacctcgggtgggtgaccagaggcagcggtgccataaaatgtgtttgctgggagatccacccccaaagcacaaaacattccagggctgctgatttgggcaagcccccttccttctcggcccagtgtccccatctctaccaccgctgtgtgggaggggacttctctctaaggctgagcagcagattcgctcccaagcgcctacaccgcccaggtggccggctcctctgcacccacgcttcaagaaagtcacctcttaggcaaggaaggagcctcggccctgttgggagcgggagtcggtatactcccagcctcccagactgctggggatgacccgcggtgcctgcaaagccggtgtcatccagcccactgcccagcccacagacactcgccctggagggtggccctggccctggcagcggctccgagaagaggcggcccccactccaaacctggcagacccacccacgcaggcccgcccccgctgcctcagcgagtgggctcagccctgcccacgcccccatctggccgggacaatctcgggccactcccccgggcgcagggcaccctcccttccctcccacctgtggccagtccagcccctttcagcccaacccaggcgcccctccctccttccccgaaaagaactcaccgcgcccgcaaagggcgaccaggaagaaaaggaccagggaaggcgcgcgcctcatggccggcggggccgggtggcagccgccgcgagctccgctgtggggtcacagggcacccgtgagccgcgcggtcgagtgagcgccggtcctggcccccgaggtttgctggcggggcggcgctcactaggaccccgcggagagccccgccgagccccgcccactcagggatgtactgggcccgctgctccgccccgacgccccctgggtggtctggaccccacctgccgcctggcttccctatctcttcgggcctcgcaaccttcccccaaggaaggcaggcaggacagtgcgggcacccttggtacagctggggagactgagccctcgagggcggcggacgctagcgcaggatccctctactgttggggaaagagcatgtgcttgagcggggaggtccttgggctttgccttccctcacctcgaagacgcttttaggcaaatgagtcatctcaggttcattcgcatggggtttgctgaaagaaaggacactgctgggtgagccgacgcgagggagcgctgctctctgcagactttgcagggaggacacttaggaaaagtgagtggaatctgggagggtgaatagctcagggcccctcacccagcttgggggctggggaaggagcagagttaaaagggaatggggctggagtgggctggcctcgtcctcccccatgggccttccaatctgggctgaacagaggccgctcaggtgattcaagcacatccctctactagccagggtgtccttgacgcgtttttggaatcagtaccattcccttgcgggtggggggacagcccccacctcgggaactgcagcctcaattctggatctagaagggcctctggcagcttctccaactctctcagtccggtcctcatacctgctcccttgtgtgggccctaacaggcaaatctgacaactggaggaacaagacaggaagggcggggtctaagggaaccgcctgtaaaaaggcagctttgccaccttatctccaggactctcagtcttgctttcatattgctccccccacgtcattttgctataatctgacatgttgacatatggtctttaaaagcaacaacaacaacactgttgaagtgaagcggacttcccctttgggatgctttggagaagttaggattgagggcatcctctcttctccaaactgcagcagtaataggtaagatatgtaaagtaaataaagacatggcaaggctggaaaataggataatcatctccatgaaccaaaaccagaaaagaaatgcaaagtggttggaggctgaagagcctggagcctgttgggctttggaaaccaaagacagtggcaggtcctttgggataagcggggaccaaaagactcttggctagaagctgggagcttgggtgtatgccagtacttgaaaggatgctgggagcgggaggcctgctgctgatccgtggtctgtatccctggctttatcggatgtgtacatccccaatatacccaggacaggagcttggaaaggacataaaacctggaggccactgcagagctgtaaaagttaggctagcaaaggggatacgatgaaataggtttttatagagctttgacatgtattttctttaaataaaaagaagagctaattatctattgagaataatataatcttggtacaaaactagaacaaggatgtacaaggaaaacacattatagaacaatctgaattatgggtctttgtcacagagagacagcacagagcagtggccagtgcattgcttctggagccaggcatccggatttgtattctggtgccactaatcttctctgtgaccttaggcaaaatgatttgccttcagtgtgccttaacttcctcatatataaagggggaaaataaccttcacaataagccttttaggataaaatgaaataattcatgtaaagtaacttaacaatacccagaacctagaaaaccaaataaatgttagctattaacttttatgaacatggattccaaaattttaaataataccaagttgaatacagcaatgtacacacacacaaacaatgcatcatgatgaattaggtttcattacaataacgtaagggcagagtcaacatcagataattcacta

SEQ ID NO: 1241937 - DNA, 4001 bp, Homo sapiens
gaggctgggcacagagggtctttgggtgcctgcagagctgggtcctggagctaccaggcaagaaccctgcttccgttttcctttccttggaaaaatgtaaagaactggcaggtgtaggaaattttgagactggagcagaaaggcacaaaagtcatttataaggtatgattgctcactctagtcctgaggcacatggggtggataaatgggggatcagagccacagggtccctggctctggtcatgcttgcccctggctggtaccatctctgagtttggccacaggttaaattaaggtagaccaagtggactgcataatcctggcagcccggggtctggagccagtctttagatcagatgtgttgcttcattggcaaactggtgtctgccccccaagagatccccccaatgaggagcagcaggtctcctgcctagccctgtcctctgagtcactgtgggtgcccaccctggacaaggaacttctgagggcagtctctgccatccaggatcctgagaagccccaagccccagagccagagtttctccgaatgacaggcagaagcacagaaagctggcgttgaaaccagtccccaccagctgctggccccacacccatggtcactgctgacacgcctccttggtgacattaggcagtgggtaggcaaagagggagaagtccaggatatacttaggcagcacatcctgcagcagggcccggggggcactgcacaagtggtaatgcaggctttcggggctggctggccggtaccaggcctggcgagctggaaatcggacgtgaggtggtgcccgtacccactccagcacctgatttgcatcagcctccagcctctcataggagcccacaaagtcatagtgcacggcacaaggctggcacaggtggtacacgggcatccaatgctcattcatgcgctcagggtcctcatccaccaggtatctcaggaactcggggaatgtgacatcgtcgcctgcagggctgggccccgctccagccctgtaccgcctcactatctcagccccatagcgttgctggtactctcggatctcgccaaacttgttgcggtaggcagagaggaggcgttccaagggctcccgcacaaacaggaacttaaagtagtgctgcaggcggtagcgaatctcctcaggccgcaggtcggccaggaacaccaggtcactgcggtggtccatcttgaggcggacgtccacgctgtccaggacgcctgccagcaccttcatcacccgcttccagttagagcaggccaccttggggacgtagcagtagaggaagcggtaacggtcacttacgaggatgtggcgcagcagggtgcgccgctgccccaccggcaagtcccaggggtcccggggcatgcctggctgtccgcacaccgcccgcagggtcctgttccggacgtcctgccgcacttgcaagtccgcgtccccagccctgagggacaggcccccaggcttgggggctttcccgcgccaggctgtgccctcgcggccgggcgggtgcaggggcaggggcttcatctcggccaggatgccccgctcgatcatgagcagcagcccgctggaggccacgatcaccgcaaacatcagcatggacggcagcagcaggggcggcccacccagccccgcccgggccctgcccagaggggcccgcctcagcgcccggcccaggggctcggcgccatttggggccgccagcggggtcagcgggcgggggaacatggtgctcaaggggtgggggcctgcgcgggcccggccgatccgagggcggcctggaaggcgggctcgggctgggggcgggaggagggtctgggaccgggggtagttggggaggggagggcaggggacagccctggcgcgtgtaggggtggccggctcccgggctgcggcgccgaagcgggcggcgggcggcgggcgcggcgagggacccgggccggatgtcccgcccggccgctctccacccccggcctcgcagtgacacaggcgcgggggcgggcccacgccgggggcggggagaggggcgggcgcccctgcggggcgcgggcttgggagggcgcacgcggacccctacccggaagagggcgcctgagtcagggccacccctgtcctctgggcttggggacaaaagctcctgagacctcgaaggcagaaaagactcgaggctgctctcctgcagcgtgtgtcctcagggaagtggacaagggggattcgccacaaactcaggcctgtcctagcccttcctccagcaacgggtctggaggcagggaggcgggcagcgctctctccgagtccagacgtgccggaggctggtctttccagctggaagcggagccctcggtgtgctcccccttgccacccttaactccctccgtcctgcaggtcgtggccactccaggaaggagaagcagaactgtcagacactgaccagtctccatggtgacccttgtgtttagcaatacctggggactgactacagtgcttgtccactgggtaatgctgaaatgtctggaaatggagtctcccctcctctgccttctcctcatgaggcagtgggataactgggcactctggggagggtctgacacattggtccatcagctgctggtgtggccaacacacatttggaagggtgaggagctgggggcacaaaacagcagggaaacagcacgtagtctccttgcctggagctagatgtgtgctccatggcaccaggctggtcacttgggcggacagcagacccgaagtgctttggatgtcagcaaccaccatttcccactgggaacctggctcagtagccagacttggtccagctatgtgcttgctgcctgcagagagccagcaagcctctgaagcagcagaggaatatgattagagcccaagtgtactgaggacagcgcccactaagtgttttatattcattatctcctttagttgttacagccaccctggcagggagctagtgtggacattccctttgtacagctgaagtaacagaggctcagggaagatgtgactcagtatgggtggttctgagtctaaaacctaaatttctaatcacggcccttcagagattaaaggagcatatcatggaatggctagaagggaggaagcagctgactcgagggcggactgtacagagcaggtgatggaaaatagaagataccagtgggagaatggagctaccagtgatcagatgaattcagaagggtgaggggacttgagggatgaggtgatactagagggctcactgatgaccccacaatcccagcaacaggaaaagcacacagatgagccaggggaaggaacggtaaagccttgcagccttccagctctccagggcaggctctccacatctgattgccccagtgcatctgcaggctaccacctgtccatttgctgcaccagaagtttgcgtgaaggttctgccttgtctacactgctccttgcttccaataatcctaaaggtatacatttctggtgataggattttctattaaaatcatattttccagtaagtatgtcctttaaaccaggagaggaaaaaaaggccttagacctttaaaaatcttttgataatgtggccacatgtgctcccttctgtgttacagggtagttttctgtgttagcagtcagggtgaggcagggggagtccttgggcctggtacttatctccataccaatttcttgtctgtaagataaggacaagctaccactcgcctcaagggagtcttgtggacaccacactgaaggcagagctagaaaaatccatggtggtgtctgtgccaccaataaattctgaaaaaatgttcctgcccacatgcaccatgccttagcaaaatgcagaagtggaggcggggcgggggggtgctgtggctcccaggaacctctatggccttagagctgccccacctggaacatggtcaacactgaggcttccaggctgggaccagggctgggctgaagcaggggtcagct

SEQ ID NO: 1241938 - DNA, 4001 bp, Homo sapiens
gggatcaagccattcaaggggcagtcactgaagaccactttcaccttctttctcagtcctttactttctcccttaaaggcaagggagaccatatatgcttttcccctcacaacatctagtgcctgaaaaatctgaccaagactgcatttaaaaactgaagtgtaaaggtattggttataagaacaaacagcaaccagcttagcctggctcagcactggctgctctgaaatttcattaccagacaactgatgctctaaaaccattccccacattggtttgctctgtggctggataagacccaaactttatccatacagtaagtgtctctatacttcacacatatagggtttccatcaaatccctttatcgagtctacaaccctctccaacttcaaattcactccaatacaaatctgattctaaccatgccagccattccaaaatcatctcccttctagagactacattggctaatccctttgttaaacctgaacacaattccagctgcttttatgactcatttggccaactagagcccagttactggataacatgcatacaccaccaagctgaactaattaacaccagaatgcagttttccactgaatctaccaagggccaagaactgcttttccccaaggttctctctctctgtactcaacagactggtgtggtccaatatgctgcgggcattctctttcatttataggagtgcctccaactgcgaaatgtgagagtatgatgtggaaaggttctagaactagattaacgtacacgggctccagctttgcaaggacaaaggtgcacattttagggaatccagtatcagccccaactgcctccactatcaggtactgtgctatgagttttccaacattatgagggagacccgatctgtcgggcccttctaacgagaagcttcgatttgcaaaggctaaagtgccttcatcagggtgagaggtacacccagcgaggccacactagtccatctgaccccaaaggccatgttcctgagcgccgcgctcaccatcccgcctctgatcttttctccctcggcccggcgtctcccgagaggcaacccgatcccgccggaagcccaagaagggcctaggaagcgggcggaggcgagagccaggagagcacccgggatgccggccgccgggatgccggacgcaggaggcggtgcccggggagcaggggctcacctgtaggcggccacggcccgagtctgcaggtatttctgggcggtcatgactcccacgaagagaaagttcctgtcgcgcgggccgccatctgggtccgagccgggcggccagagctgcgccccgcgcgcatcgccgcgcgccccgccggcctgggaagccgccgcctgcccggaccggcagccctcggggctggcgcggcgccgtgggcccgctcgcttcagctcggaagcccggggcaggacgagccgcgaggccagcacgaagcccaggacgagcccgagcagcacgctgagccaggcgcgccggccgcgcgcggccatgcccgcgccgctccgcccgccgggccgccgccgcaggctccgcgcgccctcagcccgctgcccccgcccgcggaggccagcccgccctagcgccgcgaggcccggcccgggcagcgccgccgccgccgcgggcccgccgcgcccatcgcggcccccgagccgcccgcaggccccgcgccggcgctttgttccgcacgcccgcccccgccgccgcggcctgcgcctttaagaggggaccatgcccggcgcgcgctagcggcggctcgggcgcgaggtggcggcggctcctcccgctcgcgcgcggggacgcggggccggcacgacggcgacgacggcggcggcagacgagtccgggctcccgtcccgccctgcccgcgtcctccggctggctgggctcggttcgcacggcgcctgtccccgtcctcttcgtagccggcgccgccgccgcagctgcacatcctccggcttagctcgccattgcaacaggagcccctcacgtcacgcacggcgcgttatgaagtggccccgccggcggcgagccgtggcccctctcgggatccgtccgcgccgcgcgattggcgcaaaagtgaatgaggggcggttcacgtggccgaagtttgaccaaaaaaaaaaaaagccctctcgggcgccccgcccgcgcggtctgcgactggagctggcgggcggagggggcgtgggcccccgcccggcgcccgcggggccggagctgcccgtgatccgcacctagcacccggcgcaagggcgtccccgcgaggacggccgcttcccgcaccgcggcgcccgggcgcgaatctcgggagccagccttgcagtgggggcttctcggcccccagactccacgctgcgcacgttcctcccgcacgggccgtcctcgctgcaccccacggccacgcccttcctgccgccgggccggccccgcgctcccggccccgcgctcccgaccacactgcagctttgtccgcagtcccgcggccgcacgcagggaacagccgtcccggagccctggggacgtgcgcgcctgcgagtggaccgtgaattcagttaccttgttccctgttgctagtttctacgctaaataagaagaagaagaagaaaaagccatctttaatacttaaggtccacgcttctcatacagtactagcatttaatggatctcgaagacaaggaaaatgaagttaatgccctggatggtaaaccctactttcatttacatactgtgtgggcagatagccggctagtacccccagcctgggactttgtccctactttaatatagtccgtctgtaaaagtgccgtggatttctaaagacggattttgggtcccagatcctctactctggattttaagttttatacatttcctctgcaatacttcagctaaggcagcaaaagcggaggtctccatacaacgaaagtttgtgtagagtttcagtcttgttacttagtcaccagtatattggggttttctaatgaaacttttgaagggcaaagtgtttccctgggcctgagaagttacctgcattgaatcaaataaacacatgcctggggcaatccttggatctttcttcattgttgaccaaatggttgaaatactatcacacagtttaaaatgcctgtgggagcttcagataccttctcggcacctgaatggtggtcactcttgtttattctttggatattaccactttctttgacacttgtgatttatattaaaaatagttcattacctaccttcccacagagcccctccctaaggggtgatccacatctaaaaataaaatactcattatgcagtgaatacaggattccagcagtggtcttgggaaaaatacagaacatacaaccatgaattacaggctcgaaaaccatcgaaaaaggtttccactaagaccataaaccacaaatgccgaggagtcaccagatcccccaaattcagcagccccatcattcacagtgatttacatgaagtacgaatctggccagattcagatgttcaattttgtagcatattcaacgatttcagtattttctaacctgctttagacttacctagttttcttcgaaactagtgtccagtgaaaagctggccgggcgcggtggctcacgcctgtaaacccagcactctgggaggctgaggcgggcggatcgcctgaggtcaggagttcgagaccaacctgaccaacatggagaaaccccgactctactaaaaatacaaaattagccgggggtggtggtgcatgcctgtaatcccagctactcgggaggctgaggcaggagaatcgcttgaacccgggaggtggaggttgctgtgagccgagatcgtgccattgcattgcactgcagcctgggcgacaacagcgaaactccgtctcaaggaaaaaaaaaaaaaaagtatataaatatctgatgggaataatattctgaggatgccaaatattttgtcctcctcaatatcc

SEQ ID NO: 1241939 - DNA, 4001 bp, Homo sapiens
gccaggtgattttggtaaagtccttgcccctagaaaatcagaactaagcagaaaaatgaccagagtggggaccagtgaccccatgatcccaaagctagtggcagatggagttagggggtctagcagggagggagtggtgggagaggtgtcaaaggaggggagcgcttgcaccttgagctctggaaggctgagaatctgctcgaagggcacttgtgcccgaagtgacgactccacgctccgctgctcctggggaagcagctcacaaaaccgcctgtgggctctggtagagagaggggaactgtcggtgttctcagcgatcggtctccctgtgtgttcattcccactccttgcctgctgctcattgtcaaccaggtgaggagctaaaaccacgtacacagaacttccgagtcatcaggcaacggtaagcaaaaggacatgtcacaaggcagtacagcctaggagtctattcttgcaatgagtatttactgagcatttactatgtgcttggcactgattctagagatccccaagggatgaagaagttgggaaaggagccagaagttggccctaaagaattggccaggcacggtggctcacacctgtaatcccagcactttgggaggccaaggcgggcggagctttggaggtcaggcgtctgagaccagtctgagcaacatggtgaaccccttctctactaaaaatacaaaaattagccgggcatggtggcgggtgcctataatcccagctactcaggaggctgaggcaggagaatcacttgaacccggaggcaggagaatcacttgaacccggaggcagagcctgcagtgagccaagatcgtgccccagcactccagcctgggcgacagagcgagacgctgtctcaaaaaaaaaaaaacggagaaaagagcaaaaccaaaaatctcattctcaccttcactccagggatctcttaccctcaaagcctcctttttagcaaccacactgaactgtcctcctcggcctccacctccttcccatgagcttatctttgccacaggaacctggcctgcataaatccggcaaaagggcttccagcccaagttcaaatctacttactcagagtgttgtcttaagcagttaccaaacctttctgaacctgtttcattgtccagtacctctctcctaaagattaaattaggtaacgcaggcaaccatttagcacagtccctggcacatggtgagtgctcagaaagcgataacggttactgtattattcaggtaaagttgggagaaggagccgggctccccaaggcttctgtggtttagccactgggcaaggtcggcccctgccggactggggcaggaagttcggcagtgctgaagctagtggagcccagggtcaaagagcgcctaacttttcctggaggctgtaaggtggctccgcggtgccacgctggggcctcaggcgagggcggggagggcgtgccgggaggagggcgcagcccgggctaggtctcccggcctccagctcccgctcctctgcagacctcaggccagcccccgcccctccctcgggacagcgcccccgaagctgtctctagaggatcccggggtcggaggcagggttcaaggcagcacttacaggaggatctcctgcttcgtcaggaacgtcaagtcctggaaggcaaagccagagcggggattagcggaccgctgggaggccgcggccgccccgcagccagctcccggaccctgctcccgagaagaggcccgcacgcgagctccccagggccaggcgtcccgcgcacctggtactcggccagcagctccttggacaggcgactgcccgagccccccatcgccccgccgcgcgcacagctccgccaactcgcctcgagacgcagacaactttctcacttccgcccttgggccgcgtcactgcccggtccccgcggcaaccgctcctggggccaccacccccgggcccgccccctcctaaaagctgccaggcgttcccagccgggtttggcaggcgagctgccggctccaagcggtcctaggcgagctggaggcggggcccggggaggggcccgacgctccggggcggagcccgggactcacggccccgcctccggggtgggaggggggggcgggccacgccgcgcgcgtgcgtgctggctgcgtatgcgtcacgggcgtcatgacctcgctgtggccccggcagcggctgcggggaaagtcgcgaggtgcatccgcttcggctgcagtaggtggtggcggcggcagccctgggtggggtcccataggggcatctgagaagtcactggagctagcgtttccgggaaacctggagactcgctgagtggcgggggtcgtcggctgcccctctgcccagcaagggcttttctagatgttatcatcaggcaatcgctgcacctgtcgcagcccccaagccacctcttccagaagtaaccataaccttgcttccttcttaggctatttactgaggacccactggatgtcaagcattgtgcatagttttcttcgattgttgcaacatcccttgcgaggtaggttcccattttacaaagatggaaatacgtaagtccaaagggtgttagtgatttttccgggcgccggcatttagaaggtaatcggtccagtccaaggcacttttaaaggctctccactgctgttctcatcattccagctgacctgccgtccttttgactccatctcacccctagactgctgaccctttgctcttgtcccctcttaacctctaggataatgtttggcacatagtaggctctcagtaaatattatcgaatgcataataaatgaatgaacgtatactattgcaaaaggtaaggattccaaactgctgggaggaggaagtggaggttgtgttggtcaggctgggattaattcttgatccttccaatccattatacttgctgatctttgtaaagtctaaatctgagtatgttagtctcagtttataaccattaaatggttaaaaacccaaatcctggccctctgtaactggacttcctcctattggctctctgtctttcagccactttgggccctcagtccctcttccatctcatcctcagggaagcctttcctgactccctagactgcctaggaatctactttacactggaagaatacccagtgctctccttggcagcatgtgtttgataagacacactgtattaacaggtacattccatcattgtagaaatattcaaggccaggcgcggtggctcatgcctgtaatctcagcactttgggaggctgaagcaggcggatcatttgaggccaggagttcaagaccagcatggccaacatggcaaaaccccatctctactaaaaatacaaaaattagccagacatggttaaacctgggagctggaggttgcagtgagcggagattgtgccactgcagtccagcctgggcaacagagtgagactctgtctcaaaaaataaaaataaaaaaaaataactagggtataggcccatcccaacctgatcatttttctctttttttttgagacagagtctcgctgtgtcgcctaggctggagtgcagtggcatgatcttggctcactgcaagctccgcctcctgggttcacgccattcttctaccttagcctccccagcagctgggactacaggcacccgccaccacacccggctaatttttttgtatttttggtagagacggggtttcaccctgttagccaggatggtctggatctcctgacctcgtgattcgcccacctcggcctctcaaagtgctgggattacaggcgtgacccaccgtgcccggccgatcatttttctcttaatagcaggctctttctgtccgagaaagagttagtcttctgttagtaaaagcttaggcaaaaagcaagaagctgtcattatgtctcctgtactaaatagaccttgtttgcctcttacaagccaaggcgaatacctggactgcatggtaataagtatctgtcttctt

SEQ ID NO: 1241940 - DNA, 4001 bp, Homo sapiens
tatcttcccaaggcctgctcaagtgctgtatcgtttctggactttgtcccccttccctgctggcctcccactgcccactagtgcccttccctagaacacactccaccacctgcctctatcacaagggccacacactggaggtgagagtctgtctctgagtgtctgagactgagtgccttgggaacaaaaagcacacatggcccagcccagcccactcccaactaaagaagtgagcctaggagtcaagattcgaaatcctgtgtgagccctgaatggctcctcagcctctgtttacacgtctgtaaaatgggctaataatccacctcactgtgatgatcaagtgagttgatgcgtagagggcatcaattactgtgcctggtacacagcaggtgctccataaatgcgtctcccctcttccttcccagggcctcacctggggagctgagaaatccattactgacaactagggcttctaggaggagaaggggcctttgttttaccttcacccacatcagaggacccacacttcacacctgctttccttcacagccaaagtaagcactgatgaaggcaacaagtgcctatggagaccctgttggtgttcctcctgcccagttacacaggccacaacacaatcctgccccctccgcctggggagtcaggggagaggcatcagatgtgggacttgaagggtgaaagagatcctctggaggggggaaaggcatccaggcccaggaaatggcatgggcagagggagagagggagggaggaatgagcctggtgagctggagcaactgcaaatggttttaaggcggctgccatgcagagggcagggaagggacctggggagactgaggctgcagagataagctgagcaattggccagggctccgggtaagccaaggggttgggcttcatcctgcaaccacagcgaagtttttacctgggtgggacggtattgggattccagatctggaaagctggctctggaggcaggaaaacctagaaaggtctaaggaggtggctactgagggcctaagggagctgggagaggtggccctggaaggctgctaccgggcttgcgttcttgctccagttatctccatgctggggtcagaaggagcgaaccccagccgataaacaagacagtcccaagggaagactgcatgtggggactgatgcaccccactcctagaccagacaggacgccagctctcatttctgctttacagagactcgctctcctgggctccttcctggggctggggggcagggagcggggagggcggtcctccgtccagcctagtttactgactccctctccgggccagatgggcgctggaatgggtggctggagaggggttcgggtcctgcctagggcgagagtagctggagagaggcgcgcctgagaggttcttccaactggaaagagctcttattccaccggtggggaaactgaggcacggcgaggggaagtcaccggcccaaggtcacgcgtcgagctgaaggcagaggcagggtttgaacctgggagagctggctctcgggaggcctcggccagcgaccgagaaaagggaggggcggcggggcggcggggcctgtgttgggggccgggcgcgccgagctcacctggtagttgtctagctgctcttcggtgaagatggtctgcttgttccccatggtggccgccgcgccgccgctcgcccgcccgggctccgactcccatcagcggccgccagacccggagccagcgccccgtgcccgcggccctcggcagccccgcggctggcagcggcccacggtggccggacccttcccgccccgcagctcgcctggaggaggcgcgcgggggtctcggaggcggggacgggaacccggagcggcagcgactccgccgccggcgggaagagggcggggcacccggctccgcggctgcagcgcgcccgggtcccggcaggaggcgacctggccccgggagacgctgcccggcacgaacccttggctcccgcggccggaagtgctgggggcgcgcgggggtctcggaggcggggacaaagacccggagcggcggcgactccgccccgcagcaggaagaggtgtgagcccgggtcccgccgtgggagtccaggtcgcacggcgtgagggtgcggggcctgggaaaaaaccctctcgaggcgggcagtggggcgagtggcgccccttgacctggggcgggggcggcagcgaggactgtgagtgcgtggatctagctggggccgggctccgccaccgtctcgcgtcgcgaccttggtcaagcccttacccgggccctgtccctctggggagaaggagggggtcagtcaagctgacatctgaggccctcccggccaggcctcgggaagcccatctggcctttgggcgcggcctaggcagggcatctcagaccttctgtgttccttagggagcaggacaggatttacttggcttggttacaaacgtgagacttgagaggatttaaaggacttgactgtgtccacagaagtgtgacaaaggccaagacattttttggagcttttaagcagatgccattgtaagggaagcaggactttacctctgccctcctagggtctttggctgggcttgagaattaatttggcataagacagattaaggggagaaaaacagatttaatacaagttttacatgacgtggaagccctcataaggaaatgaagaccctgagaactggcaaaatctaaatacttttttttttttttgagatggagtctccctctgtcgcccaggctggagtgcagtagcgcgatcttggctcgctacaacctccgcctcctgggttcaagcgattcttctgcctcagcctcccctagtaggtgggactacaggggcatgccaccacacccagctaatttttttttgtatttttagtagagagaggtttcaccatgttggctgggctggtctcgaaatcttgacctcaggtgatccacctgcctcagcctcccgaagtgctaggattagaggcctgagtcaccacgcccggccaattattgtattttttttgtagagatggggttttgccgtgttgcccaggctggttttgaattcccaggctcgagcaatccacccactttggcttctcacccaaagtgctgggattataggatgtgagccatcatgcccggcctcatctcctgttttttagaaaaagaaggatgatcaagagtgcccttcttgcatctgctatttttcaagtgcctttaactcaaatactcaatatgccagagcagcatatgttgtggtggcatgttctgaactccttccccatccaccaaatggagtcaccgctatctttttggggtccagcccatacaactgttatttctaaactcaggacaactgaatcagtaggtattatctccatattataggcaaagagttgggctgagagaggttcagtaacttgcccagggtcccacagctgggaattagtagaacctggactggacccaggcactggctcaacataccattccacaactgccagtggactttgaagagatcaggatttttttttatttatatatataaaaaaaaatagagatggagtctcactatgttgtccaggctggtctccaactcccaggttcaagtgatccttctgccttggcctcccaaagtactaggattacaggcgtgagccaccatgcctgggcgagatcaagactttatgctttaaaatgcgtggtttgttactttaggatagtggttctgaaaccacctgggagcatgtatcaaaattacttgggaggctgcacccctagattttctgatttagaaggtctggggtggctaagaatgtgggtatcgaaagggttcctgggtgacactgatgcagctggtcttggaaccatactttgagagtgcttaggctgctgaagcttgtgggttctgatgggaacagggcttcaagtttggcagatgatccctcatgcttttagtttt

SEQ ID NO: 1241941 - DNA, 4001 bp, Homo sapiens
ttaataatgggaacaatctcaagttttggagaaaaacaaacagggtataaattacgaataaatccataaagtggcctcaggtcttaaggccttgctgtgtcttaaggcagatgcatagttcagtcccagaccagacacaacctcactgtggcaagtggaagatttgggagccagcagatacttagcctatacccaacacagatgtgacttccaggaccaggaaggagaacacccaggccttggtccccaccatctttcccccaagcccgtgggaacgtggcaagaggtagatgtgggtgcttcacagagtcactgactctggaatgcggtcccctgggaagtttctcagatccagtgacctgtaaagaaacaaagcttgtcaggtttcatatttctgaatcaccgcttatggctcaagcagaaatatttcttgacctgtcaaggagggaaaggtggacagaatgatatgaaagtgatatctgcctgagttgtgaaaccaggtagcttgggaggtgcagaggctcagaatctgagttcaaatgaggcagactaggttccatccctgggggtaggctccagggccccacatggagatgaggcacaaggacaagcaggggcgaggaggttccttgcaatgaggagagtccagggctcacccccagcagcctcttggtgactcgtcacttctaaaacccaggcctgaggggcatttgttttgccatcctttgatggagttcacactctcacacaggcgggtacatattaaggccgtgaagacttggctccgactccagtggcctctcataaggcaggctggctggagggtgcagatgcctcggacataccacctccatgaacacattcccagatgtgcacgggctgcagctggaacacatttctggcctttttgtttggggcctgactgggagttacacagccaggagccagctgacggaaagcagaggggatgcattgtgagaggccagggctccccagtaactgctgagcgtgggtgaggaactgcaagggtcaggagaggaaagcaggcctgggacaagggcaaggaactatggggcgtgcgtggcccaggccgcagctgagcagaacatttttatgtctccccagagctccggccaacccagaatctgactcgtttctggggattcaaaagtggttcccttcaacatcctaagtccagggtgtggtaggaaagggaagagtcctcctctctaaaaaatacacatatctgaaaacactgggatattccaggggaagaaaaaaccagtcccatgctgcagaccttctagctctaaaaccactggccccaccactacctgtttctcggatgagggagcagagtcaccaggacgtcccaaaggcctccacattgtgtgtatccctctgggctccaagcagggagctgagcagtctgctggcctgcactgcattcagcctgagcctgagcctgctccagggatgtctggaggctgaggtggcctgagacaccttgtggaaaaaccatttcccatctggcagcccacagaggtttctcagcatctccgccgtttcctcagcatatgccctgatggttaggcttgccatcccacgctcctcagaacacttggacaaagcagactggctgaccgcagggaataaagcagggcacccagaggtatggaaaccctaagtgggaccatctgggggttcctgtcctcaggtgggggagggagaggactttgggccaatgggggaaagcagattcccaaagcagaaagggagtcttctctgtgggagatgaaggatcaggcagcaaaaagtggggggaagtggggagaagggaatggagtagtcaggggagggcaggagcagttgagtccagcagtggggtgcagggatggggtgaggggaataggagtggagctcaccgtgtcttgagcaggactcctcagctgggggtccaagccttcgcctctccagcagtccagtgccggccttatatagcacagctggtggctcagcctgtggcagccagccagaggaagcagcagcgaaaccagatctgagcatgagcctccctctcccctccccatgtccccttgcagttcacagaggccaggattttatgtccagatcctaaggaggagatgccgcaggacctggtgatgggccaggtgggcagtggcctggggcatcacagtccagagcagagagaggggtcaggaggtgggctgggcactagaaacagccctgggaaggggccacggggaattctagatctgggcagcatttcatggcccgggggatggtgtgctcttgcctaagcctagcttgctgatgccccacattcccctggccctggctcgcccacacagagaaaagactttgctggtcttagcacatactccaaacactcttaggcacacaggccaccttggcctctcagctgggtgtgtctggtctgagttgggcaactactcagcttctctggcttctgagggaacactcagggaacctcagaagggataagggacaaaagaattgtggggcataggttgtcagctggtgagaacagttcttcctttctcccccccacttccatctgagtgcctgctggtacccactgagaccccagagctccagcatgtggactcttctgagaccctgatgctcatatatgtgcatgcgtgtgagtacgtgtctgccttcaggtataggcatccaccagcatgtgaacagccagtgttacccatagggggcgtatgcagctgcatgtgctctggggcttcacacccccactcccggccccctggccccagcatgaggttatctgtttgcacagacactggttctctaattttagcatgtgttagaatcacctggagggcggttaaagcagatttctggaccccacacccagagtttctgattcagtggggcctgagactttgcattctaacaagttcccagatgagattgatgctgttggttcatggatcacattttgagattgactggtcacagtgatagagccccagttgaaggaagaagatgaagagcgagtgtactaaggaccacagtgggagcttcccaggtcctgccccatgtagcaggctcatctagcctgggctgggcttcctgcctcatgccagcaactggagatggaggcctggtcctgtggccatccacgccagggtcagctcactctctccacatacctttaccgagctcttattcccaggctctagactgggcactgggaaggcacaagaaaagagatgtatccttgcactcagaggaaagagcctcacgtggaaatgatcccgtagtacaacagtgcatacccacatgccagagagttctgtgtgtgtgtgtttatgccttttcctgtgtgtatgtgtctttctgtgtgtgtgtgtgtatgtgtgcgtaagagctgttttttctgagcattgcctttgacaagatatactgggaggctgggtggagtggctcacgcctgtaatcccaacactgtgggagacaggggcgggtggatcacttgaggtcaggagttcaagaccagcctggtcaacatagtgaaacccatctctactaaaaatagaaaaactagccaggcatggtggagtgtgcctgtaatcccagctacttgggagactgaggcaggagagtggcttgaacccaggaggcagaggatgcagtgagttgagatcgtgccactgcactccagcctgggtgacagagtgagacttggtctaaaaaaaaaaaaaaaaaaatctgctggggaagagagtgggggtggagaaaggatgttgagcagcatggttcccaagtagacctggggcatagatctgatttgctttatctcctggagccccgtctccctcctggccaccagcccttggttcataagccctgtagttggccctagtctggtccaacttgtcagagccaagccatgactcagtttcagccatggctttgactgcagacgtctgaactga

SEQ ID NO: 1241942 - DNA, 4001 bp, Homo sapiens
tgtcgcagagccgtgcatagactgctggggtcaggtgactggccatgcagttgttgtgctttcggaggtctgggtactcagcgctggggagggggtacccagtaaccatggagggagggcacagacgcctagacctagtgcagttacctgggagctgtccagttggccatgtctggctttgctccgcgggaggagggggaattagaaagagggtaaaccttggtaatctctttagggactttcagagtctatgctttcctaatagttctagttgcctctggctggccagctcagtttcttcagatctgctcagttctttcctcccatgacacaacactacggatggaggaggggaaaagcctaaggagaggaattgaggaaatgagggaaggagatggaggggagcgaaaaggatagttcctggctttacaattagggatttgggcagccagtgcagctagaactcgtagggccagagctggtcttggcaggtccccaggaatgttcttgctttatggttttggcccccacccccaccccactgaggtctgcagactgcacagccctccagctccagggccttcgtgattatagcccttctctgttgcccggattctcacttctacccgcaccttcgttcccatcacctcctgcccccgcctcctcccgcgcctcaggcactgttacctcgggggatacagcctccgtcgttcactggcagctcgtacaggttccggtcggagcagaaacccagcggctagagaccccgctccggccaaagccaggagcctgagtcccgggcgggcggacagcagacgggagaagggaccagccatggcttgaggtctggctacgggatcctggagtaggcgctggcgcaagataagatccggaacagggagggaggatgcaaccggatagaccgagggccggagctaggtccgaggctgcagccgaaatgggggtcggattggaggctggagccggaatgggagccggtgccaatcagactgcaggagaggcgcaatgagctagtggcaggcgggcgggcggaggagagggaggccccagccgcagtctccaggggtggggctcccccaggccccgccttcccgcctgccaccgcgctaggtgcgcgagggcaggggtgggcagcacccgccaggtaattagcgggacctgagactcgcgcgtctaaagccggggatgtagccccctcccgccccggggatgtggccgcccagatttcagcaccaagtggaggacagcacccacgtggactagctgaacccaacacccttcccccacacccctcggtttaagctgaaactcgatccgtctaccctgtgggtgtgcaagggtgacactgcccaacctttcctctgctttcggcctgccccagccacctcttcggtctcccgggggcagccgcggggaaaccgcggaataaacacagataccagaggaggatatggagaaagcacagggttagaggcaggcactgggaaagacacccactggctcaaggtcaccttttccttagaaccaggaagaggagcaaggtgcttccttgccacctctgtgcacgccttacaaagttgagaaaggactccctgggaggaaccaaggaaatattaattcttatgccatctgtgctgtgtcctccacctccattctgcacccaagtctgaagccctgttatttcctgcctctgcttctcatgatcccccactttttgttttccttttgtctctcccactttcctccacgtcccctacctcacctttgatcttttacttctctgcgtcttttccaggctcagatgtgtttgctgctcacaggatgccctctgcgttttctcggcaagcttgcccacctgttggtggtgctgggtgtgggggtgggcagggaatcgttagtttcctcctcctcctctcccttggcttctctctccgtagttcctagttcctgtgctggaggagaaggtaaagtgaggtgaagggtgtggtgagatgactgggtgtgggactggaacaggcaggcacaggtctccagacaccacatgtgtttcctctcttgtctccctaatgctgtttaatccagagagtaaaggcgagtggtgtacaaaggcatgaggtggtcagggaatctctgccttcctcgtggtcccctctgctgctctctctctcctcgtgaaacacatattcagatttgagagggctttgtttcccagctccaggtatgatttgacctttgtcctggtagcaaggagaatgaatgctagagttgaaatagagatgaggggcttcagcgtggagggtcagttaaggtggagtagcaccgtggcattagtcccttccctctgctatcctggtgtacccacaagacagatacttggaaatcttaacagagagtatttgggaaagagaattccctttacatagaaaattcccccatattactctcattcccttcattctccttaggccttccttgtgtccttttattctacctttgtcatttgtgggtattcttagaagtgtccacttctctcttgggtccatcccttcttcttctggtaagacatcaattattagagaacagagttatgcagctgtagtgtggaaaatgttacctgtgttgtggggcctctttacctaggttgaaaagtagccatgagtaaataaatataatttcttagaatagcgtgtatttatccagataaatagggagataatcttccagagcagtagggttgctatttgattgagagggtgttactaaggaataggaagtgggaagagataattaccgaaggagaaataagacagccagaggagtagagaaattacccaagtttagagagtagcttcccaaatgtgaacaataattccactgagaaaacacatgtacttatgcacttttcttatcccttgtgtgccttttacaagcacataatatattaatgctcatttaaaaaattattttgcagcatatggaagtaatcaatatatggtattgttatatggtatttcatttatttaataagaattattgttgtcaatagtatttaatatttttaaagcactttacaattacaaggaacttttatatgtattatttcattgagttgaattggattgttccaatgattactggggacagagtctacattttcatggggatagtaaggggagttaaatacctggaagatgctgtaatagctagtttgaagggctagagtggtggagggggtatgagcctgagcatgaactagggaggcatctattcctcttagaataatctattcaagccattagaatcatttctatgtccattcaggaggccttgtggggtcagtacaatgaggcacgactggaaaagtggcaagacccctaatattgcagagaaggaaaagggaacaactgtcttgaccagggaaacccaagtgaagatgcgaggataataagagcaataacatatacaatacaaaatgctttcatattatcagtacctttaagtgaggtgttttgttgttgttgttttttgagacagggcctcgctctgtcacccaggttggaatgtagtgaggtgatcttggctcactgcaaactccatctcccaggctcaagtgatcctcccgcctcagcctcctaagtagctgggagcacaggcatacgccaccacacctggctagcttttgcatttcttgtagagacagagtttcatcatgttgaccaggctggtcttgaactccttgcactccagcgatctgcccgcctcggcctcccaacgtactgggattgtaggcgcgagccactacaattggccttaattaggtttttggggggtttttttgggttctttttttttttttgagaaggagtctggctttctcaccaggctggggtgcagtggcgccatttcggctcactgcagtctccacctcccgggttcaaacgattctcctgcctcagcctcccgagtagctgggattacag

SEQ ID NO: 1241943 - DNA, 4001 bp, Homo sapiens
tgtcgcagagccgtgcatagactgctggggtcaggtgactggccatgcagttgttgtgctttcggaggtctgggtactcagcgctggggagggggtacccagtaaccatggagggagggcacagacgcctagacctagtgcagttacctgggagctgtccagttggccatgtctggctttgctccgcgggaggagggggaattagaaagagggtaaaccttggtaatctctttagggactttcagagtctatgctttcctaatagttctagttgcctctggctggccagctcagtttcttcagatctgctcagttctttcctcccatgacacaacactacggatggaggaggggaaaagcctaaggagaggaattgaggaaatgagggaaggagatggaggggagcgaaaaggatagttcctggctttacaattagggatttgggcagccagtgcagctagaactcgtagggccagagctggtcttggcaggtccccaggaatgttcttgctttatggttttggcccccacccccaccccactgaggtctgcagactgcacagccctccagctccagggccttcgtgattatagcccttctctgttgcccggattctcacttctacccgcaccttcgttcccatcacctcctgcccccgcctcctcccgcgcctcaggcactgttacctcgggggatacagcctccgtcgttcactggcagctcgtacaggttccggtcggagcagaaacccagcggctagagaccccgctccggccaaagccaggagcctgagtcccgggcgggcggacagcagacgggagaagggaccagccatggcttgaggtctggctacgggatcctggagtaggcgctggcgcaagataagatccggaacagggagggaggatgcaaccggatagaccgagggccggagctaggtccgaggctgcagccgaaatgggggtcggattggaggctggagccggaatgggagccggtgccaatcagactgcaggagaggcgcaatgagctagtggcaggcgggcgggcggaggagagggaggccccagccgcagtctccaggggtggggctcccccaggccccgccttcccgcctgccaccgcgctaggtgcgcgagggcaggggtgggcagcacccgccaggtaattagcgggacctgagactcgcgcgtctaaagccggggatgtagccccctcccgccccggggatgtggccgcccagatttcagcaccaagtggaggacagcacccacgtggactagctgaacccaacacccttcccccacacccctcggtttaagctgaaactcgatccgtctaccctgtgggtgtgcaagggtgacactgcccaacctttcctctgctttcggcctgccccagccacctcttcggtctcccgggggcagccgcggggaaaccgcggaataaacacagataccagaggaggatatggagaaagcacagggttagaggcaggcactgggaaagacacccactggctcaaggtcaccttttccttagaaccaggaagaggagcaaggtgcttccttgccacctctgtgcacgccttacaaagttgagaaaggactccctgggaggaaccaaggaaatattaattcttatgccatctgtgctgtgtcctccacctccattctgcacccaagtctgaagccctgttatttcctgcctctgcttctcatgatcccccactttttgttttccttttgtctctcccactttcctccacgtcccctacctcacctttgatcttttacttctctgcgtcttttccaggctcagatgtgtttgctgctcacaggatgccctctgcgttttctcggcaagcttgcccacctgttggtggtgctgggtgtgggggtgggcagggaatcgttagtttcctcctcctcctctcccttggcttctctctccgtagttcctagttcctgtgctggaggagaaggtaaagtgaggtgaagggtgtggtgagatgactgggtgtgggactggaacaggcaggcacaggtctccagacaccacatgtgtttcctctcttgtctccctaatgctgtttaatccagagagtaaaggcgagtggtgtacaaaggcatgaggtcgtcagggaatctctgccttcctcgtggtcccctctgctgctctctctctcctcgtgaaacacatattcagatttgagagggctttgtttcccagctccaggtatgatttgacctttgtcctggtagcaaggagaatgaatgctagagttgaaatagagatgaggggcttcagcgtggagggtcagttaaggtggagtagcaccgtggcattagtcccttccctctgctatcctggtgtacccacaagacagatacttggaaatcttaacagagagtatttgggaaagagaattccctttacatagaaaattcccccatattactctcattcccttcattctccttaggccttccttgtgtccttttattctacctttgtcatttgtgggtattcttagaagtgtccacttctctcttgggtccatcccttcttcttctggtaagacatcaattattagagaacagagttatgcagctgtagtgtggaaaatgttacctgtgttgtggggcctctttacctaggttgaaaagtagccatgagtaaataaatataatttcttagaatagcgtgtatttatccagataaatagggagataatcttccagagcagtagggttgctatttgattgagagggtgttactaaggaataggaagtgggaagagataattaccgaaggagaaataagacagccagaggagtagagaaattacccaagtttagagagtagcttcccaaatgtgaacaataattccactgagaaaacacatgtacttatgcacttttcttatcccttgtgtgccttttacaagcacataatatattaatgctcatttaaaaaattattttgcagcatatggaagtaatcaatatatggtattgttatatggtatttcatttatttaataagaattattgttgtcaatagtatttaatatttttaaagcactttacaattacaaggaacttttatatgtattatttcattgagttgaattggattgttccaatgattactggggacagagtctacattttcatggggatagtaaggggagttaaatacctggaagatgctgtaatagctagtttgaagggctagagtggtggagggggtatgagcctgagcatgaactagggaggcatctattcctcttagaataatctattcaagccattagaatcatttctatgtccattcaggaggccttgtggggtcagtacaatgaggcacgactggaaaagtggcaagacccctaatattgcagagaaggaaaagggaacaactgtcttgaccagggaaacccaagtgaagatgcgaggataataagagcaataacatatacaatacaaaatgctttcatattatcagtacctttaagtgaggtgttttgttgttgttgttttttgagacagggcctcgctctgtcacccaggttggaatgtagtgaggtgatcttggctcactgcaaactccatctcccaggctcaagtgatcctcccgcctcagcctcctaagtagctgggagcacaggcatacgccaccacacctggctagcttttgcatttcttgtagagacagagtttcatcatgttgaccaggctggtcttgaactccttgcactccagcgatctgcccgcctcggccacccaacgtactgggattgtaggcgcgagccactacaattggccttaattaggtttttggggggtttttttgggttctttttttttttttgagaaggagtctggctttctcaccaggctggggtgcagtggcgccatttcggctcactgcagtctccacctcccgggttcaaacgattctcctgcctcagcctcccgagtagctgggattacag

SEQ ID NO: 1241944 - DNA, 4001 bp, Homo sapiens
gattctcgaaaacctcagcaaacagcttgtttaaaaagcagctaaaggccacaattatgctttgggaagctctgctctgcacaatgaggaaaaaggtgatatgaagaaaaccaagccaaggatgtcaactttgagcacaggccttgtcggcttctcatttgctgttcctggccagagaactgggctgactagaagtgcagccagccaggtcagcggctgccctcccggattccagccaccccagcacccatggttatttttggctggactgccctaccactgcaacctcaaacctgccacctcgcaagcctccaccaccaacggtgaaacgctcctccttttcaagggcatcaagaagggaagctggaaggccgccaactccgcctctgatgggggcctggttcaggcaatttccaccccagctccacatcagggcacccacacccggaactaaagctagagactcccgggcgggacggaggagcagccaggggatttgaactgtcagcttggcctagcccatcctccgggctggagtggctctaccaccacaacaaaacacacaggggagcctgcgccctcgttcgcgtcccttcctgccgccccaggtcccagggggtctcagagtcccatcccctgtaaccgccaccagtggcgccgaggggagacccggggacagagggaaagccggactgggccagaatcaaactccaggccgccaagggaggagtcatctgcggactaagcctgaagccaggggtaggggaggggtctgaagggcttctctggctcttctacgtcggaccccgaccccattccgcgggcaggcacagagcccaaactggacccttgagcggccccagaggccgttcaggctccgccttcaacaccgtggggtcgaggtcagggtctgcagtgaccgccctccggggcagaagcagcgggtcaggggtgagaggtcgcggcccgatatgggccgaagaggagaaagaaagggagtaggccgagaccgaatggcaccagcgcgcctgccccgccgactcacccccggccgccgccgccgctgtcgccgccgcggaccccagcccacacttaccgtctcccaggctccggctgcagctaggccccactccccgctccgagcgcctcttccgcttccggctgcgacctccgcccgtggcagccccgccccctcgcgtgacgcagccgtcgccagcctcggctcgacccggctcggaggcctggccgctctagcccccgactcgaaggctccggggcaccagccctctccgctccggcgggcgccgcggcctaggagactagttccgggagggccgaggggacgagcctggcccggcccgcctcccgccgtgtcgcggcgcacgtaggtcccccgacctgacaggtgcgcggcccgggccggctgggctctcagagccgagaggtggggccccgacctggccgtggggctgggcccgctccgtcgccccgaccccgcgtggtccgccaactccctcctgcgcgcggagaggacgggcattgttctcggggccccggagagcgcgagagcggcctgaggtctgtgtgccggagctcgggaaggcggacgcgactccgcttgcgcgaaacgagcgaacgacacattattatcttggtgtgtgcgggttttttgaaagccgtggtggcgctcccagctcgccagtgcgtgcggggcagtttctgggaagataccctagagctactctggcggggccggagtctggagggaggagatcccctctccttgagccccctcctgtggagcggcttcctgccggcctgcgtggcctctcagttaagactcccccgctagacaaaagccccgccggctgcgtctctgggccactggacagcccccttttgcagaggcctcgagcgtggggtcaccaaaatccctgacacctactgtcccgcgccgggtcggacaggattacgaggccccactttccagatgagaaaactgaggtggggatcttttgagacctcactgtgagcgtgcgcgtcccgcccggtctgggagtggcgtccccggcctcgcgagcgtcgcgcagtgaagcgacagggcgtggcgcctaattgtccccacgccacgcgagggctagaaacccgcagtcggggcggaccatccctccaggcaccgccccctccttgggaccgctccgcgggggcgccaagggtttccccagcaccgccccggcggccgccagccagccgcggccccgcccatgcccctccccgcgggtctgggcccgcccctgaagcggggaggtgtcgcaggggagccccccgcttccgagctgcggctgcgcatcaagtccttcgccagcggctctccctgaaacggggggtttcaaggcgtgatttgtaggggtgtttagtatcccctaaatctctgccagctccaccatggctatccgaagtaaacaacagaagctaattcaaaactgggtccccttccaaaaaattacaaaaattagccggactgggtggcgcatgcctgtagttccagctccttgcaggggactgaggcaggaggatcgcttgatcccaggaggttgagattgcagtgagctatgatcacaccactgcactccagcctggtcgacagaaggagaccctgtctcaaaaaataaacaaaaaatcggccaagcgcggtggttcacccctctaatcccagtactttgggaggctgaggtggatgatcacctgaggtcaggaattcgagaccagtctggccaacatggcgaaaccccgtctctactaaaaatacaaaaattagctagacgtggtggcacgcgcctgtagtcccagatgctcgggaggctgaggtgggagaatcacttaaacccgggaggcagagattgcagtgagccgagatcgcgccacttcactgcagcctgcgcaagagagcaaaactccgtctcaaaaaagaaagttaggagccgcttcagtgtacagtgggtgacccagattggctgctgaggtcctgccccctaaggtcctatctcaaaagctgaagattttgaaaaatcccaggccatctgagatgccattcctgcctggtacccatggcctcgaccacactagccaggttccatctcggggtttcatcagctcagatgaggtggagtaggaggcctctctggtgtctcctcctcccaccacttagtgttgcctgagtttccatggctccaggatactagccctgagggatggatgttctcagagaagcttctgtccccgggatggatgttctcagagaagcttctgtccccagccctgccctgagctataggctctgatggggtaagttagtcaccttcccacaaaactgcccaccactgagaatccaggagtccctacctcccagccacgaagcaactctctttttctgaggtggaacagaagccatctcccagctgtctccctctccacactttgcagcctggaggccatcctgcctgagattctacccttagagcttcattcttttgtgactttcacacctttcagaaacttggagaaagatctgcccccaggtgaggtttgggtaactcctccactcccatccccacctcagaggaggcttgctccacctccactgcccctcaggcccaagctcctgtctgggtcctcagcctctgtggagttgaggtctgtagcatatctcaagggcactggggaggtgccgctgccctgcatcctcccaaaccccacagctcctctcaccccttttggtctcccttttgccccccacctccacttccaccaagcttagggctcagttcactgcccgccaggcccagctgctctgatgccctccttgttctattgtccttactgtctcctctgtctgcctcatctgactttgccttctctggaggcagttaattcacctctgagccttggccccagggtcacctccctggaaagccttcctggggctgccctggcctgccccc

SEQ ID NO: 1241945 - DNA, 4001 bp, Homo sapiens
agaggcaccagatgcagggatcccagggacaggctgagtggaggaggccagaccagaacatagaagacaagtgagtggggctgggctgtgggggaggggtggggtggcagggaacaggcagaccatcccttctacccacaggatcctgctgctgcagacagaagtggaaaaggcctagcggcatttggaccaaatgacccaacagcctgttggcccagagcccagcctggggatcccccaagtgggtgcatggcaggccctgcgcactggccctgctgtacctttgactctgccccacactttattctctggtcctcattattgaagcattatctagagaaggaaggcagcgcaggggcttagtccagccaagagagggatcctcttccaacatttgggaataccctgggatcattcagtgacttccctcctggttcagatgggaaaactgagaccagagagcagaggagagcttgttcagagtcataacttgagttggggccaggaccctgccacaacatgccctgaggcatcaacggtctgccaagaccaccccagtgtggtctggaagctggaaggagaccccaggattctggaccaagtgtatctacaggagatgctggtgccaggcctgcagatccaagagcagagctgggatggaggcagggcccaggagcttcgggacccagagtctccatgccagcagctgagacccctgcccaggctcaggacacagtccgtctgcaggagcagttgctgatactcactgaggttggtcaagacagctggcaggggcagccccacaggaaagggaatctgggcattagctgatccaggccatgcccatctgtaccagggggcagaggcaagggagcctgggccccattcctgggggattccaatgtagggcaaggggctctaggggcacagaggaaaggagaatgaccaggagagagagattctagcagggcgtccacacagtgacactccagagagcaccatcctcatcttcacataactggcccccctgctagtgtgcagccaggcactggtccagagtcgtagcctggagtgtagagaagcctctgcgggctggggtggtcagagaggcctcctggaagggctgagacccagaggaagtggagttcggggcctctgaggaggggctgcatgggtaaaggctggagctccacaaccctggtggaggctgagccacaactcggtggggtggggatctccccaggtgaacaagagactcagaagagctgggccagagccaccagcaactaggggcctgcttggagcagctgcagcatctgcagggagagcagatggtgttggggggccattgcaggccctggaggcagagcacacctggctacttcaggagaaggtggggctgctagcagcactgggtgtggccccgggccaagagtcctggtaggtggctgcttgggcccatcctcagagtgtccaagccaggctggggtgggggctctgttctcactgtaggtgagatggccctctcagcaggcggtgggccagtctctgtcaccagctggctgagggggaatggcccagagccctaaacccggaatcacacgaccagagccagtctcccttccccaggtatcagcgctcctggttgtcacattctggctcttttatggggtgggaaatctttcagcttcaagaagtcctgtctcgcctacatatggccaagcccctcctgctggcccaggggcaggtgggaggtgggggtgagatgaccttagctgctgggtgcaagtcagggtccttgggagtagaagtgcccagtacaaaggggttctgtgtgtgcagggagccatgaaagaggcatctctgccccactccccctcctagttcataagacaataatcactgaaagggagtggggtgggggtgatctggggtccatgctgtacctggactgcaccatttcttccagtacactccaggtcctggaggtaccagtgcccctcaggaaagagctagaggcacaagaatcacatcccaggcttcatgaggagatggctgaatattggaaggcacgctggcaccggctggcagttgccctgaaatttaaagaggaggaactgcagagactccagaggcagagtgggacctggcctccccaggtgggcactgtctcccaccttcttctccaccccctcaaccccgttctccccattgtcttccccactgcccagtctttcccatacaaaccaattagtctcttacccctccttaggatgcccccatcttgatcctatacttccttcccattttctgcctcttcctcatcatgccccatcattctccatccatgttttcagcatgcatttattgagcatctgctacatgcctggccctcttctgtgtgcagaagcaatgtcaaatcagatcactccttgtcctcaacagcttatggtttgggggcacccggtaattgagtaagcaattatttatttattattgattgatttataatcgattgattgattgcatcagggtctctgtcacccagactgaggtgcagtggtgcaatcataactcactgcagcttcaaactcctggactcaagcgatcctcctgcctcaggtagctgggactgcaggcacgcatcaccatgcctggctaagtttttttttttttttttttttttgtagagatgggggtctcactacattgcccagggtggtcttgaacttctgaccctcaagcagttctcccaccttggcctcccaaagttctgagactacaggcatgaaccactgtgcctattttgcaagtaataatttaatgtgccagatgagggaagaggcacagtgggagctggttaaggggtggcagataggagagtccctcccagagaaggggtttctgagcctctgaaccctcacacaaggatagacaggcattttccaggaggagagaggaaatgaagggcatttcagcaagaggaaactgcacatacatatacccagagagacaggggaggagtgttgtaaatagcccctgatccacttgagaaggagagtgggtgagggggttactatggacatgggacaggggccagatctagggtttagatgtcccagctcctgtccacctgacttcacctccagcttggtggctgccttctcctggtcagcatcccttagtctcctgggcaagtgtatgtgtgcatggacagacagacacacagacatgcatgcacacacacacccccaggatacacatcagacatctgcagacacccccagatatgcacacacacagacacagagagagatacagacaccaacgaggtgcctgggagccatagggaagtagtattctaaggaccccatgtgggatccacgctctgccacaaggcacctgactgaagctgatctgctgatctcgatggaaggaaaaggagagaaagcttagctggctttgggcctcataaaggttgagttggtctaaatcagtgtatctcaaatgggtacacaactgtgctcatagggggctgttccttaagtctgcagtgtagtctgccactatatatttgtacagaggaaaatctcagttttttgttttgttgttttttttttttgtttgtttgtttttgtctatttctcaaaccagacccttgagggtcagaagatatatcctcagcgcctggatgggctatattctttggtcaagtctgaggacttgcagtgggcaatgtcagtgagaaggtagtggagtgacagagggctgggccctcggcagatttgtctcctagcaggaagaggtgctaggtgagccggatgcacttaacctgcacgtgatgcataagccagtgccactttgggccccacatgcagggccttccagcccctcagagactgtccaggccatttttactccctccctggacccctagaaggccaacccaggactcaccttctacaggcaggtggggaccctgggctctgggcctatccagc

SEQ ID NO: 1241946 - DNA, 4001 bp, Homo sapiens
catttccccatctgtacattggaagtgacatctggcagctcattgtcaagactgagtaagatgctagacatgggagccccacacaggagataaagtggtgaccctatctgagacccacaggctgttcccattgggctgtcacagttcagggcagtcagtgacccccaacttggcaaggattcggaacagagacatcccgcaggcagaagaggctgcctggaagaggggagctggtaaatgggttgggtcacagcagagatgaaaccactggacacggcgtggggcagacagcccggggactcagccagtcaggctcctcagcccatctaagcctatttcctcatcagtaaaataatacttaactcacaggccgagggagacaggtgagctacagtatgcggtctatggccagtacattgtttctaagtgaaaacggacacagtccgcagctgctcagcccgcatgtccgcagcagcagaaacgagccatccctcacctcagcccaagcgctcagacttctcccttcatccaggtcgtaccaaaaacttcctaacaaggactttgcgcatgctagtgctcagaaacttctcacgactccccagtgcctatgggataaagactgtgtccttaacctgtcacctaggacaggaactagggtgagacaagcaaggcctccaaggcccaacatttgaggcggcactcacggtcacggcagtgcgcctacccctaagttttgcaatctaggtcctcaactcgagtcctagacttgctgcaattaaaggcccttcacaatcagtctgcatcctcctgtcactttcttttacagccggaaagctccagcaccactaaactccttgcccttccccactgtttccctggatggaacagcctgtcttccctgggtcccctaccaagtcctctgagactcagctcaagtgccacttcctccatgaagccctccaagatgaccgctcactcccacttgggctctgtctctcctgatccctacaggaccgtaagcctctcccaccttcaccctgcctacccccttactgcctggcacagcgctgggcataccacaggcgcttaaagaatgcctgctgaatgcagtgaatgtttctggtcagtaaaacgggacgaaggtagaatggagctctgctcgcccaacgagataaaccaaaaactgagaagggctcctcattcattctctggacggcagcttccgcccttccccgctgtctcttccattacattcgcacattcttgggtgccccaggtcaagcagacagcctcctgataaatgacagaatcaagtcctactcagggctggagggaccccgagaacgcggaggtggcgcccggaacttgcggataagttgggggtccgagtgacgaggtgtgtgtacccaccgccctggggagctctcccagcgcagcggctgtcccggcgccagcccgggtcgctggaacgcgggaagggaggaaaaccccaaacttcgggcgggcgctcctcccacccgagcaacggcgaagcggggaggccgagccccgctgggccccaggctccccagacagagaaggaaacgcgggggcaccgccgccacggtagcgcgcctccaagccccccgcgctccgctccgccccggccagcgccgcacacgaggttcccgcccggcagccctaggagcgtcacgtggcgggtcccgaggccccagcgcacaggcgcctagcccgccctctcaccccggcgcgcgcccacctggcctgcaggaaggaggcgcccagctgcgcgcctgggccgcccgtcgctcccaggtgctgccgcctccgcgtcgcctccatggctgccccgcaggcccctcggccctgcctttccgaggaagagaccggttcagctcggctgccccggcggaggccgccgcaaattcccagcgcggggcggttcggggcgggccggcgagagcgcgcggccctcgggaggaacaggcggggctgcggacccggggcggggcggagcggagcggagcggagcggagggaggcggggcggagggagacggggcgggctccgctaggggagggccgggcgctgcgagtgtggcgtcctcgcggggcgggggctgctggcctgtccgggctgcgcgcgtgaccaccagcgggctgggatgtgttagggtcccttgcctgcctgggtacgggaatctctgtctagggtgactgaggcctgggtgttgggctggggcggggtagcgacctggagatagactaagctgatttaaatgctccccggggcagagggttctgtgggatttcccttgttcttacgggtggaggagaggaggcaggactggagacctgcacgtgtagcacccgcgtggtgcagcacgtgggttgcagatgttctagtgaggggctggcggtgacagtgggaaggagcgagttggtgacatctagagtcgtgtgagaggtatggtgactgggactctggatgtggggggtgaggggagaagagttcaggcagtggccggattctgcccctgggtggatagtggaggcaccccccgggaagtgggctagagcagatttcgtgtaaataaagattcatctttgaacgcattaagcttgaggtgggtcaggaaggctgttggaccggtggtctgaagctgaggcgagacctgggaacccagtggacaggctcgtgagtcaccggagcatacaagacagacagaacctaaggggacagcatcctcaagtgaaaaacagaaccaaaggtcaaacctgagaacagcctgcagggcagattgccaggacttcattagtggtaccactttgaactagctgtgatgcgggcaaatggctcaacccctcacagcttcagtttactcatctgtaacaagaagatgcctattgcatctactacattggagttgtgatgactatatgaaactcttagcagagagcccagcactggtggactaagttatttacaatagcccgtctcgagacctgaggtttccctccacagaaaggttaccttccacaccactgtcaatgtcacaaactctctcctccccacggtcactgtcagcagcccaggccgctaactagaacaactgcaaccaactcccattctccccaccacccccgtgctacaccaggcgcacacgacatgtgcaggtctccagtcctgtctcctctcacccagccctcaagccgctgcagaagggatgtgcctcttggaagggatgtgcctcagatgcaaatgcaatgtgccattcccctgcccagtatccttggtctgcttcccagaccatgaggggtctgagctatgcctatttccattctattttctttcctgtctttcttcttgggagatgtttattggatttatttctttcccctttggtcagaacctgcatgtcctttcttggctgtgggaggctaggactgcctgcctgggagtcattttccatcagccccatcctgggctctagcagcccacaggccacacctcaatcccccccctccgcccctggtcccctgaagaacacatttgctttaaagctttccttgtttcatttgatccacacacaccaggtcgtaaggagaacaggtgattgtctctgttttgtagcagagaaaaacctaggccctgagctgaagtactgtgcccaagggtcagccaaggacagcactcagacggggccccagatttaattctggtgaatctgatctacacatcgatctcggtatacaccagagaagaaggattgaggcttcccgctctgaccccaatttcttatcctctgcaggctttgcaagcctgctgggctccagagggaggggcatgcagtgcccatgatgtcatcatcgatttaataacactcagaggtgggcttccagccatcagaggatgaggccgtgtggagggagcctctctagctcatttaatcctccaatctcttaaatacaaacacatctgccttttttctggagtccgct

SEQ ID NO: 1241947 - DNA, 4001 bp, Homo sapiens
gccgaggcggacggatcacaagatcaggagatcgagaccatcctggctaacacggtgaaaccccgtctctactaaaaatacaaaaattagccaggcgtggtggcgggcgcctgcagtcccagctactcgggaggctgaggcaggagaatggcgtgaacccaggaggcggagtttgcagtaaactgagatctggccactgcactccagcctgagcgacagagcgagactctgtctcaaaaaaaaaaaaaaaaaaaaaagaaagaaaataagacagacagaaagacagatagtagatggaaagaaagacagaaaggaaagaaagacaggaaggaaggaaaggaaggaaggaaggaaggagaaaagaaaagaaaaagaaagaaaacagtcgttttgaaaagaaaaaaaaataactgcctatctcctatgattcaaaaatgttcacggactcttggctacaagagatcagtaacactttcaaagaagccgtccctgaccaaagggaacacacacatacttcatccacccactggaaactgtattattctttgtctactccactagatttaaacatgagggtgaggacttattcaccactctacctccagcactaaaagaaggcctgacacacagtggacccttgacaaatattaatatatatcagataaatggattaaaatatgtcactttaaagtgtttgcaaatcgaattcctggaatcgggacatctactggttgaggcttaacatcgatttaggattaaatttactcccttacatttatatatcattttacaaaatgcttctgcccacgttacctcattcaatccttccttctgtagtaaagaaactggaagatatatttagtaaacaataaggattttataattggcttagaagttagataaaaggggcctttttaaaaatccatccaagggtcataaaccgataagccaaaataaaacgaatttgtctagaagtcagtcattataacaggatctagcctcgtggtctgacttccacagatttgaggaagagaaaaaaagtttattttccagactctcttggctggggcgccattctttcacagcttcagataaacagaaagaaaaggtaaacaacatgcgccactcttaggaaactacctcccggtcaagttgggaaagccagcaaaggactgctgaaacacccaagtacttccgaaccaactcctgcgggacttctccccatctctcccgccgctgtcctgcgggccccggggcttgcctgacgccgggaagtattgtgaaccttgtttatgtcccagtgtcagggccgcacagtgatagtaacatctcgggtatcgcgcggcttgcgtccgggacggccagctgggtgccccgagtcctgggggaccctagtagggacagatcctcagccgagcccctcctggagcccccaacgggcccgagggggatcccggccaggctgcggaagaagagccgcagccatggcaggcggcggtccccggcagggctgagtgggatctggagacattttttaataacaggagcattttgtgcctttcagggtttctacaaagtggccgcattccggccccaaagtcagcaggcctgaaagcgtgcaggcaggcgcgtgggaaggagtttacttccaatttgagcaacggctgctccagaggttggcagagccccattccacggggaaagtggtgggtgccgggcgaagcgccgcgcattccctcacactccccgggtgcagcaggcctcgtgccctccccggggcccccaaccattggccagtccaccccccccccgacaggctgagggctcaggagtggcactatttcgttacctctctgcgcggaggcgagtgaggaggtgatgagccggacggccgccgcgccgcaagtacaagcaccgcagctgggcatctccgcgaggcctaggccggggcttcgccccctgaggacctccgggtcacagcggcgtgaatcctgcccgcaaggcgcgctgactcggttccgaaccctttcgcgggccctagaccccgtggagagttcacctgcccggcagccaggccttcacgcttctctgccccacagccgtctattcaccagagtagacacccaacccccccctcccttcccctccttctccttctacccccacccccagcctactgggcccggggagcttgcgcgcgcctgcgccctaggcccggggagggggcggagggcgtgggcacgcgccgtgtttgcgagctggtgaagctacgtgaggcgaaggcgagggggtggtgccctgggcgccaatgagttccctacggcaagcgtctagccccaactggggcgactacaggtcccgacgctcaaggttgccaaaagcccttttatcctaaagttgaaaggttttgcgatagacgcggagagatgcatgccgggacttgtagtcccgagtcgtcatagtcgagctcttccggtcacttttagtgggcggcagggaaggtcaaggtgaggctggtggcttaaccctccagggggaagtctctaaagtgccttggtaggcgctggatgcttcagattcactaaatttcttcccccggaattccacatcctgtgttccttatcttctcattctccttagtttcatcacttgtaacatggagttggtattgtcagttagttccctgagcagcaattgttagttggtaacagctccgtctccttgttctttcaggcctcgtggtgataaagcttctagctgttgctagtccgtgggtgctttaaagtcttgagggttttcttttctttctttcttttttttaatttagtaaagatgaggtctccctatgttgcccaggctggtctcaaactcctgggctcaagtgatcctctcgcctcgccctcccaaagtgctgggattacaggcgtgagccaccgcacccggccgtgattaaggatggcactgcatagataacctctggtcaggttcctatcaggccatcctctcaagttatgaattcaaaagcacagagccggctgggcgtggtggctcacacctgtaatcccagcactttgggaggccgaggcaggtggatcacgaggtcaggagtttgcgaccagcctgacccacatggtgaaaccccatctctactaaaaatacaaaaattaggtaggtgtggtggcgtactcctgtaatcccagctactcaggaggctgaggtgggagaattgcttgaacccaggaggcgaaggttgcagtgagccgatatcgtgccattgcactccagcctgggcgacagagcgagactccgtctcaaaaaaaaaaaaaaaaaacccagagccatctgagattatccctgtgagaaaatggatccttcaccaggaaagtgatggcaaatacttgtggtcacatcagcccttccacatcacacctactttcagctgttttctgacagattaatgacgctttaaaaagaaagtcaagtgcagttttccagctcaaatagtttacactggaggagttaactccttgagttatttactttttgcgaactacatagctgaaggcacataactttttttttgagacagagtctccatctgtcacccaggctgaagtgcagtggcaccatctcagctcactgcaacctctgcctcctgggttcaagtgattctcctgcctcagcctcctgagtagctgggattacaggcatgcgtcaccatgcccggttaatttttgtatttttagtagaggcagagtttcactatgttggccgtgttagtttcaaacccctgacctcaagtgatccgcctgcctcagcctcccaaagtgctgggattacaggcatgagccattgcacccagtcaggcacataactttttatgtcttcattttatgtaaaactttttcttttgtcttttttttttttttttttttgagatggagtctcactctgtggccaggctggagcgcagtggtgcgatcctggctcactgtaacctc

SEQ ID NO: 1241948 - DNA, 4001 bp, Homo sapiens
tctcccacactgctgcccaccagggacccctggtccccgacatagatggataccctctggcctcttgttctcccctatcaccaggctgttgagtaaactctctccctgacccaccctgccaccaaaccctgctctgaggtctactccaggcattcatctgctcagcaaacatcaattaagcaccttctctgtgctagctcccactctaagtgctgggggtacagcatgggataaaacaaagtcctgggcctcacagagacgagtgaactctctcccctcttccccatacccacacaactccagccactccagcttccctgctgctgctggggcacaccagccttgctcccgcctccatgcctgctgcactctctgtgtggcttgctatccttttttttttttttttgagacagtttcactcttgttccccaggctggagtgcaatggcgcgacctcggctcactgcaacctccgcttcccaggttcaagtgattctcctgcctcagcctcccaagtagctgggattacaggcatgtgccaccacactcggctaattttgtatttttagtagagacagagtttcactatgttagccaggctggtcttgaactcctgacctcaagtgatccgtccccctcagcctcccaaagtgctgggattacaggcgtgagccacggcgcctggccagtggcttgctatcctttaagtgacacatcagaccagcccttctttttttaaaaaataaaaaaataagacagagtctccctctgttgcccaggctggagtgccatggccatgctggtctcgaactcctgacctcaggtgatccaccctcttcactctcccaaagtgctaggattacaggcatgagccaccgcacccagccagaacagcctttcttgattatacttcttaaaatagcccctcacacaaggaaattatggaggccagtggatacgttcattatcttgattgtggtgatccaagagccaggaagatttgttctctacttgtccagcctcatctttccctaacctgcagatgatactctcccagctatgggaaatgcatccattcctggggagccatactctctctaacctgaagtctctgcacatgctgttccctgtctgaagacacacgtctcccacccttgcctccctacccctggtacacaaactgtacttcagccagccagctcctgccatccatccgcctttaagtttgatggcatccttaggaagcccccttagcactacacacaaggcgcagttaggtctctgcccctggagccttagctatgactccaattcaagcctccgatttccccttcccttggcagctcaagtcctcccagtgcctagcacacttcatggtatagaccaggcgcttagaacgtacggatggatggattggatggatggatggataagtctcaaccccaaaactactactttctggctctggaaagagcggaggggcttcctaacagtgtggaagagtgagcctgattctaagcaccttcttgtacaagccccacggcagggctggggaagggggtatccttgggaggtcctcttggggatggggaagacctgaaaggactcccagctccagacaagccctagttcctgccccgggaggcaggggcccttccttccgccagggaagcaccgggactctaagccggccggcctgctctgtcttacccgccccgtacccccgcccccgtctcgggagcgggagagtggtggacttttccctaccagactcacagccctcacgcccgcacacactgtgtttgcggagaggccagtacaacctcccccagtttccggagccacttggcgccccctcattcccgctccagcagcccaagcctcgcttcgcccctagtgcctcaccatcgcgccaagaagccagggcccgggaatttctttttccggtcccgcagggtcagctgagtcgacgatcacgtgacttggactaactgcctctgggagggcggggcctgctcgagtgaggccgggagcggaccgcagcccgctggaggtgcagggggcgaaatgctggcgtctcctcctccgtctcccagaatccttccctggaaaaaactggcgccaaccgccagtttaactgaggaccgaattaagacattaggaaagacagtggaagttatttcatttgtttaacttaagggggtaggatcccgggagccagggtgtttcaggtcattgacacgttttccactgttaagcgaatagcattattcacagctgcgggctgtggcaaaagacattttaaaaactattgacgtctactacacatacagaaaattgtacctattataaagcttaataagttttcatcaactgtacacctcacataaccagcacccaggtaaggaaataaaccagataacttcttcaagtgcatgggtattttatttcattttgatgaatcatctaggtgcctagcaaaaagggctgtcataattacttgctcaggaaaactccctacagcttcaacatcaatagatgcttatcttaatttttgccagtctgatggggaagaaaaatcggttgcttaggttgcagtggtagtctgattactggtagctctgagctaatgggtagtctagaacaactaagtttccgacattgacttgaagaggcaaaaacaaaaagacaaaacaacaagaaaaatacatttgagaatagactaataaccagagacaaaattgaatacagtcgtcctttggtaacctcaggatgttggttccaggaccccagagataccaaaattcacagatactcaagtccctgatataatatggcatagtatttgcaaataacctgtgcacatccttccgtatactttaaatcatctctagattactataatacctaatacaacgtaaatgctttgtaaatagctgttataaagttttttaatttttttttttgagacggagtcttgctctgttgcccaggctggagtgcagtggcgcgatctccactcgctgccagctctgccacccgggttcacgccattctcctgcctcagcctcccgagtagctgggactacaggcgcccgccactgcacccgacctgtgtttttttattgttttactttttccaaatattttcgatgcacagttggttaaatccaaggatccagaacctcaggatacagagggctgactgtagtttgagctctctcctcaattccatgcctatcccatgcaacaggtgcagctggttttattgttgcaggctttcaggtttttaaaagacagagcccatgacaattaaactgcactataaaatagaaatgtaaagtgtccccaattcatggtaaaattgagctcatttctgaagagttcttttacaaatcataaccactagcctgttgaaaacaacagtacgttaagttactagactatcctaaaccatgtcaaaaaaattttttaagaatgttaagacctttaatcatagcactttggtaggccaaggccggtggatcgcttgagcccaggagttctagaccagcttgtgcaacatagggagaccccagtctctacaaaaaattacccgcttgtcctggtgcacacgtgttgtcccagctacctaagaggctgaggtcagaggatctcttgagcctgggaggtggaggctgcagtgaaccatgatggcaccactgtactccatccatcctgagcaacagaaggagaccatctcagaaaaataaaataaaataaaaataaataaataaataaataaataaataaataaaggctgggcacggtggctcatgcctgtaatcctagcactttgggaggccgaggcaggcagatcacctgaggtcaggagttcgagagcggtggcctggctaacatggcaaaacctgtctctactgaaaaaaaacaaaaaaaattagcagggtgtggtagtgggtgcctgtaatcccagccagtcaggaggctgaggcatgagaatcg

SEQ ID NO: 1241949 - DNA, 4001 bp, Homo sapiens
agatcaccacagaaccggaacctctgcaagggagggaggcaggtaatcaggctggagggaggcctgaggtgtggccaggatccgtgtgtctcccacactgctgcccaccagggacccctggtccccgacatagatggataccctctggcctcttgttctcccctatcaccaggctgttgagtaaactctctccctgacccaccctgccaccaaaccctgctctgaggtctactccaggcattcatctgctcagcaaacatcaattaagcaccttctctgtgctagctcccactctaagtgctgggggtacagcatgggataaaacaaagtcctgggcctcacagagacgagtgaactctctcccctcttccccatacccacacaactccagccactccagcttccctgctgctgctggggcacaccagccttgctcccgcctccatgcctgctgcactctctgtgtggcttgctatccttttttttttttttttgagacagtttcactcttgttccccaggctggagtgcaatggcgcgacctcggctcactgcaacctccgcttcccaggttcaagtgattctcctgcctcagcctcccaagtagctgggattacaggcatgtgccaccacactcggctaattttgtatttttagtagagacagagtttcactatgttagccaggctggtcttgaactcctgacctcaagtgatccgtccccctcagcctcccaaagtgctgggattacaggcgtgagccacggcgcctggccagtggcttgctatcctttaagtgacacatcagaccagcccttctttttttaaaaaataaaaaaataagacagagtctccctctgttgcccaggctggagtgccatggccatgctggtctcgaactcctgacctcaggtgatccaccctcttcactctcccaaagtgctaggattacaggcatgagccaccgcacccagccagaacagcctttcttgattatacttcttaaaatagcccctcacacaaggaaattatggaggccagtggatacgttcattatcttgattgtggtgatccaagagccaggaagatttgttctctacttgtccagcctcatctttccctaacctgcagatgatactctcccagctatgggaaatgcatccattcctggggagccatactctctctaacctgaagtctctgcacatgctgttccctgtctgaagacacacgtctcccacccttgcctccctacccctggtacacaaactgtacttcagccagccagctcctgccatccatccgcctttaagtttgatggcatccttaggaagcccccttagcactacacacaaggcgcagttaggtctctgcccctggagccttagctatgactccaattcaagcctccgatttccccttcccttggcagctcaagtcctcccagtgcctagcacacttcatggtatagaccaggcgcttagaacgtacggatggatggattggatggatggatggataagtctcaaccccaaaactactactttctggctctggaaagagcggaggggcttcctaacagtgtggaagagtgagcctgattctaagcaccttcttgtacaagccccacggcagggctggggaagggggtatccttgggaggtcctcttggggatggggaagacctgaaaggactcccagctccagacaagccctagttcctgccccgggaggcaggggcccttccttccgccagggaagcaccgggactctaagccggccggcctgctctgtcttacccgccccgtacccccgcccccgtctcgggagcgggagagtggtggacttttccctaccagactcacagccctcacgcccgcacacactgtgtttgcggagaggccagtacaacctcccccagtttccggagccacttggcgccccctcattcccgctccagcagcccaagcctcgcttcgcccctagtgcctcaccatcgcgccaagaagccagggcccgggaatttctttttccggtcccgcagggtcagctgagtcgacgatcacgtgacttggactaactgcctctgggagggcggggcctgctcgagtgaggccgggagcggaccgcagcccgctggaggtgcagggggcgaaatgctggcgtctcctcctccgtctcccagaatccttccctggaaaaaactggcgccaaccgccagtttaactgaggaccgaattaagacattaggaaagacagtggaagttatttcatttgtttaacttaagggggtaggatcccgggagccagggtgtttcaggtcattgacacgttttccactgttaagcgaatagcattattcacagctgcgggctgtggcaaaagacattttaaaaactattgacgtctactacacatacagaaaattgtacctattataaagcttaataagttttcatcaactgtacacctcacataaccagcacccaggtaaggaaataaaccagataacttcttcaagtgcatgggtattttatttcattttgatgaatcatctaggtgcctagcaaaaagggctgtcataattacttgctcaggaaaactccctacagcttcaacatcaatagatgcttatcttaatttttgccagtctgatggggaagaaaaatcggttgcttaggttgcagtggtagtctgattactggtagctctgagctaatgggtagtctagaacaactaagtttccgacattgacttgaagaggcaaaaacaaaaagacaaaacaacaagaaaaatacatttgagaatagactaataaccagagacaaaattgaatacagtcgtcctttggtaacctcaggatgttggttccaggaccccagagataccaaaattcacagatactcaagtccctgatataatatggcatagtatttgcaaataacctgtgcacatccttccgtatactttaaatcatctctagattactataatacctaatacaacgtaaatgctttgtaaatagctgttataaagttttttaatttttttttttgagacggagtcttgctctgttgcccaggctggagtgcagtggcgcgatctccactcgctgccagctctgccacccgggttcacgccattctcctgcctcagcctcccgagtagctgggactacaggcgcccgccactgcacccgacctgtgtttttttattgttttactttttccaaatattttcgatgcacagttggttaaatccaaggatccagaacctcaggatacagagggctgactgtagtttgagctctctcctcaattccatgcctatcccatgcaacaggtgcagctggttttattgttgcaggctttcaggtttttaaaagacagagcccatgacaattaaactgcactataaaatagaaatgtaaagtgtccccaattcatggtaaaattgagctcatttctgaagagttcttttacaaatcataaccactagcctgttgaaaacaacagtacgttaagttactagactatcctaaaccatgtcaaaaaaattttttaagaatgttaagacctttaatcatagcactttggtaggccaaggccggtggatcgcttgagcccaggagttctagaccagcttgtgcaacatagggagaccccagtctctacaaaaaattacccgcttgtcctggtgcacacgtgttgtcccagctacctaagaggctgaggtcagaggatctcttgagcctgggaggtggaggctgcagtgaaccatgatggcaccactgtactccatccatcctgagcaacagaaggagaccatctcagaaaaataaaataaaataaaaataaataaataaataaataaataaataaataaaggctgggcacggtggctcatgcctgtaatcctagcactttgggaggccgaggcaggcagatcacctgaggtcaggagttcgagagcggtggcctggctaacatggcaaaacctgtct

SEQ ID NO: 1241950 - DNA, 4001 bp, Homo sapiens
aaacggatgaagaaaatgtggtatatatacataatggaatattatttgactataaaaaagaatgaaattctgtcagtttgcagcaacatggatctggagaattaggttaagtgaaataagccaggcacagaaagacaaatatcacatgttctcactcagatctgggagcaaaagaagttgatttcacggtggtagagagtagaatgataggaagggtgttgtggggggaagaggagtggggaagtaagagaagttggttaatggtatgtacaaaccaacagttagatagaaggagtaagttctaatgtttgacagcggagcagggtgactatggttaaaacgtattttatatttcaaaatatctagaagagatgactttaaatattccctagacacagaaatgataaaaacacaaggtgatggatatcctaaataccgacttgatcactacatatcctgtgcatgtaacgaaaccccccataaatatgtacaaaatactatgaatcaattaaaaaaatacaagcacatataaaagaaacattttgataacaaaacacctgtaatataaataaacaggtaataagtaaaaatggacagatacatattcttaatgaactgaagtcactgcctacaactggcttgcacaaactaaaatgtaaggtagaaaccataactattagcgaaactacatttaactttaaaaattataaaaatctctactatgactttcaaataatagcgagaatttcctttctcccttttgcaaagtgtgccttattttaaaatgcaaaaaactgaaaatatatacgaaaaagttatagactaattcaaaacaatgtattaatattttgacaatctctggcacttaaaatgagtcagacgtcccaaaacatctatttcgtaactttatgataatgcagcatcaccataaaagaaccatatgaaacacccccaaaataaagaaacacagcaaaattgacgttaattctggatcaagataattttctgagtttccacacgatgtttttgaatagcaaacgttattcaaacttgcaaatccattaataaatgaagctttgaatctttaaaaatctccattcggtcagaaaaattcgtttatttctatgctgttgctgttttaaactttgtatactgggaaatttctaagggaaaagccatgggttcaattatctttcacccgtcctccaaaaacaccacaagcaaaacctcctccccagcttttctttataaagaactgaaaaagtggttcgactacctttttttcagttatctttgctctgaactctcccctacacacttacctcggaccaaaactggccctggcaagactatttaagctatgtctccaggagactcacaagttgcgtttcgcagtcaggcctgggagcagtaaggacacccccgttttctgacttctcctagcatttcgcacccgctcagttccagtgtgaagaagtgggggcccggaacgctgggcccgaaagggcaaagccagggcctacaccgcagcatggtcaccgaggcggctagcgcggtggggaggcagaagacagagaaccgaacgcctgggaccaggggcatccgtgtaaaccgaagaggcgctcagactcggagggcaaggcccggggcccccttcgctgcctcctttgccctcccttcccccatgctggagaagcagggcccgggcccggtgcgggaacggggaggaggtaaaccagtcctgtcaccgcactgagagaggctgtaaacggcacatgctctacggggagaggccgcgggcgccccggcccggaccccgaaaacaagacacatcaccaccctcagagttccattccctgcgcctcaccaggtcgtagtcctcctcatcatcgcacatgaaatcatcctccatgtcagacatcttggccgggagggggaggagaaattggagacaacctcctcccacaatcctccgcggctcagaggcgtcactctcagcttctttccgccttccagtccctcttagaggagctgtttcctgccggaactaattatctcgacttgtagctgattcgctacgactccaaaagagactgcaccaccccccgtttcctccgaagtggttggtgccttagcaactaaagctggcaactgggacatcgtccggtgctgcaggtctcagccgaagggcgtcggaaactgcgctcgcatcgagcagtttccagcctcctgggtaaaggagcagtctcctcccttgcttgggactctggacgcatctcattccggtgaaagtaagggacagcttaggaccagaagcctttcgcggagaaaaggctgacatgcccgtcctatatgacaggtattatttctgctatcattgtacgtgtgcatttagcccacacattgcggtgggtgttcctaagatacttggagtacttttcagcaacacagtttacacttaatgcttgttatatttgtagttgacaaaacaattctatggatatcctaaattaggtatgcagctatcagttgagttgccttaaatcttactcagttgttcaacgagttgtaaactgacctttacagcccttgggaccaaattaaggtaacaacgactggtttttaaaaaatacattactgtgaacctgagggcatcatgttgtaaggagatgggggctgcggtgactcgcgggatcaggaatttcaagagaaccgagcggaaagggaaatccgcaacatgaagccctctctcgctcccaggcacccctctaccagcagcctcctgccagagcagattagtctctatccagaaattaagggagagattgctcgtaaagatgacaagctgctgtcatttctaaaatatgtgtgtgttgattccaaagatcctgtgtcttccgtgcagctgaaagctgctgaaacacgtcaggagccaaagaaattcagattgccgaaaggccatcactttgatatgataaatattaagagcattcccaaaggcaaaatttccactgtagaagcattgacacttttcaataatcataaactttatccagaaacatgaactgctgagaaaatagcgcaagaatatcatttagaacagaaagatgtgaattcccttcttaaatattttgttacttttgaagtcaaaatcttccctcctgaagacaagaaagcaatacaatcaaaatgaagaaaatcacaaaaatttcctatgtgtactcctcatccctcatcctgtatattttcttatttttgcatattaaattatgttaattaccaagtgtttaatgctctcattgtgagagcatcctcttaatatttattgagctccctgaattttcaagattgccatagactgtattttgttttcttttaatttggtttaggcatatttcatatgtacatgttagcatgactaatcagcacatctgtacctttattataagtaaaagagttaatttgttattttagacacatcataccaacttttaaattggtcatatgaccccttgggaagtgtcctgaatccctcatttaagttttcctatccaatttaggtgtttagttcattcttcatatgtgatagtgaaagtaaaagctttcctgactcttaagactgacattttcttgctagggaaagagactcgatagtaaggtagactaacagtatttcccaaataaaggcacataggagaaaataaagaatcaataaaatctaattaaaattactaccccagggaataagaagtattgaggatttattttattttgaattggttttaagtatggaataattgtctttacagttataaaaagtaattagtggtgtttacgaaatgttgggaatttctgctttgacaaatagttaagtcccatggccttcagagagagaggcagtagtagaaactttcgaaaaagtaacatttctctggatttaacatggaactagaaaaatttaaagaataattaaaaaaccatggtaaatgaaatttggtgat

SEQ ID NO: 1241951 - DNA, 4001 bp, Homo sapiens
agctgcgcactcacgcctcccagcctttgatcacactgttgcttccatctggctgcctttccccttttcctgtttactcaaatcttttcacacatctggactcagctcaagtgccacttgaactgggagccttctgtgattttcccaaattaattcatttttttgctccttttccatagcacatgatttacatgtaatacaacatgtgtaatatatgcaacgctcaacccatgtttctcacactggagggtcacctcctactagtaggttatgaaatcaaagtggtaggctgctaccagtatttaaaaaaaatgaagcagagtagaaaagactagaaaatagagtgcatatcatgacctttggttttgttttgtatatataacatgtatttgtgtgtgtgtgtgtgtatgcatgtgtgtgtattgggtcacaacaaaatgatttttctcactagcaactatagcaaaaaagtctgaaagccacagcactaactgggttcctggagggcaggtactgactctgttcaactctgtccccagcacttagtaggaagcttgggacatagtagatgctcaataaatatttactgaagtgaattgaaaaatctagtaatccagaatggcatgttactagggcattccagtagcctaagattcaaatgcaaacccccacattcagccacaatctctaagggccccattcaggcacagggctcacccactgggacgacaaccacccactggggatttcaagttgaggttgttagaagtgagtggaagagcatagtatggcttagtccctgcttacccaggactccctcttaagactccactttcatcttctataaaatgagagtgatgatgccagcattgcccacccaaaagggagagaacacagcaaggaaagacctagagtttatctggtcctactattcacactgagtttgctgagaatgaacatgtgcatacacacacacacccaaccacacatatatagtcacagacacacacatacacacacgcacactacccttcattttataggtgggaatgtggaggtccagtatgggcaagtgacctgctcaaggtcacacagctggtgagtagcacaactgggactagaaccaagtcctttggttcccagactaccagtgaagggaggacaaaggatacattaaacagaaaagtgcttgaaaaacacagaagagtgaaaagtggtgtgagcctagctccaagatctgcagagacaagaggccacaggccacagtggctgatgcacctgtctcctcctcattgcctctggcttcccacccatccccagcccccactccccacagccaccagtgtcaggatatgactcatcccattccctggagcccacgaaagccaatgttgttggaaagcacgggcttgaaggctgacagacctggctctgtctcagtcccaacaacacctggaccatttttttgacccctcagagccctgcttcctcatctggtaaccagggttactactctccatatacctggttcttgggaaaattcaatgagacaaggcaagttaaatacctagtgtttgtaaactttagttccttcctttcccttcttcctttgaaaccctttgttttatcctcaggcatgtcttccaaataaaacaaaactccaattctgcaaggcttctcagatccatgcagttggaattaatctggctgtgtgtgtttggttccagaaccaaatccagtttggcacactgtgccatcctctgcacacacctgtctgtctcccccatgagaccacgtgcacccaagaggcaagacccagctctcggggcccttgataacgctagccctcgcccatgggagatctcgcagatgacatgggattgcctgcttgcgctggggcccacgcgctgacacagccgtactcaccgcttgtcagaatcattcgaccgcggcctggaagacttgcacaatggcccacggcacccagcaggcggtttgaatctggatccagggcagctgcctgcttttaagggagtggagcatggcagtaaagccagcaggccgggcagcaagagaccttggtgggggctgggtgaccttgagcaagaccttccccttctgttggagtcatagtaaagttccaaaatctataaataagactaaaaataatgctaaatacttttctgagaagaaactaggatgaccagagagctttttaaagctatacatttcctgcccaagattcttaaccctttttcccccgaataagtgcatctgaggtgatggggaagaggcaggggtattattatgagaaggctccagtgataattctgattagccatatccccgacagcaacccaattatgcccatcattatactgtttactacaaaagcacaggccgtagagtcagtccttgggcaattacttaaccagtctgagctgggttcttccatcacagaacagagaaaaggcttcatgttggacagggttgctgggaggagggagcgagccgctgcatgtaaaccacccagcaggtctggcgcacagtaggtgttctataaacggcagcctcctccaccctgctcatctgggcaaagtttatgtctctatcaagcagtaagcatctaggaaggaaggctatgatcttctttcttgtctcagtcctttcaggcttctgtagcaaaataccataaactgagtggcttatgaacaacataaatttatttctcatggctctggaggttgggaagtccaagaccagggcactgacggatttggtgtctggtgatggcccactttctgattcactgatgggccttctagctgcatcctcacatggtggaagacacaagggcctctcaggggtctcttttataagtgaactaatcccattcatgaggccttaatcttcatgatttatcataaaggtgactggttaatgaccaatcaccccaagggctccacctcttaataactttaggggttaagatttcaacatggattttggaagaacacaaacatttttcaaccatagcacttctgcttctcatctaagcctaagccacagccaatggctcaggaatggaaacatcacaaatatttgaaaacccttttgcatctcacaaacatccactgtgtgattgccctacaccaggccccccgggttacacagagaggagcaagacctggcagcacccctcaagagtcctggtccagggaaaatgactgattctctgtccactttgattagaaaggatgacattagtcctgtctcatgggtgccctagggaattactaactaactggggtcacggttagtcagagagacccagttaatgaccaagcagtgcatcctgagccggcctaggagccctgggaggtggaggatcatttctctggctgtcctgaacctgaactaagccattactcctgcttcagccaggaaagcctgctgtggcacccacaatgccctcacctctctcctctcagaggcagcattgagaagcccagctcctgtacacagcatccccaccatcccaccctctcacatcccagtgcctggtaaacaggactctgtggggagcaagcccccaccccacccgacttccacacacaggagctttgtcccagctgctgctgcataatacatgggcgcaggcccggaccagcctcgggaccatcttggacaacaggcccgtcactaagaggctgtgaggggcacagtcaggacacaaagcgctccagtcagagctgagaggagcggataaagggcccgctgcagccctggaaccagcccctcccccagcacacaaggcaggaacggaaaggaagccgcttccccagagggctcccgggagtcctgaaatcctcccaggcactttccagcacagcctccagacacatccttgaccgtgagggctccggggctttcctctcatgaccctctaaagtcattcaggagctctccttgtcttagtccccatgtcttttctttaaaat

SEQ ID NO: 1241952 - DNA, 4001 bp, Homo sapiens
ggataaccgggatcccgtgttcagagtgcctggcctggcccctggcccacagaccaagacgttgctccctgtcacctggcaatgcagaaaaagatggactgataaactgtccccaggggaatgtggtaactggtgatgggccttccccttcccaagagataatctatctacattacagccaggggatggcatggaagagaaggacgatctgccggctccgttgtagtatctctgttagagtaaaaggaagcccatctctcagtgccccaaatgtgagaaaggagaagttgaagttctttatattgctgctaatcattttgggtataaaaaaggatagtaaatcaacttgcccataaagaaatagataccaggcctcatgcacagagcttacttggagataaattctttgcactgtccaccctgtgctgtccccaaggagtgagtgtgtgtgtgtgtgtgtgtgtgtgtgtgtgtatgttggagtaaccatttcctcttggactttggaaacaattcaaggggcctcaccagctgagggtctagaaactagagcagaaactttttttttaaattaaacttaatggtactgaggaaatcaatgggtttttgtttgaaaacatccgtgataactgtctcatgatgttctccacctctcactccctgccttgtaaaaagaatccagtagttaatttaggacccagcaaggaaagaggagtcttgctgggatctgtggccaacagttcccctacaatgccctctgttcccccagttcacaagggaggccgcctcattctaggtggtcatgtagcattctgcatgactgtccagcacacagctctgctccatagaagtgacccacactcaatggtgacagctaaaccaaccagctcctccccttgaagggtttaaatgtgggctacattgcaccactagttggtggcagaggcagaagccataagcggagggaagagagatggagaagaggtcagagaggaatgtaaaggggatcactgtaattttaaaaataatgttagtgcactgttctgcatttactaggtgtaaccttcctgctctcccctaactcacatccatttattggccgggtgtggtggctcacgcctgtaatcccagcacttagggggaccaaggcgggcagatcacttgaggtcaggagtttgagaccagcctgaccaacgtggcaaaaccccatctctactaaaaatacaaaaaattagccaagcgtgctagcgcgcacctatagtcccagctactcaggaggctgaggtacgagaatcacttaaaccagggaggtggaggatgcagtgagccaagatagcaccactgcactccagcctggatgacagagcaagactctgtctccaaaaaaacacaaaaattaaaaaataaacaaatgacatccattatccagggagagttcggactgttaaagcaggactcaaaaaaattcacattccaacatccaagataggattctgcagccacaaaatatcttaagagccagaattgttgagagaggacgtttctcaacttctgtctctccgtgttagcaaatgaagagtcctgtctggctgactccatcacaactctactggaccgagctgaatgcgttttatcactgctacctaccaggtggggctcctggatgacaccagacaagcttcagaggaaacaaacttgtatcttctttgcacatccaagttgtcagggctgccagctaagaccatgaaggctgtaccctgcacagatgggccgtgtggatgaatagcgcccaaggagttatgccacatgggggccacgggtgcaggaggcactcacatcaccatcccagagaccccgctgcagcagtcaagataacgggaatctgactaccttctagctccgaaattccaggcatctgagaggcctgggagcctgggaggcctggctgctagtcaccctctagccctgcctccctcattactaaaggtcaacagaatctgttgctagcaaccaagagagagcccactccagcgatgctgagggatggcatgtggccctccctggtggccatctggggccattccagcagcctatttacactgactgcgaggagcacctcctcctggcagctcaggaggggctgtctttgtgcaggtgtcagcaccttctctggtgtagctactgatgtcaagaggtaaacgaattggccccacggggtctctgaccatcccatccccagggacctaccctcccctgaacacctgcagcatttcctggctgccaccctgccccctggcacctggtgtgtacttcagggttggttggttctctttacacgtgttgagattaacttctcccggaggctgtaagctgggccctggtgtcagctctgagagctggaatgcacaggaagtctaaaggttgccgacttcctggctgagattctggaagaagagaggacactgttccaaagtgggccaaacagaggatggcttcacagacagacacaggtttaaatcctagcgccaccacttactaggtatctactggacaagttcattaactttttggagcttgtgttctcatctgtaaaatgttacaaaatgtataacaagccctagacaagttcataaactttttggagctcgagttctcatctataaaaatgggggcaacactgcctccttctcaggacagtctccaccctcttggtcttcctcacaatgccctatacatggagaccatccataacccactgacgggcaagtggctggcctttgggggacatggggagtcaagcaccactgcagaacccggccatccaggtgttccctgggagcactgggacaagctcctggagaagggaggcaggcagatctgctgactggactcgtacctgccattcccagcaccccctacccccaaccgccctgcaccaccacgggaacacccctcacccttgggagagggtccaagacccagttctggcaagtgagacctaggaggaagtccactagggggcttctgagaaggatttttgtctcagtaagaggagagagacataagaaaagttctttcttggcatactggcacacacacggcttcccgcctttgcttccatttgaggatgtaaatcctggcgctctggcacccattttgtggccaagaggtaacaagcctacaaccaaaaggccaaaatgatgagaagacagaccacaaggacagaagaggcctgggtccttgatggcactgtggagccaccgaccaaacctaggacctccttcctccgcaactcttgtttgaaaaaccatgaaaatcctagagcttgagtcagtcttggttggctttctttgttactcgcagcctaaagcattccaactgatggaaataaagaagaaaaggaacagggtagtagatctctgagtctttgaacactgcctgtgacctgtccccatgaggtctttctgcccccacagcaaagaactttgctattttaaggaggcccagagaccacagagccccacccaagcctagcaggcctgcccctgccaggaacaaaaaaaaaacatttcatttcgaggttttctctcatccctcagcaccgttccttggggtgtgctgatgcggctgcccgtgcctgccatgcagttgccggaaaagttgcacagctcaggggatgataacaatgaccacttgggtcgagggagcgatagtcaagttcatgctgcccgttgcacacgaccaccccacacagcatcccctgggtccagcaacactgctgagccttgaaaggagattttttccctctttttctttctttattcaactgaatgctgtcattgctacagaagccacgaggaagaggggtggagaggaaaacgaggtaatggatgcagaacatctggcacggtgcctggtgggcactgagcaaacaccagcaccctcccttttcccttccaacataatggcaatgctgggtgacagaacatggcatcaggcaa

SEQ ID NO: 1241953 - DNA, 4001 bp, Homo sapiens
tacatgctgtgtgacctcaggcaagtcatttcacctctctgagcctcagttccttccactgttaaagagaactgaacacaccttccttgcaggcctccagggaaggaaggctgcatgagctcgcgcacaaaaagagacacaggggaggcgctgagttaatcctcagcgctattattaaaacctcacaccctttctctctctagccgggcccatccattactcctctgtcccagcctgcttgcatctttgacattaataaccttaatatccctcccagctgaatagcatttgcatcatttcaaaaccctaagcatcttaccccaggtgggccacaacagccctgccagaagtagccagagctgaggaagcccctgcaccctcaagttcatcttctcacaatgctcccaagtcccagaaccagggccaatggcaaagtttggagttgggcccaagaatccgcacaaacattcagtcttggggcagacctcaggagggcaagggtaggccctggcttaccagaaggagccaaaaccaccccacctccatcacttgcaccccaaccctccatctggccccactgctctgaccctccatctgaccccactctgggctgccggtcccactttggcctccagctccccaattctgggacccagctgggcagctggaaagggtggagtctggcccttgaatggacggccaagcccgaggccaccgccagactgtgagctcagtacccagacagatctctctgaagagtgtgggttcacacccttgatgttattggttctttaacagcctgtcacaacccaggacccatattatcaccctcacagcacacaagaagaaactgaggcccaaagtggacccctccccgaccaaggtcatccaggggatctgggatagagctgggattgaactcaggtctccctggtcccttgaccctggcactttccactgccccatcatctttcctcttaactctttcctccctacaactaggaagcccctgaagtctctccaataaacgtgggcccctatgacaaggcccaacaatcatcctccaatatgggggctgccaagatgcccacctttgcttcccctgtcacattccctccccacatcttcaagccaaccacctggacctgccctgtctctggtagcggctcccgggactgggcagcgccttctgcacagagtggctttggagtggagccagcgctcccggcatgggcggcagaggctggcaggtggggtggggtttcccctccgctggcctcctcggggcggcaggcccatccccacacccactgctcagcaccagcccctgccagcgacgcttcccgccgcgcactccctggagggacaccgctagccgcccagcccagctctccaggggttaaaaatgcagcatcccaaacaagggttaaaaatgcagtcccggggttgggccgggcgcggagggatgttggccaaaccgccggggctgccagagcggcatcctccccctggcctccgcagtccttgggggccggagtgactcgagcggatccggcagcaagagaggcgcgcgccgcaccttcccggcaccggcgccccctccccacacccacacccccgcgccccccgcagcctagcccgggggatgcaggcgccggcgggtcccgggcgcggcgggcgagcggcgcttacctttgtgacagtcatgcagaaactccgcggcggagcgggggcgcgggcgcggcgtgcgggggcggcggcggcggcccggggcggcggcggaagggggtccggcagctcccggctcgctccccgcgccccgccggcggctcggccgagcctgggggctgcgctccgggcgggcagcgcgcagggaccgctcgtcggcgctcgcccgccgctcgtcgctgatgtcagccccgaatgtgcatttataatagatgagcctccttcgccgcaggaaggcgaggcaggaagaaagggagagagggagagggcccgggctggggggcggggggaggaagaggggccgggaactcgctacaaaggaggaggcggagggaggaggaggaggaagcgcagcccgccagcggccgtgccccgagcctcccgctcgatcgccggccgccgggcaccgctgctcccggagtccggacgggcgcccgggtccgcggccttaaccccttcgggcctgcggacgccacgcggctgggcgaggctggctcccggcacctgccggctgggagaacgggcggcgccccgggctctcgggtgtcccgctggcccggggacgctggtgaagtcacaggctggacggccgaggcgctgcgcgggcaaagaaggcggtcgggttcgccccctggaggctcgcaaagtcggcccgtgggccgtgagtgtggcgcggcgggctgggaggggcgtggcagccgcaagcccgggagccctgcccgcacccccacctcgcgctggcccggggcacagggtggccagacggatttgtgtaagcactctttcgaatctaattcccgccgcgatgacttgcccgaaggccgccttagtgagttttgcagaggaggaaactgacgatcagagtgggacggacgtgggaagtgacttagaccacagcacaggacctgcctgcccgagccgttcctcccgctctttccactcggccgctagctccctaaggaacctcttgttatagaagctgccctgccctaggactgtctacactaccactgagtgccgctctactggtggagtgataacacaggtgcgtcctgtgtgttgatccaatcctgactcggggcacagtgtgtcctggagctgctgcggagatttgagggacagtcacctgaaggtgacctcgcaagtcttgagaaaggagtctccctcccaagcacctgagcagaaccggtttccgcagatacagaaccgcggagagggtggaggggaggagttagcagaggtggaagcagaggggttctccaagcaggacagcctggcaagcccggaagtgctggcttcctgctccacggtaattaccggtgcaattcacctggacagcgaaggcaacgtcatatatgagcacctgctctgtggaaagtgctgggggaacagagaggagatgggatgcctgccttccgggagaccagtgtctagattggagcaataataatagagtaaccagcctccaggaagtgctttgtgggtcattgtgcaattttttttttttttttttttttgagaccggagtagtctcactctgtcgcccaggctggagtgcagtggcgcgatctcggctcactgcaacctccgcctcctggattcaagcgattcttctgcctcagccccccgaggatctgggactacaggaacgcgctaccacgcccggctaattttttatttttattagagacggggtttcaccgtattggccaggctggtctcgaactcctgacctcgtgatccacccgcctcggcctcccaaagtgctgggattacagacatgagcaaccgcccccggccctgccatttttaaccacattttcttgggagtcctaaatgcaacagtgtgaggaaagaattaccgtccccattttgctgatgagtaaacggatttagagaagggaagggaattgcccaagagcacacagtgacagagcgaggacttgaatgaaagtcttcttaaatcaagctcagcattgtgctttgaatccgtgaactgcagggtccattcctacttgctgccttatttgagtttcacaggtgtcttaggacataggtaggcagctattcgttccccaggggagttccagggacttactaaatctcttgggtagcagatgtgctgcagacctcaggcgtctcctctgtgcaaaacccttcctaaggcatcttcccacgttgcttgcctgccaggaatgctctcttattcttctgcactaactcaaacgcatcccacctctcacggcaccacctccttgccacctctcctgaca

SEQ ID NO: 1241954 - DNA, 4001 bp, Homo sapiens
gtggcaggtgcctgtaaccccagctactccggaggctgaggcaggagaatcgcttgagccaagaccgtgctattgcactccagcctgggcaacaagaacgaaactctgtctcaagaaaaaacaaaacaaaacaaaacaaaacaaaaacaaacaaacaaacaaaaaaaaacaaggagtcagtttcccaagatggactttggtttccttttctataaaataaaatggcttccacgatctctaaagtacactctaggttggctgcagtggctcatgcctataatcccaaactttgggaggctgaggtgggaggatcacctgagcccaggagttcaagcccagcctgggcaacatagggacactccgtctctaatttaaaaataaataaataaacaaaaataaagtaccctccagccttatggttctacgacaaatgataaaagtctaaaatgaatgaagcaaaacatattcttttttttttttttttttttttgagacggagtctcgctctgtcggccaggctggagtgcaatggcgcgatttcggctcactgcaacctccgcctctcaggttcaagcgattcttgtgcttcagcctcccgagtagctgggattacaggcgcccaccaccacacccagctaaattttttgtatttttagtacagacagggtttcaccatgttggccaggctggtcttgaactcctgacctcaggtgatccgcccgcctcggcctaccaaagtgctgggattacaggcatgagccaccgcgcccggctgagttctttttttaatttttaacttcagcataccctgaaacgagtttctgagttcttatgtttaaatacgcatgcatagttgccagtgatgcaggttcaaaaataaaatataatatgcatgcatagaagctaaatttcacggaccaagatcgaagtgcaattactgtaattattctatggtggtggactcaaaacctcccagcacacatataaagggaaggaaaatagacaaaaatcagaagcacgtctcatactccagcaatcaggcttctattacaaaggggaaaaaacacgaagcgttcctatgcttgtaaaacccagtattcctgtgtctgtgacattcagttttcaaaagagtgatatttttatcataagccctatcaaaactctggctatcttccggagatcaggaaacaaccacacacttccatctattttaaacgtggaagaattagaacgtggcacagcagaccctaaaaatgatggaaaaggctgtgaaggtgacacactaatcgctaaccgagaaatgcctgattgaaaagtataatcgtgtgtcccatacggaagtatattgtgtcctcggaccccaagcggcgtgcccggaggctcaatgtcaccttcgccgaggcgctgcaggccggcggcggccactctcggtcaggtggccgcagggtcggcgctggggcagggtcatggcccgggaaccgaaggggagcgctgcgtcccctcctcggcgcccacagcaggtccacatctgacctgtccgcggtggcacagccaggaagttgcgcggggggaggccccgggggcgcgctttcaggtcctccactactcgaggcggcgggcagggcggcccgcggtcaccgggttcagtaaccagggtagggcaagggctaggccggggagagcccgccccggagtggcagcggggacccaggtcaccgcaaggacacgagggcgcgggcagtggcaagcaggggccttacccacggcggggccgggggtccgggcggagtgcaggaggcctcgagggtcggcccgggtggttgcggccacagcgcagcggcggagagcggcgcccagcatgacggcgatggcggcgcgcgggctgaggacagagagaagccggtgtaagctcgcgggttgctccggagcgggcgggggccggacaggctcacagcgggcggagcacgtaggcccgcccactgcgactctggcgcgtgggcgggaggagccaccgcgcggccggcggcggcgggggctacggcggcgcgctgaggacaaactgttagcctcgcgtcccgccttgtctctggtcaggtgacgtgcagctgccatcctgtaagtaggaatggaggcgagggaggagcaaccgaccgtgatcttgttcgagtcaggcccaggagggcacttaatcacctcaaaataggaatgacagcaataacaacaaactataataaaaaatacgtactttgcgcccgggcgctgtggctcatgcctgtaatcccagcacttttgggaggccgaggcgggcggatcacctgcggtcgggagttcaagaccagcctgggcaacatggaggaacccccgtctctactaaaaatacaaaattagccaggcgtggtggcgcaacgcatgcccgcaatcccagctactcgggaggctgaggcaggagaatcgcttgaacccaggaggaggaggttgcggtgagccgagatggtgccattgcactccagcctgggcaacaagagcgaaactccgtctcaaaaaaaccaaacaaaacaaaaacctactttgcttagccccgccttctcattgtggcataaaataaaacagcgaatgggggaaagaatgccgctggacgcggttgctcacgcctgtaatcctagcactttgggagcccaaggcgggcggatcacctgaggtcgggagttcgagaccagcctgaccaacatggagaaacccctgtctctactaaaaatgcaaaattagccaggtgtggtggcgcatgcctgtaatcccagctatttgggaggctgaggcaggagaattgctggaacccaggaggcagaggttgcagtgagttgagatcgcaccattgcactccagcctgggcaacaagatcaaaactccatctcaaaaaaaaaaaaggcctatgcgtaagggattttattagtacatattcttatatcacaaaccagcttgcataaaaaatgagttaaactacttcatttcacagattaggaaagaggctcagaaattaggttgctgctggcagtcaaggatcttttcgccacatccccagttctgaggactctcacctgaatgtttcccatctcctacaggagggctcctgaatccacgatggctctgaaatagggttgatcaagttccacagttgttgcatcttatctcactagctacatcctaactttgagcccctgggcagtcaaggacacctctcccaggcctgaagtatctggatgctgcccagagttaatgagacattgtattctgtcttgctgtctcccattctctatccctgggcacactgaggaaagaaaaggtggccattcatgtgccacttcctcacttcaggccgactctccagggcctcagcatctgcccttctctttttcctccctagcagtgtggcttcagtgggtaggaacctggcggggaaaaggatttttaaaatgttttcaaagcacctgccctcaccgtttcccaccaacctagtgctggggcttagaaaacaataccacaaagtgaaggcctatgaagcagtttctctctgaccttctgccctcttgtctcttgccccttactctccctccaggcatgccacagaaactagaatccctcctccccaagagggggtctagaaagtagaacccctttgtcccaaagccagccataaagcctaaaaatattgctctaacctttctctttgcctttctatgtaacagctggccataaagaaattaaggccgagcacggtggttcacgcctgtaatcctagcactttgagccgccaaggccaggagatcacttgaggtcaggagtttgagaccagcctggccaacatggtgaaaccccatctctattaaaattactaacattagccagaaatcacttgaacccaggaggtggaggttgcggtgaggcgagatcacaccactgcactccagcctgggtgacagagctagactccgtctcaaaaataa

SEQ ID NO: 1241955 - DNA, 4001 bp, Homo sapiens
gcccatctcctgtgtgagttcttctatcttttgctcagatacggtggaagtgaggacaggggaggctggcttcataggcccccaaggttggcgtcaagaacacacaaaacaaagtaccgtggtctccaggcatagaataccaaacagtgataccatacttccttgcccaggggaacagggtagttgctgacctttctggaaaaacctgagtcagcagaaggccagtacttcaagaaaccctatcttaacccagagatagttacttaaggtaaagctctccccatccacatccacataaaacaatttcaatacccctctcctaaatggggttttaccaaaacaactgggcattaaaatgcctaacagacacaacgggcccaggctctgcaaagcattctaaaaaaagacctgcgccaaacagggtggaggccacagaaatcaacaagacagtaccttgctgccatggctgccggttcctggaccagggagggaagggaaggacagcagacttggtgtttcccactgtcagtaccaacagcgaatggctgtaccaccccctcccccccgccccttaccaccttttcattttcctagagtatctgctgccaatacctctttattataatttacataaagcaaaatatgtagcttgtaagtatacctgtagtgtttaagttcacatttcttcctgaatactccaagacttgtatttaggcaaccctcctccttgtaccacaagagggaaataaacaggtaacagaaggtataagcagaagcaatttaagggggggctgccaagaagtccctttagtttgtccccactgaaccctaccaagaagacaagggatcctaaaggggagtggctcttcttttatccagctggtcactctcaacacaaagggaaaaaaaaaaaagattctatagctgggagttaccccaccccactcaccctgcctacccctttccaggatcaatgctctgaaccctatgttaagtcaattccaaatatctcagtgcattatccagcctcatctgaggttaaaatccttcccttgccatgattcagagaccactcactcttcatataactccctggtttttaaaaccactgagtaattctggtcatccagtaatcaaccccttaactcccctcccccacctaaaagtgttttgcttcatcatctccaagacaggcctgggcaccagggggttagctggatcttttctgcacaaggccaccacgccttggggaccctcctcagggccactccaggtgcagactaacaactccagggaatttatcagggtaagtggaagagccatgcctgcctttacgtggagccatctgtcctgccacactcacagcttgcatttccatctcttgcaaaacagctccatgttgtatgtgtgtatggtggggagtgatgcaaaggggaacagaacaactgttgctgtggatatcttcgttcaccacccccatgcatccccttaccccagccaactcattctctggcactcacccgagtgtgtgctgctctgggctgaggaatctgagtcctgggtgctccagggtcggtcccagcctgtcagactgagggactgcaggccaaggcacaagtcatttgcatctgggaggccacgggaagattcttgcgcagaggttgggaaaagcatcctgcttgtaactgtttcttcagagtcctggaagtctgttttggaaaggagcacagcagaaacctcagagttaagggctgttttccccaatattatcaacagtaaatattattaataatagtttccccaggctcacaggccagacatccaagctggctggatgctgcagccgctgcctctgcacttttggggacgctggggcaagagcagttgccatacaggccccctcccctcacacacacacccctatcccgtctgcattacagactgggccagcatgtgatcaggctgctgatgcttcccgctgccagtgacatcagccggctgagccgtgcaatagagagcggcatcatccctcacagaacgggggaggagcaggaggggacgacagggaggagacttgcctcccagggaaagacagcacaacagctacttggaatagtcccggtgcagtgccgttaagtctgggttgcaaggcagcgccctccggtctccagcaatggtggccaagcagccctcacgcacgactgaagtcctctccgccgacagcagagccaaagcagccgactgcctgctcgtgtggctctgccctcctgcccctccctttccctccccctgctctccacccccaaacccaaaaacactctagtcctggactctctccagctgctggctcaagccctggctttgcagcccaatgcaaagcttcacagtcctgctagcaaaaatctgtgctccaagtggcccctgagcagcaccctgacacagcagtgtttaccactgaggaacaagataaccttcagaaaaatactgtacacttggaccctggggaacaacacctggtgttccaggcttgtctagagcagcttatcacagagaaagggggtaagcgttggcagagtgggggagagtcactgggctgttccaggtacacctcaaaggacatggcccacaacccacatgccagagtgagacctgccctgactaggataatccctgtgcccaggttccctcatcccaacaagatgggtattagtcatgaacagatacagcggctcagctcctcccctccctcctgcaactgtaggcacagactgaggaaacactctcgaagcagcatctgacaaaccaagagaaacagtctctgaagtatcgttacgccctattagaaacaccaaactctgaaacctaatcacctagctctgtcaatattgcttctcttgcccttccaggagccctgagcatgatacagggcagccgtgagggccactgatgcctctaacatccaggccctctctcagaggtgctgcacaagaccaatgcttatttctgtggccactcacagctccagcaacaaagactaagaaaattcagcttctggagcttccgccatttcctctttgccatctcctcccacatcggtccttttccaacatgagcccagggtcactgggcttcttcctcataaaggagggtagggcaacaggcccagactcaccaggcaggctgctcaaacctggactcagctggtagcactccacctgcttgttctcccctgttgcaaggagaagcaagcagatacgggaagcatgcccacctgggacctcccatggcagggtcgagagaataatgctgccacagaaatagctgttcagaacttcctgcagtacaccctgtgtccacaggcactcaggcatagcctagaagggaaaattatcagtctccttcctttggagatttttttttttttttaaagctttgctgctgtgtcatccatccacgttattcctcctggctgtagatattctgcttgctccctatctgtgtttgtcaaagccttgttcatcatggcaaaggcctagcaaaaatcacccatactggtgctgcccctacccctgactactcccctcctgcttctctatgttcacccttccctcaagctaaggatatactttagacttcacccatacatattagttaccaaaacacaatgcttccttcaaaaacatccatatttaagtatctattctcccctacaccaaatatctatataatccccataccccaatctgagggcatctatgtctagaagcagccattttctacccattaaaatcagggtgactgtgcatatgattacccccatccctcacgaggagagaatcaactatgctcttgctactcaaaatacagtgtggcagaccagcaatatgagcatcaccaggagcttgttataaatactgagtctcaggccccacccaagaccgacagaattgagatctgcattttaacaagatccccagttaatatatatgtatgcaaaaaaa

SEQ ID NO: 1241956 - DNA, 4001 bp, Homo sapiens
acgcctgtaattccagccctttgggaggccgaggtgggcggatcacgaggtcaggagttcgagaccatcctggctaacatgctgaaaccccatctctactaaaaatacaaaaatcagccgcgcgtggtggcacgagcttgtaatcctagctacacaggaggctgaggcaggagaatcgcttgaacccgggaggcggaggctgcagtgagccaagatcgcgagactgcattccagcctgggtgacagggcaagactccctctcaaaataaataaataaataaataaatattaaaaaataaaaagccaaactcctacagcaacgtgctctgggaatacagttcagctccaagccagctcaatggggacaaataaaagaccagtgatgagtccccaaaacaccgtccccagggttttccgacagccagcagccccattgagctccacaagcttttctaactatgcaaaaaaccaaccaggaaaacaatcaccaacttgaggtttccaaggttgggtcctgtttgaatttatttttattttttaacccagcatgtgtccctagactcaaagggaacatgagcctcagggtgcaaactgtccttagcagacactcttcccgctagcaagggaccgcaccgtcacctgaggggcagccaagaggcgggcggtgcacctgtgccttccagaataggaaccccacccacttgcccctcttccccaccaacgacacagcccagtagttgactcaggtgccaggagagagcgcggggaggctgggcggtagccagggagaccaagggaagcggttgccagagaaatgcggcgtcagtcagggccggggctgcaggcgcggggcgggggaggagagacgcggcctcctcccaggcgggcctggcgggaggcaccccggcttctaagagcgaattcggctcccgactctcttcccccagctgagagcacggtgcaaggggccagggctgcagggagcaaagtgcccccgaaaaataagcgcgcgcccacgaaagcgcccaagagcccaggcgtctgcctggcttttctcggtcacggggtcaacgcggggccgctcacagagccttctggtctccctgggtcctctaggaatgaggcagcaaagcctcggtcgactcgaccgctgaggaacccatgacatgaaaaagcctcggggaatgacgccgggtgggacaccccaaggtgaggacccctttgtgggtgagtccccccacactcaggtgactccaggcgggcacaggcccgcccaaccgctcgtcatcacggggggcgactcgtccagggccccagccgctgctccgccaaacctgaggccgcccctgagtctgggcacctggcctcgtccggcactgaggagaatgaccagaacgccaggccacatgcacccactcgccaggctgagggtccgaacagcacagcccagagtgggctcgggtcgctccccgcctacgccacctccgcggcctgcaagcctaaccctctcccgcccatgaccaggacccacctcaatgccgccagcccggcgggtctcccgggcacgaagccccgccagtcttccgccctcgcgccacactacctggccagccccgcccccgagactccctctccggcgccaagcgaaggtgtgaagccacgtgacctgcccaggattgggaagccgcacgaggggcttgagccctccaccttaaaggtgccgcgaccgccgccgtcgtggggctctccacagagcacggggtctacgccgtcagcagccccgccccgtcccgcccgggcgcccccaccgcgcgccgggtgctaaagagacccgcagggggcgtgagcttccagcgccagcggcttcgggtctcccgtgcgacggcagtgtgagaaagaaacgttccgggcgccggtgctcctttatgtccggtcagctcccgtctggacagacgctcgaggccgcctggaggccgcagtgcggctcggaggccccaccggccgcccccgcagggctgcggcgcctttaagcccaaaggccctgagtcacgaggaggctccctgcccccctcgccctccacccctccacgaggccccacgcccgcgggcacgtgaccgcgccccgcccgggactcgcccgcacggggcgggggatgggggtaccgcggcgccggacccggctgcgcgcggaccgttagctactgcggccgggacgcggccccgcccaggcgagcggcgggtggctcttaccagcgggaacgccatggggccggtgtggccctgcggggctgacgggctgaccggccagccggcgggcgagagacgcgcacgcacgtgggcactatttttgcagcgggccgcgcgcagccccgcaccccggcagcttatgaagctcctacgagccgctcctcggagccgccccccggccggatgcggagcacctgtgtcggccccgcccgggccctcgcctccgccccctcgcgccccgcccctcctagcaggccgagccgaggagggctccgccgcccacccggaacccggcggggactgccgccgctgctagccacagctgccccctggggggccagagacctaagcctgagcgcgccatcacctaagtgacccttgccgagtcactgtctgccctgggcctcagtttccctcttaacgaaagagggcacgatttacaagcccctgcgagcggcggcgatcgcttcgtcagtagagcctcgtgtccgcgctccttctcttccagtgatctctccagggcgagagcctgccctggcatccttggtcggaactgtagcccctgggctccaggaggcgcactcactttagaccctctgctccgtgcgctgcagagggggccgcgagagtcaggaagttccagaaagttccaaagacatcactggtcctctttggaccggagttctccggagaaaccgcttccggcgctcctgacacactgagatagaaagtttcacagaaatagggcaagggatagggcgagggctccagggcaggcgtcctagggcacctggcgcaggggcggaccggaaaccccaggcaaacgcagagtcggagatggcattccaggcggaagatcaagcaaaggcagagagggaggacggcaccgagcggctccctctgaccaggactgaggatgatgcgacctgataccgccggagggaagcctgggcccggtttgtaaggggcctttattctgcagacagcaggaaaactattagagaattgtaaaaggggttggcagttgtcgggtctgttttaaggtgttgctggagacatagaagaggttggacagaaaagggggaaaacaagggactggagtggggaggaaagggaccagagtttattgaacattgctaagtgttttacatgtgtcatgttatcatgatactatttaataagcactaactatgctccggtcctctcctggcacttaggaaggatggtgctgccgtcttcctgggcttgatctaatggctaaggggagagggacaggtaactgtcagtttctgcctgaggtgatggagaaagaggaagctgatattatagtctagtgtttcagaaggattaaggggggaagggtggtgagcataagagtagaagtccacgagggggtgagtgacagtgggagttggccagtctccatccacttggtctacttacaggagcttctttgggttgctgaggtcatgggcagaaagggtgatgactacagggacaaggcaggagcaacttcgctgggacccctacctcttgagccatgctttctccaggagtagcctacttgagtcttgtcctggcccacaagcagcgtaggatggctgcttctgatagggtggcacacccagatgcctacagcacaggagccaagtgagggtgggcgacagcactgaaggcccaaggcacacccaaaagggctgttagctggtgggcaccatgtagaaacgaggtcccagcccagtcatctttcaaga

SEQ ID NO: 1241957 - DNA, 4001 bp, Homo sapiens
tttccgacagccagcagccccattgagctccacaagcttttctaactatgcaaaaaaccaaccaggaaaacaatcaccaacttgaggtttccaaggttgggtcctgtttgaatttatttttattttttaacccagcatgtgtccctagactcaaagggaacatgagcctcagggtgcaaactgtccttagcagacactcttcccgctagcaagggaccgcaccgtcacctgaggggcagccaagaggcgggcggtgcacctgtgccttccagaataggaaccccacccacttgcccctcttccccaccaacgacacagcccagtagttgactcaggtgccaggagagagcgcggggaggctgggcggtagccagggagaccaagggaagcggttgccagagaaatgcggcgtcagtcagggccggggctgcaggcgcggggcgggggaggagagacgcggcctcctcccaggcgggcctggcgggaggcaccccggcttctaagagcgaattcggctcccgactctcttcccccagctgagagcacggtgcaaggggccagggctgcagggagcaaagtgcccccgaaaaataagcgcgcgcccacgaaagcgcccaagagcccaggcgtctgcctggcttttctcggtcacggggtcaacgcggggccgctcacagagccttctggtctccctgggtcctctaggaatgaggcagcaaagcctcggtcgactcgaccgctgaggaacccatgacatgaaaaagcctcggggaatgacgccgggtgggacaccccaaggtgaggacccctttgtgggtgagtccccccacactcaggtgactccaggcgggcacaggcccgcccaaccgctcgtcatcacggggggcgactcgtccagggccccagccgctgctccgccaaacctgaggccgcccctgagtctgggcacctggcctcgtccggcactgaggagaatgaccagaacgccaggccacatgcacccactcgccaggctgagggtccgaacagcacagcccagagtgggctcgggtcgctccccgcctacgccacctccgcggcctgcaagcctaaccctctcccgcccatgaccaggacccacctcaatgccgccagcccggcgggtctcccgggcacgaagccccgccagtcttccgccctcgcgccacactacctggccagccccgcccccgagactccctctccggcgccaagcgaaggtgtgaagccacgtgacctgcccaggattgggaagccgcacgaggggcttgagccctccaccttaaaggtgccgcgaccgccgccgtcgtggggctctccacagagcacggggtctacgccgtcagcagccccgccccgtcccgcccgggcgcccccaccgcgcgccgggtgctaaagagacccgcagggggcgtgagcttccagcgccagcggcttcgggtctcccgtgcgacggcagtgtgagaaagaaacgttccgggcgccggtgctcctttatgtccggtcagctcccgtctggacagacgctcgaggccgcctggaggccgcagtgcggctcggaggccccaccggccgcccccgcagggctgcggcgcctttaagcccaaaggccctgagtcacgaggaggctccctgcccccctcgccctccacccctccacgaggccccacgcccgcgggcacgtgaccgcgccccgcccgggactcgcccgcacggggcgggggatgggggtaccgcggcgccggacccggctgcgcgcggaccgttagctactgcggccgggacgcggccccgcccaggcgagcggcgggtggctcttaccagcgggaacgccatggggccggtgtggccctgcggggctgacgggctgaccggccagccggcgggcgagagacgcgcacgcacgtgggcactatttttgcagcgggccgcgcgcagccccgcaccccggcagcttatgaagctcctacgagccgctcctcggagccgccccccggccggatgcggagcacctgtgtcggccccgcccgggccctcgcctccgccccctcgcgccccgcccctcctagcaggccgagccgaggagggctccgccgcccacccggaacccggcggggactgccgccgctgctagccacagctgccccctggggggccagagacctaagcctgagcgcgccatcacctaagtgacccttgccgagtcactgtctgccctgggcctcagtttccctcttaacgaaagagggcacgatttacaagcccctgcgagcggcggcgatcgcttcgtcagtagagcctcgtgtccgcgctccttctcttccagtgatctctccagggcgagagcctgccctggcatccttggtcggaactgtagcccctgggctccaggaggcgcactcactttagaccctctgctccgtgcgctgcagagggggccgcgagagtcaggaagttccagaaagttccaaagacatcactggtcctctttggaccggagttctccggagaaaccgcttccggcgctcctgacacactgagatagaaagtttcacagaaatagggcaagggatagggcgagggctccagggcaggcgtcctagggcacctggcgcaggggcggaccggaaaccccaggcaaacgcagagtcggagatggcattccaggcggaagatcaagcaaaggcagagagggaggacggcaccgagcggctccctctgaccaggactgaggatgatgcgacctgataccgccggagggaagcctgggcccggtttgtaaggggcctttattctgcagacagcaggaaaactattagagaattgtaaaaggggttggcagttgtcgggtctgttttaaggtgttgctggagacatagaagaggttggacagaaaagggggaaaacaagggactggagtggggaggaaagggaccagagtttattgaacattgctaagtgttttacatgtgtcatgttatcatgatactatttaataagcactaactatgctccggtcctctcctggcacttaggaaggatggtgctgccgtcttcctgggcttgatctaatggctaaggggagagggacaggtaactgtcagtttctgcctgaggtgatggagaaagaggaagctgatattatagtctagtgtttcagaaggattaaggggggaagggtggtgagcataagagtagaagtccacgagggggtgagtgacagtgggagttggccagtctccatccacttggtctacttacaggagcttctttgggttgctgaggtcatgggcagaaagggtgatgactacagggacaaggcaggagcaacttcgctgggacccctacctcttgagccatgctttctccaggagtagcctacttgagtcttgtcctggcccacaagcagcgtaggatggctgcttctgatagggtggcacacccagatgcctacagcacaggagccaagtgagggtgggcgacagcactgaaggcccaaggcacacccaaaagggctgttagctggtgggcaccatgtagaaacgaggtcccagcccagtcatctttcaagaaaagctggaagtacttttttaagtgaaatcttgaatgtgaattttaatgttggttattaattcaaatgaaaagagccaagcccagcatgtccaggggccccatgcagctcaccggctgccagtttgtgatccctgacatcgtttcctcctctctgacccaaaagctgagcaagataagaacctgaaacccagaatagtgcccaagggagcgggtgtctggaggccctgtcatatttcaaaactgtcaaccataagaaaatgaaggcatctttcaagagacttggaacagaaacttctgctgcctaaaatctctctccctaaactttctgttgcaggtaataataatagctcgtcttcactgaccacttactgtgcgcgtgggaaagttttgagtgctttacctatgttatc

SEQ ID NO: 1241958 - DNA, 4001 bp, Homo sapiens
cctggcagcattattgggggttagatgaggacatgaaggtcaagtacttggcacacacagggcttctctcccccaccttaagtaagttctgcccttcagtaggttcagaaacccccagaacactcacctctgcagtcaaatctactgatttctgcctcccctgtgtcttcctctgcccaggcctggcccaggcttggtggggatatggggggtggaggagagaagaggcctagattggctccagaaatacagacctgtcagtctcatgaggactggggtcccctcagcacaaagccctggcccttggtgggcacagatttaactacgagtgagtgaatgaataaaagaacaaatgaatgagaaggaaggatctaaccaaataccctgtgagtctcatagctgagggctgtggtgcccagaatggggcgaaggagtccagaacccagagctcagggtcccagatgtgcctcacagccggggccagcttaccttgggtagccggtatttgtctcggaagtggctccgcagtgtggcccgctctgccttcctctgtgtgaactgtgcatcccgctccatcctgcagggtcaccggaggcagagtcaccacgagggctgagagaagggggttgaggtcttcgagggagggacagaaggggtctctgagtcctagcagctgctgcattggtccctgtgtgtagcaaaagcgctccaacccggacatccaggtttctgctgcctctgcccatcacagtgccctttgtcgtctctgccactggatggaactagggaaccagggtggcagtctgtctggctctctctgcagatcctaattatttgtccctcatggcctccaacttggtctgctgttccctcactgacaagctatgtcatgtggggaaaagtattcaggccaaacttgggttcacatcccagctccactaccattttaggtatatccttaggtaagtcacttaccttcctcttctgtaaaatggggataaaattttgcaactcacaaaactgttatcaggattgagcgaaataatagctatcatttatgagactttatcatgtgccaggtgctgtgctaaacagtttacatgcattggcatttaatcttcataaatatacaaggcatgtattatgattaccatccccactttccagaaaaggaaacagaggcacagaaaggttaagtaacttgcctaaagttatccagctaataggcaaagccaggctctgaacccaagtagcctagcagcagagtccagccccaaactctgtcccagcactgcgggcacacaagtgctcaatgtttgtgagtgcccccatctcagggtctgtctccgcgactctgagcggctgcaccacttttttcagagcctcaagttcagaggagccccagttggaagacataggcggctgggaccagatcggattaagggattatcgtttcgtcagaaacgcacgtgcacccccttcctcgtcccaggctccggtcggtccctcgtccggtcgcccctccccccactcccccttggccggagcatgatgctggagcggggttttgggtgtcagataggatgggtctgggggcagtgtagaggacacctcccggtctcttaccgtgtctaggaaagtaggggagaagggattgggacctgaggctggcccggggatggactgagcagctgtgggggtggggaggggaggtcgttggagccaggaagggatcccactcacttctcttccacgagttgcttctgatactcctcgtactcctcccggctcatgccctgagcttcggctgccgacttgtccccatctcccttatcctcgccgcctcccaggctcccagtgaggttcttcagctggccgcccaccatggtcttcaccatgaacgccatggtcttcgccggccggggcaccgggcgcctgctaccacgcgccaggcaccgggcacgtccgcgcctacttcagcactaggtttcgcggacagctcccgccgcgggcccgcgccccacgcttggcaccgcccgccgcccgcccccgcccgggcccgcccccacctccccaaacccctcctcactgggggcggggggcagcacggggctgagaaggctggaccacgtgcccgctccccactcccgcctcccccacgtgcctccttcaacgccgagctccgctgggcactgctgacagaggattagggcctgcggtggtggggtcgctctcccgggagaggggttgagctcatacactcccggaaccctgttccatagcctcttccaactttctcctctcctgggccactaataactaggatttcagctgggagatccaggtagcagcaaggggtaaaaacccagccttgggtgccccccattctccccacccacccaagtcactgaacccagcagctgcccagagagcttgacgctggaaaagggagggagacctgagggcgcgagcgggaatcccagttatggttccacgagttggcctctcagggttgctctgtcacgcgcctcccctgctgcccctggagcagctaggagtggggagggagagagctgctcagtgatgctggctgagctgggccaggagggacactgggagacactgctctctgttatgggtgagtttgaggacagaattatatacagtcatggctctctttccctccatagtcgagggttcaaagcccgtggggtatccggtcttttggaggttaagccaggccttggcctccttgcctgcttggagcgcactcccagccaggtactcagaaggggtggaagccttcacagagattagggtgaggctggaaagaagaccagcatatcacagcatggggagagggaaatcacctttaacgaggtgggagcatgccgaaagctcaggtgtgcgtgggagctgggcacccagacggagaggatactgaccaagcccccacccaagacactgcctgcttcccagtgatgcaaagcaggctctgaggtgggtcaggcaggcatgctggcagggagaggctgcctcctcagaatccccagggccctgggggtgtgtggtgcaggacccagaggaaggctgcctgtggacagacactcctgaaggctcttgttcagctcctgcctgctgccagagagaaggttacaggttacttgcgtctctcctttatgggcttttgaaaaaccaggactctcatgcttgccttgctacactcactgcaccacaacctccgctgttcttggactttctgtggctcctttggcccgctgcatatggtccacgctttccccctgggcatgtaaggtctgtcctagtggctccaggctgattgccaccactgcactcctgtgcatgtgctgaagcctgtgagcatttctaccttgtgctttttaaagcttagctcattttactcctcctccaggaccatcccagcccacacggactcttcttgtcttgaaattccaccaacaaagattgtcagtctcattgctgaggcctttagcacaccccacatctctaaacggtgcacgttcattcagcaaacacacaccaagcaaaactagtgacctcctctcactttttcagatctctttgcccaatttcacaaactcgtcctgccctttgctccaacattactgaacttgccactttttctctaaaatattatgtttttctcatgcctccctgccttttctcatgctgttccctctgcctctatgcctttacctatcttgtcagggtggaaaactcctagtcaccttaatgaccatatcaaatgtcccttccaggttgattccctaaccaaggggggtcaagtgtgttctcctgcactctcgtagcccctcagcttcctgacatcatggcattgacgacacagggtcagttagacctgtgtgagtgagctccgtgagagcaggacccagatggggctgggggccgagcaggtggtcagtagtgcttggtgagagaatgggccctatcccgcactg

SEQ ID NO: 1241959 - DNA, 4001 bp, Homo sapiens
agccctgcctattgccaagcctcctctcttagactcccagcccttcactctatgctgtcctgctctttgtttctgcagtgcagtttaggcttcagatcccaccccctccaagcgtggagatcatttccaggctatgacaattctggagccaaagattgcctcctagatcagcctgcttctggggggctttgtttctttgtccttccaagcccggtgctcagagagtcccattccgagatcagaccaggcactgctcaggaaaggtgaaagaaacaatttcccactctctggaatgttacgacttttttctttaaaaaaaaaaaattggagaaggggagggagacattctgtcactttttaaataagtggtagcaccggtgattatttttccatctggttaaccaaatgcaatttttgcccatgcaaaaaacgaatgtacaaccccttgcttcaatccaccggttcatccctgggccgatgcatggagaaataaaaaaaaactcttgcccttgaggactaagagagggcaactagtccattttcccagccagaacctgccttgcttttggaaagactccgccgttcctttaaggaaccaggccgaaggcgggaagggagaggtgacggggccatcgggactgctaaaactgtatccagagcgtacccaggcggcccagggacccgggcgggcgcgggggatacggcgggaaaggaatgcaagagctgcggcttcacctgcgacagagaacctggcggctcctgcaacctcctcctcctcctgcgccgcctgcgcttggcgctgcaaaccgctgcaaaagccactgctgggaacgcggcgcaacccagagcccgctctttaagcgcggctgttagcaccccgggaggcagcgtagggatggggttgagatggaatgaaggtaatactttgtcttgagccaggggcaactaggatgcacaaaccccctctgcaaacagccagtgtacacaccctgcaaggaaggcgcgccacaggctgcaaagggagacacaggttcctccagcagcagtgggccatgggcaccgagcggggacacggggacgctgtagtggctctggggcctcaccctgcacttgcgtccgtccacggtctcctcctcaaagccttctccgaccttgaagttgatctcagtggtgcgcaccgtggtggatgtcttgatgtagaactgatccccgtcctggcggatctccacgtgcggcttggacgcagccgctacggccactttcctcagcatggcgttcacacctgcgcagggtgcaccacaggcttgggtcacggggcctcgccgccagtctcgggaccggtcgggcactggtcataccctaactttagaaaggggccttaaaattgatccactcgtttccctgccctcgcccttgttttcgagatgagagactgaggcacagagagggtaagtgactttcctcgagttgcacagtgaattcgtggcagagcctggtcccaaatttgagtctccaaatttaagtccctgatcctccttgctctccagtaatctctcctcgctatgatctagcacgagataaagtccgcaccatcgaggagggcgccaaacattcagcaaacgttcgctgaacgcgtgggttccgggatctctaccagcttctccgagacccggtgcgcctgggagacaaggcgatctattgccccggggactccctcctgcctgggctccccaacttccaccccctccaggaccggggcacttccgggaccagggcacctccgggccgcatctccccgtcggggcgcgccctctgcaccagcttacccagtgccttgagcagctcgtcgaaattctcgctgctgcgcatcttccaggtgccggcgaagttgggcatggtggcggtggcggcggcggcaggtacggacagcggcggcgcagcgggcacactctgagctcgcaaggcggagactggcgctttgcgcccagcgctgcgcgccttgagtcactaggagagcgcccccaaccccgccgggcttctggccccgccccgccggccctgcccccgctcccccgcagcccctactcggtatgcgctcaactcccagcccagttgtgcctcagcctccagaggtgcgggcacccgctctccaactggggagcctccacctccctcaggacacccacatcccgctttaaaatgggtggtgggagagggttagctgaaacaagatgggcttggaggggataactgttgaagctgggcggtgtggacttgggttatgattctacttttctctctacttttgaatatgtttgaaaatatccataacataaacttaaagtggatagcgagcggggccatcaggggatgggacccactcttttttcacctccggtcgtacctactgggtgtgcccagatggtgtcccttccctcccagtccgggatcctattctgaaaccctctccccgcatccccacgccccccacaggacccatggggagtgagtggcaggaaaccgcaacccccatcaacaccagcttgggcactgaggcgcgaatccacgagctgcgggtcctccgcgttccgagtgcaggagggggccagacctttgtcagggctcaggacaaactgtgggtcgagaggcatggactgaatcagctccagaatctgggctaggtgcggcctgttttgcaaaagcgtgaggctttgcactcttcgggcaggctgtgagggccaaggggaggaagtcttctccctttgctcccaaataacctaaacatcacgacctaaagtcccctcggtgtttccactaagggagtacaaacacttcactattacccttgtagctcttctctgtacattttccttccagctttttcccactattttaccatctgcacacctcagccaaactgtacaattcaggattctagaacgtgccatgcattttattatctctaagtttttgcccatgccatggcttcttccttgaatgcccctttcctcatcgggttaatcaaatcttgcccattcacgaaagcccatctttatgctctctcttttgtgaaattcagtttcctaataaactgtgattatttttctctgaattgacaggattcttgtccggtcctgctcttgttcaagtcttcgctctgctataaactgaactcctggagggcagtgatcgtttatccacttgtcctcccttcctaaggcttagccaggtggggctcgataactgtgcattgatttgaggaggatgtgagtggtggcctggggtgaagattcccccaggaccttggggaatctgtgctgagtgcctactgaacagggccctggaaacttctggaggtggctggggctgggttgctgccaggaggctccgaggatctgtctaagaaagcagctgaggacaggagaggggagtggggccatcaccagctggaaaggggcatgggcagggccggcattctggacgtgccgtctgtgcagtcacacagggccatgcacttagaagggcctgatagttagattggaaaatggaaaagcaggaatgctctgctattgccagcttgaacgtcagaatactttttgtttgtttgtttgttttgagacagagtctcgctctgttgcccgagctggagtgcagtggcgcaatcttggctcactgcaacctctgcctcctgggtttaaatgattctcctggctcagcctcccaagtagctgggactacaggtgtgtgctactatgcccagctaattttttgtatttttagtagagacagggtttcactgtgttagccaggatagtctcgatctcctgacctcgtgatccgccctcctcggcctcccaaagtgctgggattacaggcatgagccaccgtgcctggccccataatactttttgaacaaggagtcctgaatttttattttgcactgggatctgcaaattaagtagcaggtcctggatgtgggaggcaagggatggagctgccat

SEQ ID NO: 1241960 - DNA, 4001 bp, Homo sapiens
gcctcacctgtcagggatattttaaagaagattcatgaattgggtgaaagattggatccgccataggtatacagacatatacagtgcatgtatttgtacataaacaatgtacagtatgtatttaaaaacacataacaacacaggccccaacactaatcctcagctttcacccacccattcttttcaacgtgctctgagcttatcgagttcatctctgaatctaaccaaggtcacagatgtaaatgccagtggatgccaggcaggtaaaaaatgagtgaagctgatagggtataagaaaacattttcttgaaatcttcagcttctttctctctatatatatattttttctcaatgtgaacagaaatgtaagtacaggaaatatttcactttttccttaacttcactgaaagaaaacaccatcatgagtataaatggcaactgtcacctaatctccccttgggggactgtgacagagagtggacggtggcaaactagagttcttactccatttgaaagggagctcagctcagctccctttcatcatcacccagctccagcaggtcggtagctgtcatgtaggaattcagaattagtgttaccaggtctcccaatttttaacatatataaataataataaataaataatacggaaatttggattttgtgtggaagtcttccaatttaaaaattctggcaacagattcaataatttttcccaaacactgcgctggccaaaaaataatgtgtctgcaactcagctggtttgcaactctgctctcagctctccttcaaactgtctcccccgcctcagtcccccagaatctgcagatcctcccccatcctcccgatggtcctccaaggtcagcattcaggatcctcaaggccagccccactcctgctgaccccccttctctgcaaccctgcgcggacactccggttggctctccatcctccactgcctcactcagcggttacctaacctctccaggtgtttgtcccggctcgcgccttactcattcctccaggtccctctccagtcaccagcgacgcttgtcagttctcactaaatatcccgggccgaacaaagtaaactggacccgataaagcacctccaaggagtaaaaggagcagagcctcacactcgacacggaatcccgtcgtggttccaacaacccgagccaccccagggccgggccctggatggacttgtgcacagagctccccccacgagcgcgtgggaccctggggtgcccgcggccttccacgccggcagaacagcagggctcgatggtgggggatgttcggagcgaccagaagccgcgccgcgccacccggccggcctccgagctgtttgcgatttcctctcggggctcctcgtcctcctccccctcaggccgccctcgcacggccgcccgcctccacgggcttcacccctgcccatcttcccgcacacggggccgggcgaccctcccacctcagcccgggatcgcgaacggctagcgggtgtcgccaggcggggaaacgccgaggccgcggccgctccggtccccctcccagccgccggttcccgggcgcggcccccgcccggccccgccatcgccttggccccgcaacctctcacccgccgcgcgggtcccgcccgcggccgtggccgcccccgcccgcgccggcccgggccctcacccgcgacagggtgaggtcggtcatgagctgctcgaaggcccgcgtctcctcggcctgtctctgcgtgtgcagcgcgatcttctcactgaacttccgcgggttggcgctgcccgagcccggcgaggcggccatggcgcggactctgcgcgggcagaagcgggagacggcggccgtggggcctgtacctcggcccacccgtccgtccacaggccgccggggccgccgcccgaagccagtcgtccggcgcgacccggcagaggagccgccgcggccccggagccagcgagcggccgggagcgcgccgaggtccgcccccgtgcgcccggccccgccccaccctcggcggggcccgcccggcctccagtctgccccggccccacgctcgcgggctgagggctgctccccgcttcccggtctggctcgggacccgccgccggcggccacctggagggacccccgtcagcccgacaaagtggccccggcgtacggggaacgctggggtgccactccacggagactctccgacccagggatggcctctgcgtctacgcgacgtggagaacacagcctgtgcccgcatcccccctcccccagccaaattacgaagattttcttctccaggtggaacctgggcgaccggacctcgagcaggtcacctcgggcccccgcagggggtgcgcccattttgcctggggcctaacgtctgcccgccagccctgccgctccaggcccccggcctccagccgctggtttcctgacctctcacacccacccctccccgctccagtcaaccagagctgtatctcggctttaaaaactgcctcctattctgcacaaactacaaacaccatccagccctgctgcagccttggctccatagccccggccccctttccaggttctttccaagtctccctacggcctctccactcctgtggcagcttcagcaggtgccagccccaccttgggaaaccagcgctcagcctcagcgaatttccccttcttttgggggagtgaatggatgtctttctctgtcgcccggtctggagtgtagtggtgcgatctcgactcaccgcggccttgacctcccgggctcaaaagatcctcccacctcagcctcccgaccagctgggaccacaggcgggggtcaccacgcccggctagtttgtaaatgtttttgtagcaatggggggcgggggtgggtctcgctattttgcccaggctggtctcgaacgcctgggctcaagcgatctgcccacctcagcctcccaaagtgctgggataacaggcgtgggccacagtgcccggggagtttcctctttggagtccagaagctactctcagcataaatgttgatgtgcacaaagatgtcccggggagccctgagcgtgtgtcagtgttctgtaaagagggaaatattagaggcctacggaagagtacggaaaataatattaatactacccacgccccccactatcaagattaaacagacatcaatacattttgctgcatgtacttgggatttattaaagacatacaaaattagtcataacgacggccccactctcatttcttcttccgccccacagatagtcaccgtgctcaagttggtacatatcattccagtttgtgtttttatacttttattacatatgatgtagagatccagcaatgctatatggaatacctaattttgtttttaaactttacaaaaatgacaccatactgaataatcattttgcatcttttttcattctccattatgttttcgagatatatttgtgtcaattcatttatatgataatattccattatgtttttcacctgtctctcagacatagcctataactggactttttagaaaatgtattctgaaaatatatctctgttagctagaatttagctatttttattaattataattggatttttttttctgttgtattttgtgttatttaccatgctttttttttgttgttggtttgtttttgagacggagtcttgctctgttacccaggctggagtgcagtggcctgatctcagctcactgcaaactctgcctcttgagttcaagtgattcttgtgcctcagcctcccgagtaactgggattacaggcttgcgccaccatgcccggctagtttttttttttttttttaagacagagtcgcgctctgtcgcccaggctggagtgcagtggtgcaatctcggctcactgcaatctctgcctcctgggttcaagctattctcctgcctcagcctcctgagtagctgggattacaggtacacgccaccacgcaggctaattttttgtattttt

SEQ ID NO: 1241961 - DNA, 4001 bp, Homo sapiens
ctcaacctcacccctgctgtccttgccctgttcctgctgtggccacaaccaagaaagacactggaaccgccagggtactaggagcttgaaacaggccccctgggtgtccccactctcacaatgctcccatgtccccagtctgtagcctgctgccagtggagacagagcttccacggttcccatgtgaccccatttatatcctgaacttggctgctcctgtgccagctgggccataggtgtggcgagtgctgggtcaggactgaccaccaggttgtttcaactcagagccggggccaggaccggaccttcctgccacaccacacagatggccatacaccacacattccccacatctcctgctagctgacccagccacagctggagccggaagccctttcactccctccagccctctgcagggaagcacgtgctcaaccaacaaggtccctctggggccgggctgggggcctgtgtccccagtgggtgaaggtgcctgcctggtttccttccacccacagccatccagccctgtatagctggggatgaaaggacagccagcctaactccactagaggcctggggtagcaacttctccctttgagcctcggttcccgggtgtacaaaatgggcggggaagtgaactggtagttaagctccaaaaaatctgctggctggacacaccccttcctgacacctggtctgggccacaaagagcctaggagaatgggctgcccagggtgccagaaggtgggggcatggtgctaatgctccgttacctccccccgggcagaaggcctgcccagtttcccacccaaagatcccttggcttaggcctggtcttctgagaggccaagggtgacaggctcagtcctaggacctgggcttctaactgctcacccgaggtggctgggccctgggcttgcttgcagcccgcagggtcatggtggggtaatgagggaggggtcagaaccaagcaagccagggcacctgcggggaggccctgtacagggaagggcaggggagtccagcactctctctagggacctggcccatacggatcctcttcctccagactccagccacctcctactctgagctccacagagggggggactcgggatgacccgagaagacgagtccgtggagctgcagggcagtacctccctcatgcactcccttccaatttgggttctgacagtggctcctgggagaattcgaacccgtgcaagggagtaaaggagagaagggagaagtgggagaagaggggaatgggagtggacgcgacagtggcagcaacagagactagacgcgcgacctccaccctcttccctccaggggacactccgggacggccaggcactcacctctcttggggcactgcggtccgggccacctcgccgcgggcggcatcagcggcctgcgggacggtccatgcggtcaggggggaggggaggggcgcaggggtccccagggggtgcggtacaaagaggtatgggtgcaaggagaggggaggagggaccgccaggcagaggcagggggacggacgcacggcccgggtcgcggagggaagaaaggcgggggaagggggcgggagggagtcggggggaggaaacaatgtagccggcgcggccccggcagagttccgcttccgagcgccgccactgaggttcgattttggaacgtcgcgctggctgccgggggccgccccggacgctcgatcggggccgcggggctcctcgcgctccacgccccgcgggctccggcggccagaggctggctggggcgggagggacggcgggccgggttacggccccgacggcggcgcagccgggcggtcgcccggctcggaccccaccccggcagaagcccccgggcaaggcgcgggtggggcaggagcgggagggcggcagcgggctcggcggcggcggcggccaacctcggctcgcccagggctccgctgggaggaagctcgcaggcctggcgagaggaagcgcggcccggatcctccgcccgcggcagcgcgcctgcgcgagggggcctgcccggcgcgcggcggggcgtgggccggcggggcggcgccccctgccgggcgccgggggcactgcggggggtgtgtccgcgcccacgccctgcccccacttgccgcctggctgcgttgaaggctccgagggtctctcctcagccggcctgggagcaacctcccagccttctctggacgcagctttcccgctgcagaagcgctgggggccgggcctgggcccctctcctcaggtctgtttgtggagagtgggcctgattcgcagcagaaagccttcattcattcattcaccaacatttcctggcgctgacatcgtggcggagcctgctctggagtctattggcaagaccatttcactaccgtcaaggcgttctcggtcgggtgggggtaggctgacaggccgacagacaacggcaaggaaataattgatcaaagtggagaggtggtggacacggttcccaggaggcagaaagaaaactagggctaacggggagacctcacacctcacagagccgggaccaggcagagggaacagcatgcacaagggcggggagtgcggagggagcttggtggcttctgggatctaaatatagctcaggcggctgccgcttgcagtgtgggtgggggagagtggtgggagatgggttcctgcaaacaacaggggcaaaagagatccaaagagcctcatgggactttcttggagtttatgttcagcctggaggcaataaagaagttgtcagcagctctgtgaccttgggcaagttacttaacctctctgtgctttagtttccccatttggtaaaataggtgatatataatggcaccgacttcttaagtttttgtggggaggggaggaaatgagttaatacgtttaaagtgcttagtatgcagtagctggcacgtgaggagccctccgttaagcaagggctgttacatcactgttaacgaaaagcagggagatgacctgctctgagccacaggagaggacagcgtgctcaggcatgacaggggtgggagagtgcagggtggcgggggaacagaatggggatgcagtgatgagggtgagaccggggaacagaatggggatacagtgatgagggcgagaccagagactccagcgtagggaggaggtaaaggtgggggactttctagggactagaccctgaagcaagggtcaggcttgggtggacagagggaagaggcactcttggggttgggggggaggaagtggggcatgctgacaaagtcttggaacacaaaataagcatgaagaggcccgagggagcgagaagagggcaaacagccctgtgggagacggagctgggagacagtgtggctgcagattgttttaaagagcctcggatgccaggaggagttgcccccaaaaccacaggtcggccctctgacccagggcacccttaggccggtttcccagctggagccagccctttggagagggatgtcctttgaggagacagccagtaagtttcagagataggtgtggtgtaacagaaaaaagatgaatttggggttcaagtctccaagttaaatttcaacccgtccacttactagctgtgtgacttagggctagttacctaaggtctctgagctgtttcctcttttgtaagatcaggctcaaaatatacttctctcatgatagatagtgcagattcagcaagataacggcctgggggtgagggagtggaaagggtgctcagcagagctggtttccctttctttcctctgaggtcaagatggaatgataatatggggccggatggggggccgcctctcagcctacaagaaagcacttcagcagctctgcaaagccttctgggagggagaaattgacatctcccctcccctggctgaatcagctagcagaatgggaaagaaaagactggggatttggggaaaatactctaatccctgttccagttttgtcaccaacctttctttatcc

SEQ ID NO: 1241962 - DNA, 4001 bp, Homo sapiens
gcactgagccgagatcgtgccactgcactccagcctgggtgatagagcaagactctgtctcaaacaaacaaacaaacaaacaaaaaacaagtaccttctattttacaccccaattttaattctctttaaagagacatgtgatgttaagatttacatacattactttttcatgtatttcgtgttaatccatactataaacaccaatatggtgtagctgagaaaaatctataaaatatattttgctcatttcaataaatgggccatattctactttattattttgaattttaagaaactactgataactgaatttcatgctacctacgatcaatttcgagaagacactgaaagtcctattgtatgcatttttttttcaaaattatccggttgctttcctatctcaaacctcgtttcacaaaactgggctgccttgactgtgtatgattaatggtaataatttatcttctaattcaaaggtggttccgtttaaaatgggatgttacttataatacaggtaagaattttaactcatactacttatgaagaaacaaaagctctggtaggttccatgacttgcccaaggtcagtaactagcaactggcatagtctaggttcaacccaagatttatctgcctgaaagtcaatacttccacttgaccgcaattatctccttaaaagattaagacacaggctcaacagcagaacattcattctctctctgaaaattcacatatctgttctgagacatcactacacagcacctagtattcagtcactgattgaaacaaaaatgaagaggatctttctacttcatttaaattaggacaggtttactggcaggtaagaaagaggctgcaaaagccttgcctcaacatgtcttgcctagacctgtgatacatctatatggtttccccagtccattctttttaaataaacacgtacatctactacacaagactacacctggactagcctattgttaaatgcttttcagaattccacttttctaaggtaatttataccggaattaatatcgagctgggagacttggttgaatatgtcattcaggcactttccaaacatcttaagtgtcatttaggggcaacaaacccagttccactctcttttacattgtgatgcctgcccacttgggggacattgctcctgtaggacgtgggggcgaggaaacagtaaaggaagaagtgggggaagcgtacggaagttgggtagaggaaagtctcattacccactcttgtgccctaagctccgccaagggcggctccccgcggtacccagtcgactcagaacccccacaaccttcgaagtccagctctgtcccagcggggtgggtagggaaagagggcaatggaagcacgggatagccccagtcaccctgacgagatctgtgccctccttttggctcccgggggatgctccccctttcagagtaagccctccaggtggcaaactcccggtccacaccggctagagtcagtttctcggaaggggcgcctcctccgcctacctctaccccgctaaccgaaactctccacccgctgtgtccctcagcccctccattccgcccccgcaaccctccacagacacaaacgccagcctgcgccccacccgggatcacggcgtcccccacccacgcccaggaaagggccccccaccaaccccctcagacacacacacaccccctcagacttcagcctacagaaccccgacgaagccgggcagatacctggtccagcagtgctgcaaggcgcaaatgaggcgggcgcggtcccctccccgaggcgccaagtgcttctctacccacccgcagcggtggtttctctctttcccaggagcgggagggaggggagaaggcggacgggagggggaaggcgaggagccgaggggcggctggagccgaaccggaaccactagcgcggccccgccctcgtcccggagtcgcagagtaccctggcgggcctaataggacaaactttgggcaggcagcgttaaactgacaccatcacttccgggttatccccacggctgccccctccttagcaaccgcgtggggttgctaagcggaagtgccttcaaagcaacccacccccatttcttctgggactaccagaagatatatcgggagcactgagctctgctttggcaacacgctcttaccttctgctcaagatcttagaccaagtacacgcttcgctgccagaggcacgaaacccatcccgcttttcccttcaactgtactcctccaccaagcccccgtctctatatactcctgctccctcccacccttaatcccgtggctgacccagtggctgttcctaaggctccaggctcctctctcaggtccctcgagggaattattttctgacggtttagcaagcatctccctcttgtggatttttaattgtgtttcaaccagatttttaaaatttctttcaatgttgtgaaaggtttttcatgcacttagttctcctgtgacagcccatgaagccgaatggttagaaaaatgttgtcttcacctacattttgtaagagctgcacatgtttgtgtaaggtctggaattaacctagccaaatggaataggcaaaaaagattcaatgtaactcgacagttattttaatccttaaaacagagagcagggcacatgttctcaggacctcttgagactgcgcctcgggggcggggtggtggtggaaaaaagacagaaaacaaagaaaaaggctaaagggagcccataatcaaatttgggaaggaagaagactgtctaatcctccactcaaaactcaaaatatgccgggtgcggtggctcacacctgtaatcccaacactttgggaagccgagactggcggatcacgaggtcaggagatggagaccatcctggccaacatggtgaaactccgtctctactaaaaatacaaaaattggccgggcgcggtggctcgcgcctgtagtcctcctgtaagcactttgggaggccgaggcgggcagatcacgaggtcaggagatggagaccatcctggccaacatggtgaaaccccgtctctactaaaatacaaaaaattggctgggggtggtggcacgtgcctgtagtcccagttacacgggaggctgaagcaggggaattgcttgaacccgggaggcggagattgcagtgagccgagatcgtgccattgcactccaatggcactccagcctgatgacagagcgagactccgtctcaaaaataataataaataaataaacaaacaaacaaaaattagctgggcgtggtggcgtgtgcctgtagtcccagctactcgggagactgaggcaggagaatcgcgggaacccgggaggcggaggttgcagtgagccgagaccgcgccactgccctgcagcatggagacagagctagactccgtctaaaaaaaaaaaaaaaaaccttcaaaataaactttcataccgacactatggataagaaaagagacctcatttattgtgtctgggtgatttggggtttgaaaatattgggaaaatgaatggttggggtaaaagttaacaaagtaatactcgaaaaaaacaactcgtatctggaggctgggtgcggtggctcacgcctgtaatctcagcactttgggaagccgaggcctgaggatcacctgaggtaaggagttcgagaccagcctggccaaactggtgaaaccctgtctctattaaaaatagaaaaattagctgggcgtggtggtgggcacctgtgatcccacctactcgggaggctgaggcatgagaatcatttgaacccagaaggcagacgttgcagtgagccgagattgcgccattgcactccagcctgggcaacagagcgagactccgtttcagaaaaaagaaaaaaaaaaaaaaaaggaaaagaacccatatcgttatggcaggtaaaatattcagagaaatgcagttgggcattcagagaaaaatgagtaaaaatcttcatttggttttcctatctta

SEQ ID NO: 1241963 - DNA, 4001 bp, Homo sapiens
agtcctcctaaaggcaggggatggtgtaactttataaaaccccacagcaccatgctgctctcttgccctaaaacccttgtggcatctcctttgccaacagggcataaggccgtgggcttcattttgccatttaaggcttctgtgccccagcccagtggttctccctggcctgtgctcgaaatacgcctcccagccaggctgctggccttcctgtctcaacacccctctgcttacgcccaccttggtgcctctgagtcagcgcccctgcctggaggactgactcccttcccatccaccaaggcttggtttgaggcccaccctgtgtcctgccccagcttgcccctgcttttctcccctctgtacttttcatccagatttttgctgtttgagatttaatttgcctttctgcctcctgaatgagtctcagttcagcctctcaatttcccgtgcccctgcgagcctagcaccatgcctgcatgctgtcagggctaagaaggtatttgagaatggctctcagttgaagcccaaggaggtgggggtactggaatccctccttggctggaggctggggcctgaatgagctgaccaccctggtcaccttggatgctcccttcccatctccctggcggcccagcccatccctcaggccctgagatcttaggggatctggtccctgcaggaacagggagcctggagatccagccctgattcaccccgcgggggtcctcccttgactcacttcccttctgggaaccatgtgatgccctcttttagagctggcttctccatctgaaggagagaagggtgtggcctgggcccttgtgaaggaggctcaggccctgcctttgctccatgttgctcttgggaatgatctcgaaggtgtagctgaagcactgaatcacacgtgggtagtgatgatggatgggccctaaggccacagttcttatggcataactagagctgccttcgctgaaggaagaatgctgtcatgttggggtttctggcatcgggacagagaggggatatatcccagcacttctcggaaagcgaacttccattcagcctctgctgggtcaggcatcagtgctgggatgaggaggtgtggcagggggtggtccagagctatctgtaggacaagccccgctgaggggcaccagctctccctctaggaggctgagagtgggtagtgggtggggggtcctgcctgtcaccaacaggaggagggagaggagagaatgaagaggggaggtggcagatagacggatctgcaaggaagcaaggggaggaaagaaggggcagagctggggggcagctggaggggtgtgggggtgctcctcacaggggagggcagggtggctcattcctcgtttcccaccttgtagcactccccattcctggcccagggcatctgaagctggaggacccacttctcactgtcgccgggtccctttggaccccaacatactcaccccaaacttgcctggcaaacaaagctcggccagcattggggtggccccactggtgtctcagacaatccaaacgggcaaagccacgccctaggcaatccatgcctggggcgcctgctcccgcccctaactggacagccttggctagctagaaaccccataacctgagatagcggggtcccgtgtccgccccaggattgaacccctggcgaccccagctagtggtgggagaagcgcagcctgcttgactcccgatctgggggccacttctggctcctcctgtcccttttccctcccggaggaacccctctagttccgccaggctgggtcggggtctcaggcccctcactcacccgcggatgcaagtctggccaacatagtcagggtcaaagccaaggccaggccgggggctggaagtgggggccgcggcccggactgcatcccggcgggctgggcggcaggacttgcgaggagccagcggagtcctgggagctgggagctgagtggagcgagcgcggctctgctcctgggcgcgggccggctccgggtgtccgcgcacttaactccgggggcggggcaggcgcagacccgcgcgcccgctcgggtttcaggcttggactcccccacctgcccccaccctcaaccttcttaaagggcccgtgcggggctgttcctctctggggcaggggtgagggggcccttgcagctgggccagaccccagccccaccctaaagacttagaacaaagtcatagagaggcccagacaccctgaactctggccccaagagccgagcccgggagaccccctcagggaggaggcatgaactgtcccagcccctacttccctcctttctgcctttgcgggagttcaggagacccctccacaggcacactccagccttaggaggaaggacagacaccagccaccctcacaggcggcttttgggctgctttgcctcggaggtcccctaggaacttctccagactccagaggcaccacccgaggtcctgtggggcactgcccatggctgcaacagtgaccttctctgcctggaagggcctcacctcagtctccctgtctgtaagggagagatgtctggatttcctcgcagggcagaagaattctcagtcccgccatgacatttgcctcaaaataaccttgcaaggtgggtgaggagcatcccctcccccatttcatggaggacgaaagtgcagctcaagctgaaagtggctcttacaagactccaggtggaaagtaggtccctggccgtttggtgccagaagcccaggcctcctgacccctgaatccgggtgtttcaacttcccgaggctgcctcctggaaatctggccctggatttggcttctacctaacagcttcaggctggggcccttctgctggctcccttccaggcagcaacatcagcctagtcccaaacaggaggagaaagggcaatgttacttagcttccggtgcctagaggatctgcgtgttctctgtccagtcccaatgttaccgggccttggtttacttcctccattcaggtccctccatctatctgctccagcccatctccagcccaaccccaccttgcaccctcttcccagctcttccctttgaccagtaacagcccagcacttcatactttgcaacgaaactgagacctgttttgcagatgaagaaactgaggctgagagagattaagggactggagctagtctacatagctgctgagatgtggggccaggtctttgaccctaagtgcagtgctcaggtgtgatggtgcctggtccatgtgggggttatgagtattggtcttgaaaccagagagacctgggttcaaatcccagctcccttacttggttgtcaaaccttgaacaagtcccctcacctctctgtggcagtttcctcatttgtaaaattgggttaatgaggattaaatgctttaatgtacctcaagtccctagcccagggcctggcatacggtaggtgctcaataaatgcttatcctttctcctccgtctctgtcatcctgcacattccctgtgattcatggtttacatacagctttacacatatcacctcccttgttgtaaagcttgaactttctcctccagaggctgctgcatacagtaggtgtacaataaatgcctgctgtagttgactaagaaaccaattgctgctgttctgtagggattttggcaaacctaagagcttccatccaggtgccctaggaggcctgggatggaggctgtgctaggctggcctcagtggcggtaaaggcattgattccacaatttgtcccttgttttttttttttttttttttgagacagagtctcgctctgttgcccaggctggagtgtaatggcgcgatctcggctcactgcaacctctgcctcccgggttcaagcgattctcctgcctcagcctcctgagtagctgggattgcaggtgtgcaccaccatgcctggctaatttttgtatttttagtagagatggggtttcaccatgttgaccaggctggtcttgaactc

SEQ ID NO: 1241964 - DNA, 4001 bp, Homo sapiens
gccctgttcgccccagacattatgtgatgaactcactccgttctttaagatccagctctgcagagcatctcagattccctgtcctgaggcaggtactcctgtatgagctcttaaatacttctgcatttacctaccacctactggtatggttttctgactatatttcatcttcttcgcctcacgtggagtttcttttagaatggaaagttttcttcctttcctctttgaatcctagcaccaaggccacactcggcactgaatacctgtctcgaatgaatgaataaatcaatcttgtttgaacaaatcttattagttttgcttttttaaaattatggtaaaatgtacataacataaaaatttccattttaaccatttttaagtgtataattcagtgacattaagtacattctaaagttgcgcaggtttttttttttaaatcagttctaaatggtttaaactggccagtatttactagagctgttagatcgacttaatttggacccatgagactcgtgacactcagaattaatctaatcccatttacaccaggtgcctcccatcaaaatctgtttgatcaagtgtggaattatttcatcccattggaaccagctcttgaatcaatcagaactggctctgccaggctccgggccagtagtcggtgctcaaaatggtgtttctttctttggcctaatctcttgagtagcctctttcccttttgttaatttttttttttttctggaggacaatcttccctgggagctcccttctgctcccacgaagcgctctgcacccagccctggtgctgcctggctctggggcagggagcttgcattctgccacctccttcattgtcctctcggtatacctgcactttcaaaacaacccctgcaggcaagctttagaggcagcgataaacaaacaggctgactgaaatttagggaaacgcctgtatctggacagcctcttcaaatatttgtcaccccctccctgctctggggaaagaagagacagttcctcacagtcactctatttcctgccttcccagctctgaacaccttggctcgaatgtaaagaatttggctctgaattaggactcaagaaacggggccctagcaattttccctccattaactaaacgcgtcactttggtcatgcccttttgggggcaataatttcccaattcgtaaaatgaagggatcaaagtttgatttttatcattactaatgagaagaattattatttttttgcagcaggcttttttttccccaacaaaatattactctgaataagacaagaaagaatcccgaacggctctggccgtcagggtgtgtgtgtctcctccccatgctgtctaacccccgttggaatttggagggctcttgtcctttccccttggcctcagaaggagcccagcgcgtcctaccttgcgtgggagtgtgtgtgtgaccagggctccttcctgcccttagagtcaccgcccccttctcgcacaggtttacagcaccacttgcctcgcccactccccgctttgcctccgccccatcctgatgctgccggaatggctgttccaaatggaaggatgcccgcgtccgtcccctgccccagtccttcaacaggtccccacagacctcaggataagatgaacgcggaattcagggcctggtctcaaccgccctctcccttttcctctcacttagacgaccctggccagctgggccactctccactctcgccccctcccgccctcgtggcctctgtctagaccgtactccctcctactgggtgatgtctcttcccctgggacccagggaccatcccgttgttgacctccggggtcaggggtgcggatgggggccggcccttcccgcggtcgccgccagggggcggcaggagcggctccagatgacagcgggaggccgcaagaggggagggaggaaggaccgagggagcgcggatcccgctctcggatcgcaaactctgagccagagctctccgcgcgcgcctgaaccgctggccgcccgcgcagcccgacgcggaatcggggcacagcgggagcccgtgcagggcgggcgcggggcggctgggcggcggtggcggccgtccatgcggcggcgctcggggctgcccggcgccgggaaccacgcgggggcgaggcgaggcgaggcggccgccggtcgctccgggacgcggaccgccaggtgagcagagccgcgcgccccgcgtcccctgcgcgccgcccgcgcggccccgacccggcttccgctgcccaggctccggctcccgctctctggccggcggggcgggctggcgcgggctacccagtgggtgtgtccggggcgccgcgggctgcgccgctccgggctcggggagccagcgcgcgcctggtccgtgcggacggctgcgcctccttctctggttctcttccttgctgggagtcttgctctgtgctggcgccggcgctcatccctccaccctcgactctagggacagtcttaaactctagggacaatccacctcagtcgtccccgggtcggggccccgtgctccccgggtcgggtcggaggggaccggcgagtgcacacccagcccgtgcgccccccacctcagcctcgcctccctcccgcctggggcccgagagccgggcaagtctcggtcagcgctccttgagtcctggcctggggcctcggatctgtgtgtctgtctgtctcagtttagttgctgcaacccagcgagcgcctggagcccgagtggatgggttgtttccgccaactctggacacttcctcaagtgcagcctaagtacctgcggccccttggcgcacttacagaagtagcttttgcacagcgagctcaccttggagctctacagatctggaagttaagttttctttttatttgaaataacatcagccctcacttgggaaggggattttagggcgttctcgggcccacctaagtatctggaatttgtggtctagtaagttttttaagcagtccgcacccagcaccgtacctcccagcctcctttgccgtcttactaaaagtgcatgcttgcttctcttcctgtctcctttgcgatctctaccacgctgcgcttcgcccttttcgggctatgagtctaaagcttggacgtgggtagcaatcattggatgcctgttggaatttggaattagagaaatagatacccgagagagatctaaggaatcgccttgtccaaccctcctttcacagttggaggcacccaggacccctgacagtctgaagatttttcaaggatcacacagcttttaaaatccgcgtgtcttctacttgattaatattgttggaggtgatggagtaactgggcttactagggtcttactgggtctcaatatacaaagaagcaaacattttaaaaatgtgacttaaaatacggaactcttcaattcctatagatttttgttggcatcatagttgaattcctttagaaaacaaaatcctagccctgaaattaatgtgaggaagcaagcagatgggcgtcctgggactttcctataaatctctgcagggctggagcagggatttcccagaggtctgggcctgggaaatgagtttgggtgatcaggatactggagccccttctgaataagcaactgggttggtttcttgtggggaggctggccagtggaactcatgtgatctcctctgtgcccagcactgggcggggcaccagcttggcattaccttctttttagtctcctatgccataaagaaatatttcttactggctgttagcgaaagaaaaatacagcccagagtttgggaggaagatcaggggtggggagatttttgacttggagtttgtttttgtttttgcctcgaaaaacttgtggagattgcaatcagttatcctacacagaggctgtgtattgccgtcttctccatcccccacatttctctccatggtaccacttttatcctaattgctgggagtctcaatgtttaaatgttcccaacactccc

SEQ ID NO: 1241965 - DNA, 4001 bp, Homo sapiens
accaatgatttaagatccctttaagttgcatatttggctccattttttaaataaactgactcggcaagtagttaacgtgcctgtacctccactattctattcgccttaggaaagtatgaagctcaacttaatcctaaaaaactccttcacataagagctaccttttgccttgactttctttatgaccttgggcaaagtctaccaaatgaggattataataatgtttgtgtgttcctgtttattattgaaaattaaccataacatcgtgcaaacaatagtgaaattctctaaactggacctatccagaactgaaaacctgagttataaatatcaactgatattcaatgtgaacagtttttaaaattttaatttgattagtgaaaacaaaaaaacctacaaagatcccaaattcaacatgattaataaattccgaaaacaccaacagcctccttattacttctctttatgaacaattggtctgcaatgtaatttaaaaaaaaggaaagaaaaagtaaagaaatatagtaaaactagctttaacacgccatttcccttttctaagaataaaaaatggaccaggaacgaaaatttaaaactgggcgaagaatggggagacaaagcaatctacaatttgaaaattacacagataaatccatcatttcaagtcactaatttgtatacccactgaagaaattcatcttggtactgcgttaccagcattaggaagataaatccctgcctcggaggaacatctactgagtacgtttcatttcaggatctcaggtaagtttacgagctcttagatctctttaggtttccctaaggtacgctgaagtgtttaacatcattcacacatccagccaccactagggtgagaagtaaataaacaagatttacttatgcaattatttaccacagaactctggtcaagaatgcaaaagtaaacacccatacagacatttaaaatccaaagaaagcagagaatattaaggataataaggttcactctttaactgaccactgtggaaaccagacgccttccacatggactgttctttactaccactcccgatttgaaaaagtaacaatgtcaactcgagattttaacagtacaaaagataaacagaacttagtcaaatcccttcttccagattctgaaaaggtgtttataagaactgagataagagcaacgcccccctaaaagcaccctactccaaagaatgaaatgctgaaaacatgaggtgggccaaaaaggttaaaaaaagctaaacttctaacttaattacccagaggttggggactaggaacttgagatcggagtgggggtgggtagcaaagtgaaatctaaccccagaaatcacaacgcaggccgcaacctaagaggtgaagctggcgggaagtgagctccctttctgttcccaggggaaagtccagacaggagcggctccgcacagtggacgtacgaggcgccaaagagtgcatgcctaccaaggcgccagagccgctggaggaccaggtttagaaggggaggagatcccggcagacggccctggaagaggaggaggactgagattggaagcagcggcggcgtctggacgaaggggattacctaactgtgacgacagagaagtgtcctcaggctccggcgatggtcccgactgcgcaatgtgtggtgtctttcccgcttaccccgcagcagcaacagaaccagctccttcagccagtcgccatttcccgcctaccgacctgctgcaccgcacggacagggacccggatggaaagcggcctctccgcgcaggcgccctgacttcctcctccccctcccgccacaattccgcgaggtgggagggaaggaatgcgggcagccacaacggcaacaacaaccaaaaaaacacttttacttccgtgaagagcgttgaagttccttacgccggaagaaactctctagtctgaatcctggagaaaaactgaacacaaggccttagtactgggtcgattaagaaaggacaaaacctatcaggatgagcaagggcctgggggatatttgtacattaggggcctccgtagccggctgtgtagtggtcgcagggggagtagggagtaaagcgttaggagtggagaggcggggacccgaaggacggtttttcctcccgctcctaacggaactgcttgggcagagctgggagggggagcgcgcccttgccccggaggcggggcttaggaacgcgtagtgcaccctggcggctagggtttagtaactgtgggcgcgctgggtaggtggagctgaggggataaggcgggactaacggcttggcgcgctggaggaggtagttcgtagggagagctgcctgaggccgggagaaagcgaatctggcgcctttcctgggatttcggtggcccttgaaggttccctttccagctcattgcctagagggcgtagcagtcgcttttggatcataaatattcatgcccttcgactcaaccctatgttggcggtgattctgcaggttgaaaactcggatctttcaggccagtgggctcccacctgcgaccctaggtcaaaggacggtcagctccacagagtgaaaatgtatcagtccagagaatccagttctagtggggtatcggaaaaccaagcctagtgtttggaagaacatttttcactgaaactccaagccactctccttattcaatcaagaaatatttattgaaaaaataactaggtgcgacgggtaaaacagtgagccaggcagacacggatactgccttccccaaaggtaatgattttttttttttttcgagacggagtcttcactctgtcgcccaggatggagtgcagtggcgcgatctcggctcaaacctccacctcccgggttcaagcgattcttctgcctcagccccccgagaagctgggattacaggcgcgcgccaccacgaccggctaatttttgtatttttagtagagacggggtttcaccacgttggtcaggctggtctcgtactcctgacctcgtgatccgcccgcttcggcctcccaaagtgctggtattacaggcgtgagccaccgcgcccggccaaagatcataatctattgaagaagacacccaagtaaacagaatttaaaaactgataaagcgaatacaaggatggcatgataggcgttgtaaaacacatgagagtgccggcgagggggtctgggaaggtttcgtaagataacatctgagacaaaaaggaggagtgtgtgttgcaggggaagagtgtctgggtaaaggaaacaacagacggaaaagtccaaagatgagactgtgttgagccattggagaagtagttctgtgcgctaagaaaagaggatgggagggcagggggaagatggcaagagaggctgagaagtaagcagaaataacataccgttgtgaatctcattatttcgaagtatggagcaggtgggttgtcttctgaaaaccttgtatactacagattcttctgtcagagttcatttgcaccctaaatcttcctagtgcaaaaatgctctgaatgcgacatttattgggagctggtggtatacacagcacagaactattaatagtaacagtccacacacacaaaaatagattcctgaaaagttcaatggaatccaacaaataattagtttatccagagtgtatcatggaaagcagtaaaataccaactaaacagttaccccattattactaaagtttattttatttatttatttatttttagagacagggtctcactccattccccaggctgaagtaattaaagctcattgcaacctcaaaatccatggttcaagccatcttcctgccttggcctcccaaagtgctgggattacgggcctgagctactgcacacagcccctaaagttttgttttgctttttgtttagagacaaggacttcctctgtacccctggcttgagtgcagtggcatgatcataactcactgcatccttaaacacctgggctcaagtgatcctcc

SEQ ID NO: 1241966 - DNA, 4001 bp, Homo sapiens
ggacaattgactaccagtttgcctctggagagattattctggggccagaataatctgctggtgaaccgtgccttaccctaaaatagatccattccaatctagtcaggactttaaaagtgccataataccttgcctggatttacagcaggtttcaggaaagtacagtattcccctgtttgtttgtttgtttgttttagatggagtcttactctgtcacccaggctggagtgatcgccacctctcagtttcaagcgattctcctgccccagcctcctgagtacctgggattacaggcacctggctaccacacccagctaatttttgtatttttagtagagacagggtttcaccatgttggccaggctgctctcgaactcctgacctaaagtgatccgactgcctcggtctcccaaattgctgagattacaggtgtgagccaccgcagccggtccctgactcctgttttagtacagctcctgggctacaaacggtttcttacaattttaaatggttagaagaaacatatttcgtagcacccaaaaatcccttgaaactgaaatttcagtggccataaaaatcatttattagaacccagttacactgactcacttacatacaatctatggttgctatcacactaccatggcagagttagtagttgctacagagaccaccataaagcctaagttatttaccgtctggtctttcacagaaaaagtttgccaagccctgctctggaattcagacagcctctcagcgccagccttctccaggcagccctcgcttgcggcagctaggttttccttaggcgggaactgacctggagctgggcgcccactgaggtttgcaaggctggggagctttttaaataaataggtgggaaggaatgaggcaaccctctggcccagattcagcctcagtgatctctgtcccatcccctgagcctctagctgggggaaagccctgtcccgttcctccagagctcagggcaccccccctccctaggttcttggctccttgggttgtttcttggctacttttctcggtgaagggggcaggtggtctttaagttcagagcctgtgggctgaggctgggaccagggacagtaggaaaggagggaggcagtagggaagagcaggctccttgccttcagccaggggaggtgcctgagcccgggcagtagacaggatgcaagggcagcacgaagctggaccagtcgcagccaatctggccaacaagaggagtcctggggctccacctgacgccatgggccctggggtgctgttaaaagcgctgttggtctgagtgctttccctggtgccgttgcacagggattcactgttccaaacagcccgtccaacctactctacagatgggactcccaagacactacggggatcccctgtgtgccaagtcccgggggaagctgctagagaaggctgggacgtccttgctcacctctggcagggacagatcagagtcctctgtgtgacactctgtgtccccagttgaggaaggcggaaggagctgcgggctcctttggtattctaggctggagagccacctggctaggtgggaccctggacactcagcccatctgctcctctggtcctacaagccgcccaccctccgagaacccccgcctataatgcagtttacccctccccgtgccagcacgcagagttcctggcctctcaccggggaaagctctgccccgttcctccggagcccagtgcgcccctggccaagttctcccagcgtccactctagggcctgctagcaccctctcgggcggcgcgccctctgcgtacctaaggagttcacgcacagttcggcggcaccgcagacggggactcccaggagccaggccccggcgcagagcagcggcagcgtggcccacatcgcagcgctggcggcttggctcttgcgctcagggtccgcggaggtggcggcccagagcgtcaactgggagcgcggggggggagcggcacgagcgtggaggagcggcgggagcgcgaaggggcggagcgagcgcggggcggagcgagcgcggggcggggtgggcggtactcccccgaggccgggctcgcgggagggggcggcgccgactaactcgccagctctagttcacctgtcggccggccgcgtcgctcccttatctcctctgggaggaagggcttatctgggtatcaggcctggctgagtcctggatctgcctggactggctggcaccgcgcggggaggtctcagcctggcctctccctctcccagcctgtcgccatccccacgtcccccatctccctgcgtgtccccacctcgcacccccccatctccctgcctatccccaactcgcacccctcatgtcccttcctgtccccacctcacaccatgtccctgcctgtcttcaccttgcaccctccatctccctgcctgtccccacctcgctccccctatgtccctgcctgtctccacctcacacccccatctccctgaatgtgcccacctcccaccccctatgtccctgcctgtccccacctcccacccccatgtccctgcctgtccccacctcgcacccccatgtccctgcttatccccacctcgcacccccccatctccctgcctgtccccaactcacaccccccatctccctgcctgtccccacctcagactccccatgtccctgcctgtctccacctcacacccttatgtccctgcctgtccccacctcgcacgccccacgtccctgcctgtccccacctcgcactccccatgtccctgcttgtccccacctcgcaccccccatctccctgcctgtccccacctcacaccccccatgtccctgcctgtctccacctcacagccttatgtcccttcctgtccccacctcgcaccccccatctccctgcctatccccaccatacccctatgtccctgcctgtccccacctcacacccccatgtctctgcctgtccccacctcacacccccatatccctgccagtccccacctcacatccccccatcttcctgcatttccccacctcacacccctatgtccctgcctgtccccgccttgcacctcccatcttcctgcctgtccccacctcacaccccctcatgtccctgcgtgtctccaccttgcacccccatctccctgcctgtccccacctcataccccccatgtccctgtgtgtctccacctcagactttcccccacactccccacgtctccctgccctggttaaccacatttccctggcttcccttttgcttggagtggacttacaactgaagaagctagacgacctccttgtgaattgttttgccccctcaacagacattttagtctttctgctgaggaagctacattaagagctgtagggccattctctgtagtttgcaaagctaaagaagatggtatgtaagggtctgggtgtgagacagacagaagaacgtgcgttccaggctgaggaggccggtgctgtcactgctttgggtgaggagagggtgattcagaccagcctgtgccgtagcctcaaatgcccagtgatgccctgttcttcacttacatcatcaccttgcaaagtggcatgttgttgaccccccattttacagatgaggaaactgaggccacaagagtagatggtaactttcccagtctgtgcgcagagagtgtctgaacccagccttgacctactgcagtgctctctgctctgggcttgctctttctctgtctcttcatttttaaatttttatttatttattttgagacagggcctggctctcttgccacccaggttggagttcagtggcatcatcacagttcactgcagccttggcctcccaggctcaggagatcctcccacatcagccttttgagtagctgggaccacaggctcgtaccatcacgcccagctagtttttttgtatttttagtagagatggggtctcaaactcctgggctcaagtgatcctcctgcctcagcctcccagagtgctag

SEQ ID NO: 1241967 - DNA, 4001 bp, Homo sapiens
cagttatagataaaatatgcattttcactttctctaaaagctggaagagctattcacaacagacactgtaatgcctagctccagagaagcatcattttaatatcctgtttattgggaaatagaaaaaaaaagaaatctgagaaaatttagattaagttacaaaaccatatattaaaaaatccatataaaaatagttaagaaaaaatgaactttcaaaaataagtagaatgtaaaattgggtagtggtaaaagttatttgaaatatattataccacaaaattgggtaaaataaacaatgcacagtttaaatatcaggatcaatatatataatgattaaaatatttaagtgtcttttaatactactgatgcaaatgataaaatattgtcttgagccatattcactggaataaatggttaggtactttggcaatgagtaacttggttgaaagtacatttccttcatggcaattgtcaggcaccaagatttctaagtactgatgagtcataagattgggccaggggtgttcctgtagatatcaaatagcccaaatctcatgaagttgctttgtaattggcaactagtaagtaaaaaacaaagtcttcctatgatcagtacttacaaatcatatctccgtaagcagttaagcaaagatgatagtatttttatacctgatatgcagcctttcatattcatgaatattgttagtgatgtttatgtcttctgtgaaataaccttactagagatataaaaatatacctttcagataaaatcatttaatcatgcaacaatgcacaattacagaaactaatgttaaaaagtgtgtacccattaaagaaagaacctcctgtgttttattttaatcaacaggtttttcctcttgtttatttctctagtaatggtattccaaacaataaacctgaaataataactattagagtggaatatgatgttctaggtagaaagtattttagcactggtcattagatataataatctctactgctaatgatgacattcataatttcatgaaataagacatataagaaaacccaagcttaaaaaataatgaaccattccatacatatacacactccacacaaaatataaagattatatcccagtaaaagagagaaaagaagcattattgaaaccacatctgcacagaggtagttaatcattaagaatcgaatgtgttggaataaaaggaaaaccttaaattacaaacctagatgtcttcatcatggtgaaatgcataaatttcagggctttccagagatcccagaccttaggatctgccagaatccacccctaaaccctcagatttcaaccttaagagaatttctctcttaagagaatctttggatggctcaaggactctgacactcaatccttccaacgcactgggaaacctggtctgaaaattctccagatatctcattaaagaaacctagaccatcatcatcattctgcgttgtttgtttccaggtctctttctacgcactaaaccgaagaagcatggaaacttcctacaaaacattatgggagaagcatcagcaatctgcacgtacacaacacttttcccccgcctggcagccgcatcagcagtggcgctagcattaggggtgctgtttctcctttagaatttgaacttatcagacctactggctcctccacccaccgccccaccccccgctcttttgcttcagaaatacaagagaatgaggacatgcttctcatctggacctgcatttggaacgctgtcagttaatgcggagggaagggggagaaagttacttcgcagacagcgatgtctcaccttccatgcttgttgccatggagatgaagtccagccagtagacttaagtgttggcacgtttgtctgtgttcgctgatcggttcagtaacaaatgtagaaggcgtgttctggaacctgcgtagagtcacagggccctggttagcgctttcctggcctagaagtgtaaatgtctgtgtctgttggtgagacagaggacgtgggcgcccgccgaagtacgtgtgcgcgcgcgcgtttgcaggaaaacgtgcatggatttcttcggtgtggcagtgtgtaaatatttgcgctcgcgtgtgtctgtggcagcatctgtgtgtgtatgtgagactgaaaggaggtgggagatgaggaggggaagggaatcagctccagcagcaacaggctctattcttcagttctgctaaaagaaagaggaagagaggaagaaaaaaatagacactccttttttttctcacgacacaccctgaaggttagcaattagatttcatcattatctttgtttactaaggcagtgagggtttaattgatttactgctgaaatccttgttttgctctctttgctgcattcctggctgtgctgcgggcattttgctgtgctttggtgacagccgttttcagtagaacagtaggcactaaattcttacacgtttcttcttatccggtaaggaaaattcaggagtgaaaggtgtattgatttaactggagactgaatgtgtcgtttggagttcttttcctctactctttcccttctctcttccacacaaacacaactgaatccccttccgtttctaggagaaggcgcctaggcgctgtccgtagtgctgaaatggtgcgtggtgagacctgtctccccaacacaagctagaagacaacaaaatagcagccaggaaacgctctgataaagctctagatagctgccaggtacgttttctaaacagtgttgaatatgtagattctaaacctaaccgacgttgaaagcaaggtaaagcaaagcaaagcaaaggaaaacaaaaaaacaacaacagaaaccttgctctttatccttattttaggggtctggccgtttcaacaaactcagttacagggttcccaattctatttatgttttgcgactctatccagaacctacaagttgcaagcacttttagattccctacaatcttaattattcaccttataactactggactgtgagtcgttgggggaaatgtagatacagaattgggacactcatctaaagaaaatactttgaaaacgtaatgtaactgcaactagattcaataacaaagtgaagacaaacttcatgattatttagagtatttactgatttaggaaatgtaatggtcttacaaaaaaatgggcaatgtataactgagagttcatataagaccacattttttaaaagttgttttttgattttaaactattaagatgtcctaaaatgtaggtgaactaactgccctctatgaaagactgaaagacatatcttattctagggacatttccatggccatggttttattgaccctttttaaacttgccaagggccacattctttattagcactctgggctggaacagtgcttcttgaagtataacatgcatatgaatcttcaacgatcttgctaaaatgcagactctgattcagtaggtgtggggttgggtctcagattgtgcttttctgacaatttcctaggtgatgccagagattactagttttgggaccaattaaagtagcaagatgcagccaggagtggtggcttatgcctgtaatcccagcactttgggaggccgaggtaggaggatcacctgaggtgaggagtttgagaccagcctgaccaacatggcgaaaccctgtctctactaaaaatacaaaaattagctgggtgtggtggtgggtgcctgtaatcccagctactcaggagactgaggcaggagaatcacttgaactcaggaggcggacattgcagtgagctgagattgtgccactgcactccagcctgggtgacagagcgagacattgtctcaaaataaataaataaataaaaataaagtagcaagatgctagagatattgaattctggcaatgcagtcagtcatagattgtgggaaaggagatcattttattccatctattattctatgtatgtttccaaactgttacaaaaataatttattcaaaat

SEQ ID NO: 1241968 - DNA, 4001 bp, Homo sapiens
ggggtctcgccatgttgcccaggctggtctcaaactcccgaattcaagtgattctcctgccttggcttcccaaagtgttaggattaacaggtatgagccactgtgtcttacctaaaaatgttcttctcaaaaggagacataaaaacaggacttctggctgggcacagtggctcacgcctgtaatcctagcactttgggaggccgaggcgggtggatcacaaggtcaggagtttgagaccagcctggccaacatggtaaaaccccatctctactaaaaatacaaaaattagccaggcgcagtggtgagcacctataatcccagctacttgggaggctgagggaggagaatctcttgaacctgggaggcggagcttgcagtgagctgagatcgccccactgtactctagcctgggtgacagagcaagacttcgtctcaacaaaaaacaaaacaaaaaaacaggacttcttcactttcacttaggataaaaaccaatgtccaggctgcagcattagaggcacactcagggaggtctgtctaacgcaaaaatgagacagattaaaagagcccacactcgaactccatcctttcatggagttaacagcaaaagtggtactatttcctccaatacctcgcagcaccccagccaagacagcagggatcctgttctgagcaagaggtggacaacggaggacttgatgagaacacgggacagacacacggagggcagagagcgcacccaccggtggccggtcaaggtggccgggtgtcacccaggatgggcttgcctggcacagggcacccgccaccttccccccacgtcatggtctgcaagggccatttctagtatttatcaatgcctgtgtctcaactcaggcaccagattacattcgcctgtttccaaccccgcatgggttgaaaagattttctgttcatgtctcagggccagcccgggctcctcagtttatacccttgtagggaccacgccctgtggagcgagctcaggccagggacgtacagccaccgccacagagggcaggacgagtcaccgtctgggtgcaccaagggacggggtagggggtggtcaggcgggcggaagcattctagacggtgttagtggtgttaggacatgccaggccggatgctgctcagcagtatctcttaccactgaaatttatcaagtgagtgtagaagaatgactctcgatgaaatttttctatgtccaatatggtgggcccctcaaggctacttctcaaggttttcttggaaccacttttgtctgcaatgagggactctagcatggttctcaccatgtaaagctggattatccaaggaaacatttgtgggggagaaaatatacatggtacattagttatgccaaactcaaaaagcccatgagagaaggactgctccgctacgccctggtcgggagggccccgcaccagctccccgaggggtccgggtgcctgtctacgcggccacgttgctgctgctttggggaaagaacaacttgtagcggagcagttcgcctccgtgccataaacgtcaagagaaacaaatgatgtcttaccaccaaaggttaaaaggggtaggtaggtgcacgactgcctcagaaacgtgttaaccgcatgcaagagcctctccatgcccagagacttgagctgcctgagcagctcggcagagcccaaggactcggccatggtgcgcaccaggtagagctagacacggacagacaggagggagaggcaggagagagacgttagtcactcgacacacacaccccaggcagggacacgggacgcacgcagagggaggcagggagggtggctggcaccacgcacaggccgagggccgtccccctgaccctcctgcagagccagcagcgtgcattgctggtgactttccagaagagtggcagaagagattaaaagcctccggcagagatgagggagaagaccagccccaggacggaggacagacgcagcggtgtggattaaaccgggtgtgaaagtcgtgagaagcacctcggggaggcctgaacacaccaggagagaggacagtgggcagcttaggaccatgacacacgcaagcagcacctcacagtttcccacgccccatctacagtcatttgcagacccaacgtaaaaattatacagacattcaaacacccatcaagaaacacagaatgaatacagacacgtggacttgtgcccacatttttgggatgggagttgaaatggagtcagactcctttttagtgcacatgacacatctgacaatcaaggcacgtctcctcacgctcccaactcacttgggtgggaaacagaggagcagcagaaaccacaggcgccactttctctgcctgagcaggcagcgaggacctcatttaacccgggcctcaccagccccacccgctcacagctcagggtgggtccccccagggagagggtgcaggcggggctcaagggacgagaacctgagtgctggagggtcccacggcgcggcgtggtacttttatgtcgaagccgctcttggggtccttctcgccccgcaaggctgggtcattgaagggctcatgccccgtctcccagtcacacacggtcttcctgatggcctgcaggacactgaacaccccaccaagtgatcagcaaggcccagaggccgagacctccagcctcacaatcacaccatctcctcacccaactacaaggctctcagaacagcccccatgaaaatacaaattactctgggggccatggagggatgtggtaatggaccagctcaacaggaaagttaaaaaggagtctgccttctggagagtattactacccccagaagactgccctgagctccagttcgcatctgttagcccagggcagcagtgaggtggctctgagtcatgctgtgggcagggagagggcagaacacagcctccgcacggagcagagctgggccccgcctgcccgcagctggctgtccccagtaaccaacaggaatgtgaagtcacccacatgaccagagcctggccatgtctctcgactggtttggaacacagcctcatcaccaacagggctccaccgtgcagagacccccataaggcaccatgcatgaaccacaggcaccgcgagcctgggataaatgcaccttgtcccggggtcctcagactccctagacactcggcagctgacttactgtccattgtttgggttaataattggacccatgcattacttttagaggtaattcaccaagagggcatctgaaggttgaagataaatatattgaaatcatttttgagaatttaacgctcctgttgtttgaatccaagttcatccgaggacgtgtgggcacagcgggcacagggcgtggggaaggctgacctctggatgacgttcttcttcttcttgatggcctgccgcagcggctccctaagggtcacctgggagaagtcctgcagtgcggcatagacggtgtgccggatggcgtggttgaacacgctctccatcctgcccatcagcacctgcaggcctttgatcatggcgatcacctgcgggggacacagcaacagggacggcccttcttagggatggcaccaagcctcctctgcctggcacatgccgggggctgctcctcctcgcccacagcaccttacgccctcccgcgttcgtgccctgcagctgccctgccccaaaacgtcttctccaaagccatagtcaatggaactgtgcccgcatctgactccccatcagaccatgagcacctggaggacagggatgcatctgactcgaaacacacatgcatccaccccagcacaccctcctgtgatggaattcaaataggaaagaagaaaaagactcaggaaagcaggcatgatattactagaaaaagaagttacaagaggttgtagtccaaatcccatattgttcacaacaaaggcgcagtgaactaccattcacagaaaaagcctggaagactctgatggaacataattacatgacaaaga

SEQ ID NO: 1241969 - DNA, 4001 bp, Homo sapiens
ctgtgtgtacagactatatatatcaacatgtaaagattgctaagatctttaagtaaccaaacatcattaagtgaaaaatgtatgacgataatatatgcaatatgatctcactatgttatttaaaaaattacttatgcacagaaaagactattatactacttagaagtaccgagggaatttcacttttagtatacacggttctatgctgtttaatgtttttaatgaactatagttttgtaatttttctcatcactttatcattttagtctctctctcaggctgtatccgagagccacacttttcagacccttgtatctttactcttcagggacaaaccagagcatagctgaatctccaacgccttatgctaagcgaaacaagccagactccaagcccacatgtgacattctggaatgggcaaagcaggaggactgaggaacagacaggcggctgcaagagcggggaggagagaggctgccttcctgagtatcctgactgcggtggaagtcactacagtccatgcacctgctacagctcactgaactgaacaccaaaaagtgaatcttactaaaagtttaaaataaatttaaacacacacacaaacttagggggtacattttctttgagcgcagcacagacacctgtcttaacgcaggaaacgtcctccgccacgactccagggcgcctcggtcgcagtgagggcaccggcactatatccctactggccctacgagtgcacacctgctacggcccgcgcccactcacagcgtgactcgttcttccaggctccgtgcctgcagatctagacatcacttggaaaaccgctggccacccgcagggaaaaggcagcatgcgtggggcccccgcgggtcccggcctggccgggactctgccgccaagctgtcaagcatagcaatgtgcgcactgcaccaggcatcaccgcggctccgaccacgcctcattccggagtccgacggacgactgcaagaaacaccaccgctcccggcgcagccacggtgccctccgccgccagaaaacaaacgctcccgagcctcagtccccagcggcgaccacgcggcgctgggctcaatcagcagccgctccctgactggacttaatagcggagctgacaccgtccagacgcccctctcagcttaaaacacgttccatcaaccccgtttcccgattattcttgcacccttcttgtcacacccacaatgtgctgcaaattaagctcacgcatttcagccttaaaatacacaattcagatgcttgtgcgaaacagtgctgcctccgtaacgatcgcgcctccttaacaaagcccaaaactcctctctccaagaatgcccggaatggctccgcggaccaggctccctccgctcctcacaggggcacgaaacaaaaacgggttcagatcttgctgcgcgaccttagtgcaacattaacaatctgcctgctccttactttccaacaaaaacgtcaaacactaaggtattccttcgccactggagctgtgccatgtgccggggcgcggaatccgggatccgggggcgcgaggcggtgaacgcgggggcggggagctcggggccgaggccgaaaggccgggggcgcagggaccgggaagccagtgcagggagtgcggggacctggagcccgggaggcgcgggagcccggggccgggacctgggggacgcggggaccaggacgatcccggaggccgcgccgccggggaggccgcgccgccggggttgggggggaggggggggtccgtcccggccccgccgccgccctggccggcccaggttccgagggggacccggaccccgcggaggccgcagggcaggcgcgggcgagcggggttcctcacctgcgtccgcggcggcttgggggtcctgggcgggccctgggagtttccttggccgagtgagtcactcgggctggccgggaatgcgccaggaaacactcggcctcctccccttcctcccggggcgggggctctcccggctcggcctcttcctcccggcgctcctccctcccggccgcggccccggccgctccctcctcctggcggggcatccccggccgggcggcccctttccccacgccagccgccgaaggtgtcctcccaggcagagagcccctggctacctgccggcctgggtcaccgcagcctgcgcgggacggcggggtcggagcggagcgggcgtggggtcctcctgcgggtccgtccggttcggagcgcgaaggaacggggtccgcaccctgtcccggggctccaccgggtcagggcgggggttggcctgagctgcggaaggagctcagggggacacccaggacgcccgtgtggcgccgccccacttggcaggaggcgctcacctgcgctcgtcgggagggttccaggcgcgggtcccagctgcaggtcggcgcgcagagcccgctggggacccccccggccggcccctgcggccccattgcctgcgggaaccagggacaaatccgtgcgcagacctgcgggaacggcggacggaagaaaacctgatttgagctcgtgccaaaaaacaatcttgaaaggccggtgaagaaacatacctcacacggaaacgctgagtggagtcagctggtcacaggcgtgtttaggaaaactgccctaaacgccccgctcagccgcagcaacctcactccccattcatccgcgacccctggttcttacggagaacagtaaggatgggcatcagatattctagtctggtctctagattatgaaggtttggttacccccgcttgtgctctgcggtaaggcaaaaagcagcaaatgaatcctgaccagcggattgagacaatctaccagttgactcaatattcggatatcactttctcacattcctgcaaaacaggggctttggataacattctggttcccagtccacacattttcaaatcagcagattactccttttctgtgcctagggtggagtctcaaaattagattccaaaggtttttacattgtagatgacatgatagaacccaaattcaagttatactgtgataatttaaaatattgtaatcccggccgagcgcagtggctcacgcctgtaatcgcagcattttgggagtccgaggcgggcggatcacctgaggtcaggcgttcgagaccacactggccaacatggtgaagaccccgtctctactaaaaatacaaaaattagtcgggcatggtggtgtgggcttgtaatcccagctactcgggaggccgaggcaggagaatcgcttgaacccaggaagtggaggttgcagtgagccaagatcgtgtcgctgcactccggcctgggcgacagagcaagactccgtcttaaaataataaaatattgtaatccctagagcaattaataaaaaataatacagctaaaaatccaagaaaagagataaaatagaatacaaaaatatgcttgatccaaaagaaagcaggaaggaaggagcaaaaagcacataaggcaaagacaaagagcaagcagttagacttcaaccacattagtaatcacattgaatgtaaatggactaaacatgtaatccgtttactaactgtaaatggattaaaacacagaaattgtcacattggattaaaaacgagacccaaatatattctgttttaagaagacataattttggccgggcacagtgactcatgcctgttaatcccagcactttcggaggccaacgcgggtggatcaactgaggtcaggagttcaagacgagcctgacccacatggcaaaaccccgtctttactaaaaatacaaaattagctgggtgtggtggcacatgcctataatcccagctactcaggagactgaggcaggagaatcgcttgaacccgggaggcagaggttgcagttagctgagattgcgccattgaactccagcctaagcaacaagagtgaaacctggtctcaaaaaaaaaaaaaaaaaaagacataatttaaatataaggacacaaagaggctg

SEQ ID NO: 1241970 - DNA, 4001 bp, Homo sapiens
tgggctcgggtgagctcgggtgaacgcagcgagcgagggcagaggccagcagaggcgaggagtggatgctgcagggccgcaggccgggcagagaaacgcataccgggtcgctccctgcttcgccgccgcctcctggcagggccagcgaagccagtgctccagcgcccccgtaacacctcaaagcgcacggagtccgtgttggggaacttggcggcagagtgactgggacctaggacctgcggtggggccgccgccgcctccgcggggccgagcgcctggacctcgccctgaggtaaacgcgggtcgacccggggggcggatgggctcgggctgtgtcgaggggaggcggaggtgagcgacccgcgaagagcgcaggagcaggccgggggccacgctagggcggacccaatttcggaatagcgcggcccgggcggcggcgtgcgctgggaggaatgctgggtctgtcgctagcgccaaacttgaccacgctgcgaccttttcactctgtgctctgaccttcaaatctccctcccccgattttttttttttttttttttttgagacagagtttcgcttttgttgcccagggcgggagtgcagtgacatgatctcggctcactgcaacctccacctcctgggttcgggcgagtgtcctgcctcagcctcccgagtagctgggattatagacccccgccaccatgcccggctaattttttttattttatttatttatttatttatttatttatttatttttgtagtagagacagggtttcaccatgttggccgggttgatctcgaactcctgtcctcaagtgatccgcctgcctcagcctcccaaagtgctgggattacaagcgtgagccaccgcacccggccttctcccaatttttaaaactcgctggctgggctgacagctacagggccaggaattcaaaacttagcctcaccagtctcccctcctcagaccgaggaggttgttttgttttgtttgagacagaatctcactctgtcgcccaggctggattgcaatggtgcgatctcggctcactgcaacctctgcctctccggttcaagccattctcctgcttcagcctcccgagtagctgggattacaggcgcctgccaccacacccagctaatttttgtatttttagtagagacggggtttcatcatgttggccaggatggtctcgaactcttgatctcaagtgatccgcccacctcggcctcccaaagtgctgggattatgggtgtgagccaccatgcctggccagacctggggtttggacccattaaagagcttccttacagatggctggcggtcttgccaccaattgtttcaaaagtagatgtctggtttagagtacttaagacattcacagattcaaatgttgaattttgaaatatccctgatatatttctgtattgtattaccaaaaaaaaaaaaaaaaaagaagttagacaggagtttggaaccagagaacagcctgttgggggagtggggactacagcagggctacccaggcccctcctcctccctgtcccttcggctcccaccctctgccaggcttacctgtaaatcgggccatacttctggaaattctggacatggtgaaggtggactttgtgtgtgcccgtctccctccagaaatggtacaggtttagccagccattgtcaccaggagaggggatctcattgaaggggcgaggactgcgggtggagatgccagctccctcgccagtgggcaccctgagacgccccagcccctccctgggggcactcagaaaggtctggcagcctttgaccaggactgagcgtgggggaagacccttggccagcatgctgtccccacagctgtgactgtacctgctccacttcagcggggactgctaggatgactgtagccctgggccaccagggccaagattataactaccagctcaaggccataccagaagctgataaaatgttcacgtccttcctcctgctgcaggctcaaacccgcagacagctcctcccctactcggtatgaaggttcagtctggaatttctgcagcgtgaggttctccaaaggacagggagacccctctgtctctgccctcagtgccagccctagcagactcctgaaatatctgcctgtgcttttgcctgagctggggcctcccactggcccctgcagcggagtccatgccctggcagccattggtcaagactgcagacaacctgtgtttgggggaaatgaggggcccaagagaaggtcagagctatcttgccagcttgggcaacatacgtcttagttatggccccactgtatagacacacatcattgaacaacagggataagttctgagaaatgcatccttaggctattttattttattttattttattttattttattttattttaagagagtttcattcttgttgcccaggctggagcgcaatggcacagtttcaccttggaaccctaatcctcgtcgtctctccccagttgacccagatttggggctgtaattcagtacagctgactcagaggggctctgggtcccttgagctgaggtctgtggtcaggctccactctggacacactctaagaccttggcaaatctggttgccatggaactcaggatgtcagctcttccctgtccacacacttgatctgtgctgctttcccctcagagctgcttccataccccctcccatcatatcatatccccagacccatccttccagcccaggtcagcccccacacccaccccccatcaccctgcacctaccactttcccaaacaacaagggtcagtcacctgtagagttttcaagtcatttcaacaaaattacagcccacttggtaaaaatgtgtaggtcagaaaacatacatgtgccatgtagagcatttcatgacagcaatctacactataccttatacttatcattggaaggtacaacttcttgctttttttccccaaaatcttattttctggcaaataaggcatttaaaacacacatctaagagacagaaaatagactggtggttgcttagagctagggggatagaggaattagaggatgggacataaagtgtgtagggattcttaggatgatgaaaatgaaaatattctaaagtatattgtggtaattattgaacaactctctgatacactaaaagccattgaattgcatactttaaatgggtgaattgtatggtgtgtgaattatatctcaatagagctgttaccaaacacacacacacacacacacacacgagtgacatcctcctggcctcttctgttgtatgtgtcagcccatagatcacccacaatggcaaaagttgtccttacacagccacttgaccccagactccaatactgttgaaccactttcaacaaatttagagcaacagtttttagaagaaaaaaaaaaagtacttatcaagagtggttgttgctcttcccgctggagtgaccactacctcatcagtcatgaaccttctgataaagagagtatggagaaagcctgttttgcctcactgatgaccttgagcctggaatgacatcagccaaggaaggcagtgtctcacgagcagcggcagggtgatgagcttccacaaagaaaagcagtcttccaaggactagtttttcctccaagggtctcagcactgaggtgacatttataactttctgacttaaagtcaatcccattgttctacgcagccccacattcctccctcagaaggagccctaatcgatgtggcatggaagaacttgtggtcctcttggcagccaccccaacttccgttcaggcctccgcacctcccccagtgttgtggggcactgaccgcctccccagaagtggcccgggctggaggttattgcctcatcctctccaatggccatggtcacatcacagcataggccagcgattcagtttgggccaatgaaacacagggaaaggtttgctgtggcttctgggagaatagctccctcacttctctga

SEQ ID NO: 1241971 - DNA, 4001 bp, Homo sapiens
agagcagggtgagagttccatgatccccaataggtagggactatgccccaagccagcatgaagcagttacagaaaaaagaccatcggtccctctgcctcccataaagatttatggggatcacatctcttgaaggggcagatgaggcaggaaaatagggtctgaagtgtgaagatcgattcacacttcagctataacaggaaatatcctctccatagggtgtatgactatgtaacttgaatacttcatcctctccatttacataaggtgtatctgaagtaaccaatggaatcctctgggggtaaatgccccacaattctgtaacgggacctttgagcccctacgctccgcctgctcccacactgtggtgtgtatgttcattttcaataaatcccttcattccttccttactttgtctgtgcattttgtccaattctttgttcaagacgccaagaacctggacaccctccaccggtaacaaaggggcttaataaaataaggagttgctactgagggtctaggaagtggtgaaaagggaagagaggaggaagcaaggataactagagatctatgtgaagtgagcacgggacagaagcactaataggcctaggagagagggggaggaaggagagacccagcggggcgcaacctcccaagcccagcactcaaccttgaatagggtggggtgcggggtggggggagctccctgccaccaaccagctatcaaaaggggcagtttggactttaaaggagttgtgagagagggagggagcagctgaagccccaacacaaactagcctgccttctcacccacccccagcccagtcatcaagccggccaacacatcttacccttccctcttcgtgactgacccattggaatgctctgagttgtaaagacctttcacttaaaggaaaacgtactgtccctcctggtctcccctcccagcccccaaccacccctgcgccacctccgttccctctcaaccggactcttagcaaagaacccaggtgtggctgaaaggctgcccaccgtgggaacagctttagcagttttcccaggaaaaagccacaagccctggaggcacagaggcccaaagacaaaaaaaaaaaaaaaaggcctttcctcctagcaggaagcaagcccgattcttgggaaagggaagggacagactcagagcctcagggccaaggggtgagatccagcaccccagcaggacaggaatctagctgggtgacctctctgagcctcagtctcctcctctgaccatggggacaacaaacttcgcttgcaaggtgtgcggagggtaacggatgtagggaggcatttagtagggcttgttctctaaccacctctctccgagagtttcaaagggagtgggatctggggaaggttgaggcctcaggcctgggaactaggaatactttcccttttacccaccaccatcccaggcctggaagaagatcagaagttggacaggagaggtccggccgcgcggacgtcaccttagcgcgccactgtcggctccggtgggctcgggtgagctcgggtgaacgcagcgagcgagggcagaggccagcagaggcgaggagtggatgctgcagggccgcaggccgggcagagaaacgcataccgggtcgctccctgcttcgccgccgcctcctggcagggccagcgaagccagtgctccagcgcccccgtaacacctcaaagcgcacggagtccgtgttggggaacttggcggcagagtgactgggacctaggacctgcggtggggccgccgccgcctccgcggggccgagcgcctggacctcgccctgaggtaaacgcgggtcgacccggggggcggatgggctcgggctgtgtcgaggggaggcggaggtgagcgacccgcgaagagcgcaggagcaggccgggggccacgctagggcggacccaatttcggaatagcgcggcccgggcggcggcgtgcgctgggaggaatgctgggtctgtcgctagcgccaaacttgaccacgctgcgaccttttcactctgtgctctgaccttcaaatctccctcccccgattttttttttttttttttttttgagacagagtttcgcttttgttgcccagggcgggagtgcagtgacatgatctcggctcactgcaacctccacctcctgggttcgggcgagtgtcctgcctcagcctcccgagtagctgggattatagacccccgccaccatgcccggctaattttttttattttatttatttatttatttatttatttatttatttttgtagtagagacagggtttcaccatgttggccgggttgatctcgaactcctgtcctcaagtgatccgcctgcctcagcctcccaaagtgctgggattacaagcgtgagccaccgcacccggccttctcccaatttttaaaactcgctggctgggctgacagctacagggccaggaattcaaaacttagcctcaccagtctcccctcctcagaccgaggaggttgttttgttttgtttgagacagaatctcactctgtcgcccaggctggattgcaatggtgcgatctcggctcactgcaacctctgcctctccggttcaagccattctcctgcttcagcctcccgagtagctgggattacaggcgcctgccaccacacccagctaatttttgtatttttagtagagacggggtttcatcatgttggccaggatggtctcgaactcttgatctcaagtgatccgcccacctcggcctcccaaagtgctgggattatgggtgtgagccaccatgcctggccagacctggggtttggacccattaaagagcttccttacagatggctggcggtcttgccaccaattgtttcaaaagtagatgtctggtttagagtacttaagacattcacagattcaaatgttgaattttgaaatatccctgatatatttctgtattgtattaccaaaaaaaaaaaaaaaaaagaagttagacaggagtttggaaccagagaacagcctgttgggggagtggggactacagcagggctacccaggcccctcctcctccctgtcccttcggctcccaccctctgccaggcttacctgtaaatcgggccatacttctggaaattctggacatggtgaaggtggactttgtgtgtgcccgtctccctccagaaatggtacaggtttagccagccattgtcaccaggagaggggatctcattgaaggggcgaggactgcgggtggagatgccagctccctcgccagtgggcaccctgagacgccccagcccctccctgggggcactcagaaaggtctggcagcctttgaccaggactgagcgtgggggaagacccttggccagcatgctgtccccacagctgtgactgtacctgctccacttcagcggggactgctaggatgactgtagccctgggccaccagggccaagattataactaccagctcaaggccataccagaagctgataaaatgttcacgtccttcctcctgctgcaggctcaaacccgcagacagctcctcccctactcggtatgaaggttcagtctggaatttctgcagcgtgaggttctccaaaggacagggagacccctctgtctctgccctcagtgccagccctagcagactcctgaaatatctgcctgtgcttttgcctgagctggggcctcccactggcccctgcagcggagtccatgccctggcagccattggtcaagactgcagacaacctgtgtttgggggaaatgaggggcccaagagaaggtcagagctatcttgccagcttgggcaacatacgtcttagttatggccccactgtatagacacacatcattgaacaacagggataagttctgagaaatgcatccttaggctattttattttattttattttattttattttattttattttaagagagtttcattcttgttgcccaggctggagcgcaatggcacagtttcaccttggaacc

SEQ ID NO: 1241972 - DNA, 4001 bp, Homo sapiens
ggccaggaaaattatttacttcacaatcaggaagaaatgctgtggaactaaagttggggtatattcttgaatttgattttattctccagagccctaaagttaaccagctggaatcatttttaaggaccattctatttaacttttggaaatgaagcatctgccttttaatggaaaaactacttctcattgtaaagatagcacacaatgttcttggctgctttggtctccaaaaaaagggaattgagatatctccctgtgtccgcattatatcctgagcctcctgtgtcaacaaaacaggccagattgatagcttttttttttttttaataataagtaaaaagtagcagcccattctgtgaagtatcaggcagggcaggctatgcaggcatatctgcctctcaagaaatctcaagaggcttagggattcacactgaaaggctccatataaccaacctcaaagccatggtattcagacgagaacccaagtttatcgtgcattcaaaagttctgttcctcaaaaagcatctacaaagtgtgattagctaatgaatccattaatcaaatattcctacttggcacaagtccctgctgtgagaggacagttaagataggtccctgccttaagaatattgtaacccaactgaagaaataggatgtggaagaactaagatgtcgattaacagcacaaggcacagaagaactaaagtgtcaactaacagcacaaggcacacacagtgtaagtctcagccagttcatatggcccatatccaacaataccaacccgtgttgaacatttattatacaagtgctttacaagtattttcttattaaagcttcacaaccctatgaaatagatacaattacagtctctttaaagaacttgagtagcatatctaaagtcatgcagttaaaaaacagtttcaaggtcaggtctgattccaaagcccaggtgcataaccacagagcccctgcagcttgtagagctcacagtgcttgggactggcctaggaagtcaaggctagatgaggaagggtactcggagttaggccttaaagtgggcaacactgaaataggccagtgatggagataggtcactgtgtggcactgcggtggaaagagggttggagagagaagatagaggagaagaggaaagagggcagagcatggcagctgcttgggcacagccactttagggtgagagatgagtgaagatgtctaccttgtaggccatatcaacatgtcccccttcttctgtgaaaaatgccatcatcccacacaggaagagttggagagggatctgacagtggagtctggtaggaaaggagtctggcttttcatttgcgcttccttctgcccctcttgccccagagcaatatcccaggctttccaccaacccagcccacggggtggccatgctacaagccttttgagtcctgcatcccaagaggggcagcttcttggcctgaagttgtctaatagagcctgcctggctccaagcaggcctcatctctgctctgtctactggatctgggctctgaactggggtgggaggtggggaaatggggaggctggttcaggctaccacttcctctcctcaccattggatagccagcctttcaaggaaagtagggggccagttctgtggcatagaacagtatagttcttaggccctcctatttcagaaaaacactcaagcagtgttttccctctgctctcacaccacgacaacagtcatcaacacagaagacttctgcgaccaaatgtaggggattttcccccacacaccaagcagcgggcaccagctgggtgtcctccaactcagttccaacactatctacctggaaagagtgtctgatcccacaggttgagggctcagtcagattaagagatacatacgcgacgtctggaagatcccgagcacaggaccttccgtcctgataggataagttcttcttcaccttcctgtttgcctccacgtgttcagccctccagaaactccctgaaccctgtcctttgggccttttatggagatttcatttgttgtccatgactgaagcatgtgattgaacaaaatgtgattggacaaaaagggtatgatctaatctcagcaaggtctgtctgtccagattcttcttcctctctttgtgcagcattccttcctccagggtatggggcatgacctcctctggaatgagggtcttatgacccacaatcagattatagagtcccgccttgggtggatgaaaggagggcaaagaaggccagagaaatattctgtttcctgaggcctaaagcacctctacattatagcaaaagacctcagcaagtgtcatgggagttatggacaagaaccatggacaaaaatctatatacatgtaatcataagatcacaccccccaccacacaccacattgttctacatagaagtgccttcactatacagcttttcatttattcattcgttcattcactcatttattcaacgggtaatagtgaattccaaatcaggaactgtgctatgtgttgggggtgacatggcccctagcctcaggaggcttctattccatggttaatggtgggtattgctgagagatgatcagtcaacagtaactgcaatgaatgttaggataaagagaagcccagaaggctccacggtgttccagctgctcacagggtaatctgcctgtcttttttacttccgtatctccaatgcccattatcataccaggcacaggaagtgctcagttaagtgtttactgaattaaatgaagatctgaatgatgctgagtgtcaaccctccctctcagtggctcctccccattggccctaaacctgatacctggatgaaaagagataaggatacatgacagttcttcaagtaggtcacagaacgtttgagttgggaggaaatggacaaagctttttacatcactgccatcccctcccagtcatcatatccccacagtgggggtactttatgaaacacttggaccttcatgctttcctaatttcttcttatcctgtatgctcttctaagaatactgaagttggtcaatgttcctattaaaactcaggaatctaaactttgactcagaatttctgattgagatgtcacttcagtttccttgtgcattctcagaggctctaccctggctcaccctggagagtagggggcaagaagtctgatactactcagctttctctcctgtgccaaaaaatcctacctgcaagaattggtatgtgtattagtccattcttgccttgctataaagaaaagcccgagactgggtaacttacaagaaaagaagtttaattggctcatggttccacaggctgaacaggaagcatggcagcacctgcatctggggaggcctcagggagcttttactcatggaggaaggcaaagcaggagcaggaacatctcacatggtgggagcaggaggaagaggggccaggagagatgctacacacttttaaacaaccagatctcatgataactcactatcatgagaacagcactgaggggatggtgctaaaccattcatgaaggaccactcccatgatccagtcacctcccactgggctccaccaccaatactgggaatcgcaattcaacatgagatttgggtggggacacagatccaaaccacatcagaatgtgaatctttggggagtagatggttacagagctcctaccattaagtcaaaaggagcttgctctctgatcattttactggtctccctcaggtgctgaaacagtgtggtctctgatagaggaagtcctttctctataactgctccagctggctcattggcggggaggcacctcttccttgagttattgggctatggaaacagcaatcctgccttctggttgggtctcccaaatgggagacatccaaacagagtgattttttttttttcttaaacaatgtcaaacccgaggttcttaacatggggcttgaagattgctgtctacgttagtttcccataggtcctgg

SEQ ID NO: 1241973 - DNA, 4001 bp, Homo sapiens
acattttcctaaaatcaactttaaatctacctacatatcatcataaacaatatctatgtgaaagtacaagtttgatttttcccctaacacattaaaataaacacataatcaaggtgtatcaccccgagtcctacccaccacacttaggaaaatcatgttctcaggggaattagggatcatctgatcctttagcctcatttaacatttgggggaagcagcgctgacttgtccaaagtcccccagcaatcagtgacagagccaggactcagactccttagggacacttccctggaaatttccagctgctgtcacatgtacctccttttgaagagtggtcagatcaatgaaggaattttcccagaaccctcagttctctgctgctcaatcccaggatgcaggaaatcccaccagaccccaggacagactgaggaagagataggggacaggatggccacttcccaaaccacattgctttcagccccagctctctgagttcaactgatccacagtttaaaggcagctggagaccagctagattgagctctttagtcagagaaatccaggccagggtttttttttggctcaattctcaatgaatgaacagtttggacctcccccttttgcaggttaccagagagcagagaataaatggaaggttcccactaggctgtaagaaaaccccagactggaatcagggaaatcaggaatggatctaaactgaaaggaaactgaggcaatactttctctgtaagcttgacctaaaaagggtgtttaaattcataaaccactctctccaacatatcaggcatctctgcctgttaccctggactagaggtcagtagacccaacattctagtcaaagtgatcttggactgcacattttacttttctggggtccaatttcaacatctgagagagggtaagacaagatctctcagttcagagtacccagctggatccagagggaagagaaaacccagatctgctgtggggaacctgacagtcttaccagttaggctccccacaggagaacctcacaagacagggagatggatggttcctaccacaagtattatagtggagggaggcttcctggaggggctaaatatcaaagcacactagatccctgagtcaacaggggacagtgccaggctttggtgtgctatggtgtccccttctgcacagtgggtatcccaaggacctgcagcctttgtaagatggtaggaggccaagggagatgtgactggtgagtttttagggactggtatttccagctccctgcagttggcaatctgtcaccctgattgtctcccagcaaaggacaaagaagatggtcaatgagataggaaaggcctgggactcctgcacagatctgcctctattgtcccagctgtctaggacatctcagcactgacaagccacccttaggagggtaaaatctgccaggggtagcttcttaggctagggcagggtacagctggtaagaacccagcccaccccctccatccaccctgtccacccaaggagaagcccctgtcatcagaaagcctgagggaggggctgcacatattccagcctgccaggtggccttgatggggaagccccagggtaggcagggagacactcactaggggatggagctggagcctgggtcctgaagtcctgaatgagatgccatctgtatctagaggtctggtaccagctgtgggaccatgggcaagtcctcctcttcccctggcctcagtttccccactagggggctagactgcctggtcactaaaaacactctgagcctccctttttggaggtgctagacaggtagctacctaagaagtcctggaggcaccaaaatgttccttttattgggagagaaagggcaagccagaagtcccccagcaactcacctgaggtactgagctgagctgggaagggtggactcttggagcctgggatcacaaggatcagggaaggttccaaggaactgtcaccttcagggtgagggtgaaggcactgccacctttataggcgggcttgtacgtgtggccacgcctccttccctggagcgagctgagatggagggagaagcagcctgaaccgggctggtctctctgggattggagagaaaggtggcggagggcggcgggggtggggggtcgggtgggcaagaacccactatgggacacatctcggtgcctgtacatagaggggtgagggctgggaacacctggaagtcccaattccaaggcgtcccaagggcagtgcagaacccagccgaggagggggcttgagggagaagtcccaggacagcccgaagagagggtacgggaagctccatcctggggcgcggggactcctcttcgtcatttttgcacccactggaacgctgggcgtgcagatgcctccccagcgctacagcctaccaggactcggcaggcgggggcggggctgccccgtggtgacctccttcccggggttactgagtcccggctcgcgtgagaagcgctgcgaccccagccctgaggtcacgggggccggaaggccagaggcgccgcggggctggacctgtcccccagagcccgggcgactagctgaggttcgcgcctcttgattgaaggatcggaatggatggcgaaggggcaggctcgctgagcgctcactagcggctcctcgcagcctctaggatcgccttagtgctgattgcaacgcgcggtccctccagccaggacccaccggcccttgagggtccctcttggctcccggggtggctagtgctttgattggcagagcacagaaatccggcggcggggggccacggaaagactcgggcccagggaccacggagggggcacctggcgcggagcccccaccctacccccggctagcttgcgtgcgccggcgacatccctctagggggcagaggtcaggcggcccgtccccgccccacctggcccggaggcgcggtgcccaggcgttgcgtgagaaggaccggaggcccgcgcagccacccagccgacccattccccggcccggcgcgggggctcgcagtcacgcgaggggggagggagtcggggcggggctcttaaagggccagcctcgcgcgcggcgtggggttggggtggagggagaggaactgtcgaagggtggcgggtgcgcgattgaataaggggatgcggtgcaaagggtctaggtctgcgtgtggcttctgcctgcgaggagaggcagcctgcatgtgtccgcattttcggtccacgcctgtggcacgacacgaagccccagtgccatttggcatggcctagctgcctgcctccgacgctgtcccgccctccggaaccttcctgttacagggtttccaggaaaaaaaaagttgtatttgcgtgcctagctcaacctggccccagctaacatcgttacgcgccatccccgacgtgctccccaacccggtggcaccaccatccgtcgctggtccaggccagaaaataatcccctcacctcccattccggtcatatgcggcctcgtgcattgcacaaatatttaccaagcaactactatgtgccaggagctgttcggaggcgctggcgattgacagagaagggaacacagctgacagcactcctaatctcgtggagtttacattctgatggaaggagacaagtaatatgccccaaatctagagaatgtgagagggtaaaaagtgcggttgaaaaaaattaaacagaaaaggcgtacggattatgtgagggcagattgcaattcaaaacaagggggtcagggaaggccttgcggagagaggcaggagtgtggagtcaagaatcaatgtgcatagatatctggataaaaagtgtacctgggcaggtgcggtggctcacgcctgtaatcccaggactttggaaggccgagtcgggaggatcgcctgaggtcaggagttcaagaccagcctggccaatatggcaaaaccccatctctatcaaaaatacaaaaattagccgggcatggtgttgct

SEQ ID NO: 1241974 - DNA, 4001 bp, Homo sapiens
ggccccccacattgcaggactctgctagggccccatttccagggcttttttcttgggggctttgaggagccctgagaagggggcttcaaggatgaggaaactgaggcccagagaaggggaagagtcggctccaggtcacacagctggtctgaggtgtccagagccttcctaggccttggcaacacagcagctgtgtgggcatgctggagctgggagggaggggctgcacccaggccctgcaaggtgccccttgccacctgcaccccgggctcaccttgtcaaagtcctgatagtgctcctggactgttttctgcaggaaccacaggaacctctggttgaaggccttgaacctctgcagggcagggttaggcaggtagcgaaggatggggaagaagtccagggggttcccggaggaggcagtctccacgaactcatgagtgttcttcacgaggctgagcatctcatcgctactctcagggaagtgctgtccgaagcacatggcaccaatgacgttggccactgacaccaccacctgattgtaagggtcgaagtgcccaggccctgccatcagctcctgcaacctgctgatcagggccttagcctccttgctcacatgctcctccaggtagcaggaggatgaggaagctgggtcagaggcgatggagaaggtgttgagggcattctgggccaggcgccggcgggcagcccacaccggtccagagtctgtgctgaaggtcaagctctggccatcagtgatgagggtggaggtgtagaggtcaggccggcccttgaaatcgtcgccctgccgcaccagggcctgccggatggtgtccaggcggctcagcaccagcacgggcgtggagccaatgcggatctgcaggacgtccccgtagcgctggctcatccttgacagtgccaggtgcgggttcttccccagggtcagcacatgcccgagcaagggccagccccatggctctggtggacttttcaggcctttggggacccgaggcctcaaacccttgagcacccagaataccaggcagaagatggcagaggccaggagaagctctgtggccgagaagggaacagactgggacaatgccatctgtaccaactgcagggaaaaaaggagggaccaggctgagggttgagatggagacattcattcattcatttcctcagtcatttgataaacactgatgcgtgttctgtgcttggctcccagctggataccagaaagactaagctccatctaccatgcgtcctgggcccacagagctcaccctttgagcatcacagaatctgagagctggaaaggagcctcaagattcccaacatgaacgctggctctctcctccacacatcatctcagtttccacttctggggctggagtagaggcaagtgaccactccaaaatggggaagccaaggacagcacccttgtcagcccctggcacagcatgcatgctgggtattgtaccaaagagtccctgccagtgctggctttctgctgataccttccatatacccaagggaccaggagttccccctacccagtgacactgaggtggccaaggtcccagggctggttcaaatagcctgtgatgccccctccccagggcattctttatcaataccaggaggggcacctcctccagggatgagtccccatcctctcacagtcttggaggttggggttgggcttcagccagggccagggctgcccttgtgctaagggggaagccctccccatcgctctccttaaaaatggcttagtccaaactgctcatttaaaatcgggaaacagaagtcaagagctgggtagcaaagcccggaactcaggacccctacacctagcccaggctccccgtctttctgtccccactagcttccaggttctatagttggggatcccagagattgtaaattggtcccaagaaaggtacctgtagaggcaggtgcttgagattggcagggttgtaatggctggtgtggagcttctggctctaggtgagtggcctttttataaacaccgccccctatcagattggcctggttgtcctgatcacctgatatgaaagctggatcactgaacaaagttggaaggatcaactcttggccttgggccattatccctcagctccacctactacctaagacccagggtgactctttggggataggccagaaggggtgctgggtccctggggatgaaggtacagctgtctttagggttcagggtagggagcctatttctctgaagagtagggtagggtctgggagtgggggttaggcctttggactgatctgggcttctttcccactgcacacatgaggaagagctctgccagggcactcagtctaggccaaccaggctcacggcccctctccagagggatgttcttctgtagtaccctccaacaacctgcaaaaccaaacagtaaatgggcgtgttccagccactcctgattttcagcccaagtccccaagtggaaaagaagagatgataaagattttgcatcctaaagagaggccccccttatgcaaaaagactaagagacataaccaaatgcaatatggatttgcatttgattgccatatcgattggatatggcatttaaacaaaattttaaaaaaatctataaaagatgttttggggacaattggggacatgtaagcacggactggagattagatgatattctggaataaatgtaaatttttttaggtgtgaacagagtgtcatggtatgtgggagtgtatccttattcttaggagattaatgctgtagcatggaagtgtcatgatccccacaacctccttttgaatggttctgttaaaaaatgtacacctctaggccaggcgcgatggctcgcacctgtaatcccagcactttgagaggccgagatgggcggatcacctgagatcaggtgttcaagaccagcctggccaacctggtgaaactccgtctctactaaaaatacaaaaattagccaggcatggtggcatgtgcctgtgatcccagctactcgggaggctgaggcaggagaatggcttgaacttgggaggtggaggctgcagtgagccaagatcgtgccactccactccagcctgggcgacagagtgagactccgtctcaaaaaaaaaaaaaatgtacacctttaaagagtgtaattggattgtttgtaactcaaaggtttatccttgcttgaggggatggatactccattctccatgaatgcttatttcatattgcatgcctgtatcaaaacatttcatgtaccccatacatatatacacctactatgtacccataaaattaaaacaatgtatacctatctatcaataaatcgagagaaagtagatatgagaaatgtcagatattcatggacttacgtgaggatatatggtgtttgttgtactaaaggagtctttaatatggacccagatctcagtcagatctaagaggaggaggaggacaagccttaaattggatgtgaaaaggaagtttgctatcttttttttttttttttagatacagagtcttgctctgtcacccaggttggggttcatgtgccacaatcatggctcactgcagcctcgacctcctgagctcaaacaatcctcttgcctcagcctcctgagtagctgggaccacaatcacaggtgtgtgcaccatgcctggctaatttttttatttttaaacatttttttgtagagaggaggtcttgccatgttgcccaggttggtcttgaacttctgggcccaagcaatccttctgccttggcctcccaaactgctgggattacaggtgtgagccactgtgcccggcatggatgtgagagggaagttttgatttagactggagtgggcttttattcctgaaaatgagaaaactgtgggatcaacctgtgaagatgccaaggcagatggatggggaatccaatagagaaacagagcatgtttgaaggccatgaatgggagaagaggaaagttgtttc

SEQ ID NO: 1241975 - DNA, 4001 bp, Homo sapiens
atttcctagaaccccatagatcatctatttagggatttttagaactgcttcaggatcaccagggtgagaaggggaagccagagcagttccacgttatccatactatatgttggcgttctgggtaagaattcactgtgaaacagaagtttgaaaaccactgctgtctggtctaacccacttgtttttacaagaggaagctgagatccagaaaggggaagggactcactgagcatcatacaggtgacccatcccgctcctcttcccagggcttcttctgttgatagccaccccaactcctccaagatgtcaccagggttggcaaagtcagtggcctcctgagggacaagctaggaggaggtgtctagggctggaagatcacctcataggaaactctcaacactcaagaagccctctccaccactggcccagctcactctgcaaagtgaactctctcagttcctcatcccacctcaccaagtgcaagtgagtgaaacgggaccacagcaagagggcaggcaatggttgggcaaaacacacacgaccgtctcattacacacacccccattaggaatcatcacactcaggctctggagaggctgccaacagaagggatggggctccggcattacagagctcctctctacattccaggctttgacccatcacagtctccaatgaggaagctggggcccacagaaggtcagccacctgcctgagttgacacaagaaaaacttggtctctctggcaaagatccagctcccttgggaagcctgcttgttcaccccacagctaacaaatcgggaggcctcaaggaggtgggcagggtcagtgcgggtctcattcctgccagccaggaacttaccccagaggagcagacctccagccacatccacacacccctgacccctctgcccaagtctcctctgaaggtgctgaatcatcagtggtgccacttgagggtgctcaaaaaacatcttgggagatgagcggtttggggaaggacagggctgtgaagttagctgtgaagaggccaaggcaccacggcctcttaggtcaacaggactctcccaggaatatcttccacagaggcagttgggagtcgcagtgtcagaaaccagagtggctgccctccacaggattccaggatacaagatgtcaggcgctgtccctgcacctgcccgcttgcccccgaggcagccagctatggtgccctctcctccagtgtgcaccactgccttaccattacctgcacggcctcaacgaggctcacctctctggaccttgttttctcttttgtaaagtaagaataccaatttccaccgtgcagagttacggtgagggttagccagacctatgcaagccttgggacctccaaaatgcctagcccagagtcctagtcaactgttggcaacgcccttccaagccgttccaccccaacctgcagcacacctgctggccgcccccacgcccatcctagctctaccccaggccggggcgcctgacggcggggaccccagcttcattcagccccagaggaagctcagacatctgagcaccctcctcgcatcacatccttgtgccaggcgggagcaagaggtgagagagtcagcccaagctgagaagacttggccgggagccgggcgtgctctgcccgttccagggggcctaactcgatggacgtctgtctcccatctccctgctgggtgcttggctctgcccgccgcctctaccctgtctcccaggtcaaagtgccaggctccggagggcgccccagggcagcggcgggcagctcccgcgctcgggtgccggccacaatgccccgggccacggcgtcaggcattggggcggcgggcccgggatctgcgagcgagtgccccggatctcttcgccccgccagccccagacccgggcgctgctgccgtcaggccgcgcgccccgtcccgcccatcgagcccgcagacgggtgctactcacggcgggaggctgagctgccgcggtcgcggccgcggcaggcgcggcgggagcggcgggcgcggcgggcgcggcgggcgcggcgggcgcggcgggaacgggggacgcggcggggtgcgctgggctcggccctgcagtcctctcctcccagagcgcccggcacccgcccgccgagcagcctaggagccgagggggcggagcggccagccccgtcccaggcgccggctggaggcgcgcccggctgcccgggacggggctcggggcgccccctgctggagccccctccggacagtcccggggcgagagcccagcttcccggccgggtaggggacacctcagggctcccagactcccgggagagcggggagagtcggtagcaagaccctctgcgcgtccctaccggctctaccgcgcacatgctgcgtggccttgggcaagtcggctaccctcccccggccttatctggaaatcgatttgaatgagcttatacgtatgacatggtctggcacaatcctcagaaaatggtacttgtgtgctcctctccccaccatacacaccgtgagcgaggaagccccactgaggaataggccgtctcctccctcccagccagagcgctccctacaccgcagactctcctggaaacctcaagcccacagcgtacagcaaggtgggggctgcgatgagaagggccgctctgctcctcactgcccccgacccagcctgagagcggcctgccctcgtttgccctttgtcctggcacggttgctgagtgaagcccccctctcaccatcacgccttctctaatagaggacttgggaatgggttcctctctctgccctctgccaaaaaatccctgaggaaaaaaggaatgagagtgagggggtgaagggaggaaggaagggaaaacagaacttaagccaagttcatttgtcttatttcaaaacaagaggctgtttagaggaagcaaatgaggacccctccaacccctggaatttccatccctaagtcacccatggggctcctcaaaagggccttagattcagagtcctaccaccaggttcaaagccctgccctgccactccgcatgtgtgttcttgggcatggctctttcttcatcagtaaagtgggagaaacgcaccttccggtagctcctaatgaagctatggtggggctgagatgagatggagtgtgtaagatgcacctagaggacctctaccagtgtgagcacacacacacccttcagccttttggacattgggacaaatacagatggaccccaccccccagctgagcagtgcctccgggtccaggacatcctcggcaaagagttccttgtttataaacttcacaataattcagaacagtgcagccagcgagcctcctctcctaagagcagcatgatatatagagtaatatccaagactagaggtggtttctgatgtcaacggacctaagggaatgacacccactggtgaagtttcaccaacatgagaagtcccccaccaaactatccctaaacacctcttcctccatttccatttacctatcactggtgacaaaccattaccagccttggtggcacaggacaacagtttcactatgttcatgcattctgagggacagaagttcagacagcacagtgtgtatggcttatttctgctctgcagtgtctgggatttcaactgggaacacctgaatagctgggggctgaaatcatctggagatttctccattctcatacccagtacctgggctgtgatgaatccaaggctgggctcagctgaccctgctgatcacctacatgtggcctctccatctctttcccttgagcctcatgcttaatacctcattgtcagcagcagcagccccttacatgagtcaaaagagacattcttgggtttagcaattgacaagttagtcagagtccattgcagctggaagggtcattgtcaattgaccctggccacttttcagatgaggaaactgaggctcggagaagggaggtgacttgcccaacatcacatagctg

SEQ ID NO: 1241976 - DNA, 4001 bp, Homo sapiens
caaaaaattcatattgcttcaccaattttcaaaaatgtaaatttgtgtatataagtttaaaacttggaccaaaagttatctacatttattcccaatttgcgactggtatcaagatcaattaactttctcagcaagtacactgttataaaattccacagtgatcccagaatggaaggggcttaaaaaataatataaaacaaaaattaaactccacagtgaagtaggtctatgtttaatcattcagaaaaagaaaattatgtaacatattatatataatgatgatgataacatatgctgttctggactcctactgagagctgtggttcaaagggaaatcgtgaaaataaagtaaaaattgccgaaaatgtttaattctgcccaaaacagtttccaaaaaagaagccaaatataatattttattttaagttcaaacagggttcaaacagctcagaaattttgtatacttaagttttcagaagtcgaatcccagaaccgctatcaacataaactgaataacttgctcaagagtccttacttattacccaatcttaggtcccccagaatacttcttaaaataatcccaaatgtactacaatagattagcgtaaccggggctacgctgtttacaggtgtctccacctcctcccccaaggagagaagaggtatactagggtaaacagaaaatagaaggagactatatacacaccaaataacagcttgtaatcttctaagacttcttttacattcgggctattcttttcattaacgtataatacattttaaagaataacatattcacagagtaatacaatttctgccctcacgggtctctagctggctgacacgcgttttctcctcaaataaatacatgcctgttgactgatgcctgtcctgctgttgcaaacaagaaataactgtcctataagacaaaaacctctctctacggttctaggcgtaaccatacgtttgaattaaaagcacattggaacaacaacaacaatcttccagcacatctgtcatttaaaagcacgataatgaaaagctgtcgctgcgacccaattttaggtcacaagctttttactgtttttcctgccccccacctccagaaaacaataaacttcaaagggaatggtggtaaccaggaacagttcccttcccccaccacacacccccccaaaaagactagaaaaaaaactggtcaacttggacgctggccgcgctcacgcagaacccgtgcccgcgggccggggaaggctgaacagaccctgggaggaaaagtgggcctgcaggcaccccgggctccccccgccgcctgtctcagataccgagcaggtgggattccgggaagccacctccgacttacgtaacgggcttgtcaaaatcccagatccaggacctccccctccccgcccccactcccaaataacaacagccccaggccagcctggaatagaaaatctggaatgaaaacacaggagccccccacgcgtccgacgcagaggcgcgggtgctactctcagcaccgccgcgccatcccggggcggaccgagccgcggagcacctcccggatctcaggagctctcgggcggagatctcggccatccgtgcctcctccccgaacccacccgccccgctcccgcgcccccggctgtcacctctccgggccgtgacagctccacctgccaccgctgcccgggtcgccgcccccgcactcaccacccagctggctcccgtgcgagcagcggatcgagctcggagagcggcgccggaatcccgcacgcgcggtagcggaacacgaggggctgaatgccgcggcgctctgagcccgcttagctcatccccagcccggcgctccgcccttcgcggcacccccgcccgcccgcccaggcctgccgtctcagtcagacgggactccccctcccctcgcggccgccactgcctccgcctctttctccgactctagcctccgcggccaccgcgaccggcgccatcttggcaatgacggaaggggcgggggcgggaatcacgcccgcgagcaccaatcgaaggccggatctggcccgagtgggaggagagggccgagttgagggtcgtggggtcctagcgccaaactgataatggggcggtgaaggtgggcgggactaagtcgccttagtccgtgacgtgcggtgtagttggggaaacgcaccgtggttccccgtcgggtcaggagatcccgagccccaggctggcgtgggcgaagcgtacaatcccttcacctttcgtcacccagaggcacaagaatccagttcgcgccaactgacctgtttcttccttcctccccggcactctgggagtcctgagattgccttgctcggttcgtctcagacttgctagatctgagcagctgctgctcctccaccaagggtgctcacattctccaggaaactcccttaagggttagcaaccgccgagtaggtttcggtcccaagatagaaaggtaaagcggggaattcagggggtttctccgaaaagtacgttgatgaaacagctattgttgactgacggggtgtcgattactttggattaattggatacggcctacttaaacctgactgtggctctccaccattgatggctgttgacagatgaggttaataaagcttgattacccccatggggttgctcgggagttaaattctatagtacctgtgaagtacttagtatagtgcttgaaagtactcaataaatgttagacattattccatggacaaatgaaagaagaaacaggacccccaaaatccctctgctttaaagtcaacttttcctaaattgcatagccttttactaaccaagtttacaactttatttcctacctccagttctttcattgtattcattcattcagtcaacaaacatccatacagagggtgcacagtggtgagggaaacagaaaacctttgccttcaggaaactgcagtttagtgggagaagagggacaataaaaaagtacttaagcacattttaaggggaaacatgctataaaggttagaaaaataactgaggccaggcgcctttgctcatgcctgtaatcccaacgcttagggaggccgaggcaagagggtcagcttgagctcagaagttcaagactagcctggcaaaatggcgagaaccctgtctccaccaaaaatacaaaaaattagccgggcgtggtggcgtgcgcctgtggtcccagctacttgagaggctgaggtgggaggatcgcttgagccccagagccggaggctgcagtgagccgagattgtgccactgcactccagcctgggtgacagagcaagattttgctttaaaacaaaacaaaacaatcgagttgcatactttaaatatatgtagtcctctgtatgtcagttaaagctgtaaaaaaagacttgtttttgacacagagtcttgctatgttgcccaggctggagtgcagtggcctgatcacggcttactacagcctccctcccaggctcaattgatcctcccacctcagcctctggagtagctgggactgcaggtgcccaccaccacacccagcaaatttttctgttttttgtagagactatgtctcactatgttgcctaaggccggtcttgaattcctggggtcaagtgatccacccacctcagcctcccatagtgctgggtttacaggcatgagccattgtgccctaccttaaaaagctttttttaaagtccagttgggaaccctcccaattctttacccattggacacagatttagcctttcattagttttaagtgttgctagacgtatcaggtcaattcctctttaaggagtagcttggcatatcaaaatattccactagcagcaaaagcactcttttagttggttatacatgtatatgtgcatatatatatatatatacacacaaatattttcatctacagagtaccaattaaaatgttatatagttgcatgtagcatacacaatgagattctaaaacctttcaaaagttt

SEQ ID NO: 1241977 - DNA, 4001 bp, Homo sapiens
agattcatcactcctgcatcaaaaaggccaacagagccctactaaaaacaggggtccccaggcctcggtcaggccccttctaaaactgtgcctaagtcaggacgtgtatttgcaaacaccacttggagggccggtacctctaaggaagtctcctttgcagttgattttatgtatactgttcccaaagccagcctgtacccacgaagagcaacacaatctgcttgtcccaaaagcaggaagtgtcgaccttgtagcaggatttgggtgctctgggagccaaactggatgtgtggaagtgccaaaggtgcagaaaaagaactccaaaatgttgacttttacctctgtcctgggaatcaccctgacgctagctgtcgagatacttatcagtttttctgccctgattggacatgtgtaaacttagccacctactctgggggatcaaccagatcttcattcggtaactcgtgcttctcatcctaaattatgtactaaaaaaaaaattgtaatcctcttacaataatattacggcatgtcatggaaattaacattttatattccaggatttgatgttgggactatgttcaccatccaaaataaataaataaataatagaaataaaaatcctggtctcatggagcccacccaagccaatcgggcctttaactgctctaggtgaccctatgttccagaaaccccctgacaaagttgatttaactgttcctccaccattcttagtcataaaagataccctccaaaaagttcgagaatatctagataggcaacaacaggaacgagaaaataacatcccctggtatcaaaacatgttccactggaacccctggctaactactttaatcactgggttagctggacctctcctcatcatactattaagtttaatttttaggccttgtatattaaattggtttcttaattttgtaaaacaatgcatagcttctgtcaaacttatgtatcttaagactccccttgttaaaactgaggaatcaatgatttgattccccaaaaacacaagtggggaatgtaatgcccaacctggtttttactaactctgtttttagactctcccttagctaagagagccagacagactccatcttggctctttcactggcagccccttcctcaaggacttaacttgtgcaagctgactcccagcacatccaagaatgcaattaactgataagatactgtggcaagctatatccacagtccccaagaattcatctgattgataacacccaaagccccacgtctatcaccttgtaatagtcataaagcccctgcacctggaactgtttactttcctgtaaccatttatccttttaactttttgactacctaacttctgtaaaattgttttaactagaccccccctccccttcctaaaccaaggtataaaagttaatcaagccccttcctcagggccgagagaattttgagcgttagcggtctctcggtcaccggctaataaaggactcttaattcgtctcaaagtgtggcgttttctctaacacccctgggtacaacacactaactcactgtgtggtactaagtcctttacccttgctgggtctcagtttccctatgggagaaggtgcacatgtccctcaattccttgcgacggcctctaaaccagaaggggatgccaaggggcgggcacacatacccaaaagggcgcccccggaaagaaaagcctggggcggggcctcaaagggaagagaatgctgagggagggcgggggccgcggggcctctgggcatcagcgtcatgcagggaggagcctgccggggagggtctgacgggcttggaggctgggccaaaaatggtaagtcctcacctgtctggtccgggctcaaagagccagggcgagggatgccccagcctgttctgtgcgcgcctccccctgccccgcccccgccatgccccaggactcctgcacccgcggctgcacgttcccgtttccgccagccaccggaactgcggcccagcaaaaagggaagtaggggagagcacggcactgttcagccaacactaagagacaggtacagcgcacccttgtgcccggaggaaggatcgaagccgtagaggctccatggctccgaaggaaaaattaaaatggcacctaacctggcaatctctgtgagtcccaatggcagtgtctctgcacctgctgggcacatttgaaaaaatatgaatagaattaatttttcacctattgattagatgctgagaaacttcctactctgttatcttctagatggcgagcaccttgaagactgagattgtattgatcatctctgactaacagggaatttgccttgctagttttaagatggagttgattttaaaatgatgtcactctggctctcgtaggctcctgcttccctaacaaaaagaccttcaacatcattaattatcagagaaatgcaaatcaaaacaatgagatactacttcataccccttaggatggctataatatctttaaaaggaagatatcacatactggtgaggaggtggagaaatcaaaagcctcatacactgctgctgggatgggtgcagtcactttcatgggcgtccgtgtgaagagaccaccaaacaggctttgtgtgagcaataaagctgtttatttcacctgggtgcaggtgggctgagtccgaaaagagagtcagcgaagggagataagggtggggctgttttataggatttgggtaggtaaaggaaaattacagtcaaagggggcttgttctctcacgggcaggagtgggggtcgcaaggtgctcagtgggggtgctttttgagccagaatgagctaggaaaaggacttttacaaggtaatgtcatcacttaaggcaaggaccggtcatttacacttcttttgtggtggaatgtcatcagttaaggtggggcagggcatactcacttcttttgtgattcttcacttatttcaggccatctgggcttatatgtgcaagtcacaagggatgcgatggcttggcttgggctcaaaggcctgacattcctgccttcttatattaataagaaaaataaaaatagtgttgaagtgttggggcggcaaaaatttttggggggtggtatggagagagaatgagcgatgtttctcagggctgcctcaagcgggattaggggtggcgtgggaacctagagtgggagagattaagctgaagggaggtcttgtggtaaggggtgatattgtggggatgttagaagaaacatttgtcatatagaatgattggtgatggcctggatatggttttggatgaattgagaaaccaaatggaataacaaaaggagaaaaacaggtataaaaggtctaagaattgggatgactcaggatatctgattagagagtgcctaaggagattcagcatagtcctgccagcaaagattatttatttacttcaagagttaagagtggcagtttgtggatagcacctggagatatcagctgtgatggcttagaaaaacaatgtaaacaagagcagggcagtgtaaacaagagcagggcatgtatgagtagttgagaacggtgaataggagtatgactagacagaagatagcagggatgacaagtttttttggggcacagtctaagttggtctggtgtctggaataagactggggcctaataaaaaggagcatctatacaggagcttaaatgggctgtaccctgtagcattctgaggacaggcctgaattctgagaagggaaagtggtaaaagtattgtccagtcctttttaagttggtggctgagcttggagaggtgtgtttttaaaagacctttagtccattctacttttcttgaagacggaggactgtaagggatataaaggtttcactgaatactaagagcctgaaaaactgcttggctgatttgactaataaaggctcgtctgttatcagactgtattgaggtgggaaggctaaactgaggaattatgtctgacagaagggaagaaat

SEQ ID NO: 1241978 - DNA, 4001 bp, Homo sapiens
tacaagtacaatttgcatccccaataaaagagtctaaaatttaaaaataaagtactcttttccccaagaaaagaacgtatgcttctgaaacaatgtatctataaataagattaaataatacacattatcaacaagaaataagcaataaccctgccactataaaaatgcaagccaaaagacaattcacactagaatcttaaatacccacatactggggacactgcagtttactaatctacagtcagatctcttggccaggtgttgaagcagaaatataaaataatgttactgcattcctcactatcaaagagaatacgaaattagttttaaaagtcccttctgacaaaataatgaattcctcccatccccctccgacaagggaccttttctaaggtggggggaacctatgccatatagaaataaagaatgcaaaacgtatacctcctgcctctttgatgctgcacagcttgacaagctgtctgcatgaaaataattcccttcaactcaggaaactcaaggatctcaagataatcttgaacaactttccagtctgggatcacgtaatgagtcacatcactagacaagagtttcccatctgaaacataattcaaaatgtaagagattagacaatgttttcaaacctggtttatttaaatgtcacggtgctctggcatgcaaaataacttccagtcttaactccatggtgggagtttttaaaagacaaatctactttggtagaggcccaaagttcaggtatattgagcaccctcatttttttggaagctgtgataaatacaagctcaacgtggtttatggtgttgccagaggtgccggagaggatggctgatttaacaacgaacaagcacattttcagcataacctgaatatttcagtgttaactcatcattgacaaacacattcaaatgaagcacccccacatttataccacttgtgtatgatgcccagcaatttaaagttggctctgtgtcaagcttctgcacgtgctcagcagcctccaagggccagaaagattgaacagagaaaatgctccgtgcaagcaacgtgcagaggtgaggtttcccaccagacctgcatctgagagctggttagccaagctctaactgaaatgttcaccttaatcacaatgtttggaggattccacacattcgctgacaaggacccccagcccattctcatcctcccatgggggaagagagccagtaacgtgcatcgttctatcggccacccttgtggcctagaaaccaaggactggggcccaggagtccccagtccaacttccccgtgaccttccgctccagtgcgggcccagagagttcacaaatctacggtgaagtggctctccactgggggaaaagtctggggcaacagtgcgggcaggtcaggaaacctgtggctgcaaagcaggcgatgtcagcttcgcagcggcagcagctggcctgtagctcccgggggctcccagctcgggacctccccatttctccacggcgcgaggttgcggcgggaggaggcctcggcttccgcgccctcaggcccctctgaggagccaaaccacccggcctccggcatggggtgcgggtctgtcgggccctcccattggacagggcggagcagtaagggagtcccgggcgccccagaagccgcggacccgggccgctgggtccccaccggcagagagccggggggtgaggccggcgagcgggcgcaggccgcggggcctacgcctccgtgtccccgccgctggcgctccgcctcccggccgcgctcagcccctcactgcggccgcccgctcccgccggccccgtccccgcccccgccccggccctgaccgtggctgcaggcggcgggctgcgggcagagcgggctgtggcagggcacgcagggccgcaggtagtgctcgcgcacgatccgcagcgtgcggccctggaaggtcctcagcagcagcaccttctcccgcttctgcagcatggcggcgtgtctcccggcggccgcggagtggcgggcgcggcggaggcaaggccgcggcctcggacccgcccctcggccctaggcgccgcggctccggaaccgccgtaactgccgcgcccgggggaggcccggagctacacgctccaggctggggcccggccctcccggccttagtttcttcccttccctcagtggcctggaccagggcggaggggtggaaacgacctaccccagagacggagggaagactaggatgatacctggacggcaggtgaagaagggctgggcgcagctgtccaagattaggagactttgtttgtcccccccaggtccatgtgggaatggagccgccgtattaatactaataccgggtaattaatgttttctcttcgttgctctcgctatctccaaacgaggtaaaagactcagcacataagccggcaaccctgccagccgaacatttctaaaaagttatattcatttaaaattacatgtactttttttaaagtttttttctttttttgtagagatgggagggtgaggggggcaggtcttgctctgttggcccggctggtctcaggcgatccacctgcttcggcctcccaaagtgttgggattataggtgtgagctgctgcgcctggcctttcatgttctttttaaaatttatttatttgttttggtatccctattgaagttatcatgtacttatataatcaaacaatgcagataaaatgaaaaccaatctcttcccttgaagcactgttccactccaacttttatagcttttgcagcctctggcaaaggatttctcctttaaactgccactgtgacacaatcacaaacgtacatgtttgtattaattttttttttttttttggacagggtcttgctgtgtcactcatgctggagtatagtgcatgatcatggctcactgcagcccccgaacttctgggcacaaacgatcttctccaccacgcctagcgtttttttcttttcttttcttttctttttttttgtagagatgggagtgtctcactatgttacccaggctggtctcaaactcctgggctcaagtgattctcccacctcagcctcccaaagtgctgggattacaggcgtaagccaccacgcccagcctgtagctcttgataaagagatgcacacagtctcttctgagatcacacacccttgatgggatagaatccactcttcttccaagcactcaactaagacttttgagctgcactagcagctttgtatacgtgtcccatttaatttccacaacaagtcaaaggagtggggcattatcattcctatcttatagactataaaacagggttagggaagttaagtggccaaggttacccagttattaagtggtgggatcaatattcaagccagaatctgactgaattccaaggaggctcagaagtaattaccgtgctattcagagatgagtaaaatacaggtcctgcatttagagactttatagtctgcttggtgagctccagttaaggcagctcaaccagctggctggaaacatcagacttcctgtgatgctgaagcaggcagaactgaggatgctctgttggatggctcttgtcactctacaggaatgcatgaaagagagccacgatctcccactcattgtacttccatgtcaagttaccctgcagtgtgagctgatgtgaatgagatctgaggtggaattgcacgaattaggaaaacagcacagagctggcctgtaaggcaaccagcagtgcaggaggctgtccctaattcaggaggtcagttctggacagcccagaggacagtcaagttgccagatttgtcccctacataaatatgttccaggcagctgaccacagttcccttcaaagctccctcacgttcatttttcttttatttctgattataccaggttatgggggggggggggtgttgattagatactaatatgcccatgacatcgctttttagcacttggtagctttaaactttcttcaaattgggt

SEQ ID NO: 1241979 - DNA, 4001 bp, Homo sapiens
actgcattcctcactatcaaagagaatacgaaattagttttaaaagtcccttctgacaaaataatgaattcctcccatccccctccgacaagggaccttttctaaggtggggggaacctatgccatatagaaataaagaatgcaaaacgtatacctcctgcctctttgatgctgcacagcttgacaagctgtctgcatgaaaataattcccttcaactcaggaaactcaaggatctcaagataatcttgaacaactttccagtctgggatcacgtaatgagtcacatcactagacaagagtttcccatctgaaacataattcaaaatgtaagagattagacaatgttttcaaacctggtttatttaaatgtcacggtgctctggcatgcaaaataacttccagtcttaactccatggtgggagtttttaaaagacaaatctactttggtagaggcccaaagttcaggtatattgagcaccctcatttttttggaagctgtgataaatacaagctcaacgtggtttatggtgttgccagaggtgccggagaggatggctgatttaacaacgaacaagcacattttcagcataacctgaatatttcagtgttaactcatcattgacaaacacattcaaatgaagcacccccacatttataccacttgtgtatgatgcccagcaatttaaagttggctctgtgtcaagcttctgcacgtgctcagcagcctccaagggccagaaagattgaacagagaaaatgctccgtgcaagcaacgtgcagaggtgaggtttcccaccagacctgcatctgagagctggttagccaagctctaactgaaatgttcaccttaatcacaatgtttggaggattccacacattcgctgacaaggacccccagcccattctcatcctcccatgggggaagagagccagtaacgtgcatcgttctatcggccacccttgtggcctagaaaccaaggactggggcccaggagtccccagtccaacttccccgtgaccttccgctccagtgcgggcccagagagttcacaaatctacggtgaagtggctctccactgggggaaaagtctggggcaacagtgcgggcaggtcaggaaacctgtggctgcaaagcaggcgatgtcagcttcgcagcggcagcagctggcctgtagctcccgggggctcccagctcgggacctccccatttctccacggcgcgaggttgcggcgggaggaggcctcggcttccgcgccctcaggcccctctgaggagccaaaccacccggcctccggcatggggtgcgggtctgtcgggccctcccattggacagggcggagcagtaagggagtcccgggcgccccagaagccgcggacccgggccgctgggtccccaccggcagagagccggggggtgaggccggcgagcgggcgcaggccgcggggcctacgcctccgtgtccccgccgctggcgctccgcctcccggccgcgctcagcccctcactgcggccgcccgctcccgccggccccgtccccgcccccgccccggccctgaccgtggctgcaggcggcgggctgcgggcagagcgggctgtggcagggcacgcagggccgcaggtagtgctcgcgcacgatccgcagcgtgcggccctggaaggtcctcagcagcagcaccttctcccgcttctgcagcatggcggcgtgtctcccggcggccgcggagtggcgggcgcggcggaggcaaggccgcggcctcggacccgcccctcggccctaggcgccgcggctccggaaccgccgtaactgccgcgcccgggggaggcccggagctacacgctccaggctggggcccggccctcccggccttagtttcttcccttccctcagtggcctggaccagggcggaggggtggaaacgacctaccccagagacggagggaagactaggatgatacctggacggcaggtgaagaagggctgggcgcagctgtccaagattaggagactttgtttgtcccccccaggtccatgtgggaatggagccgccgtattaatactaataccgggtaattaatgttttctcttcgttgctctcgctatctccaaacgaggtaaaagactcagcacataagccggcaaccctgccagccgaacatttctaaaaagttatattcatttaaaattacatgtactttttttaaagtttttttctttttttgtagagatgggagggtgaggggggcaggtcttgctctgttggcccggctggtctcaggcgatccacctgcttcggcctcccaaagtgttgggattataggtgtgagctgctgcgcctggcctttcatgttctttttaaaatttatttatttgttttggtatccctattgaagttatcatgtacttatataatcaaacaatgcagataaaatgaaaaccaatctcttcccttgaagcactgttccactccaacttttatagcttttgcagcctctggcaaaggatttctcctttaaactgccactgtgacacaatcacaaacgtacatgtttgtattaattttttttttttttttggacagggtcttgctgtgtcactcatgctggagtatagtgcatgatcatggctcactgcagcccccgaacttctgggcacaaacgatcttctccaccacgcctagcgtttttttcttttcttttcttttctttttttttgtagagatgggagtgtctcactatgttacccaggctggtctcaaactcctgggctcaagtgattctcccacctcagcctcccaaagtgctgggattacaggcgtaagccaccacgcccagcctgtagctcttgataaagagatgcacacagtctcttctgagatcacacacccttgatgggatagaatccactcttcttccaagcactcaactaagacttttgagctgcactagcagctttgtatacgtgtcccatttaatttccacaacaagtcaaaggagtggggcattatcattcctatcttatagactataaaacagggttagggaagttaagtggccaaggttacccagttattaagtggtgggatcaatattcaagccagaatctgactgaattccaaggaggctcagaagtaattaccgtgctattcagagatgagtaaaatacaggtcctgcatttagagactttatagtctgcttggtgagctccagttaaggcagctcaaccagctggctggaaacatcagacttcctgtgatgctgaagcaggcagaactgaggatgctctgttggatggctcttgtcactctacaggaatgcatgaaagagagccacgatctcccactcattgtacttccatgtcaagttaccctgcagtgtgagctgatgtgaatgagatctgaggtggaattgcacgaattaggaaaacagcacagagctggcctgtaaggcaaccagcagtgcaggaggctgtccctaattcaggaggtcagttctggacagcccagaggacagtcaagttgccagatttgtcccctacataaatatgttccaggcagctgaccacagttcccttcaaagctccctcacgttcatttttcttttatttctgattataccaggttatgggggggggggggtgttgattagatactaatatgcccatgacatcgctttttagcacttggtagctttaaactttcttcaaattgggtcaaatgatcttttaaggaagagagtgtgtctggagttctattgaaagttggctttattagtattttaaataattcaaggtccattaagcacttcttttgcttgcattttggcgataatgtataaattatgttttaaaaagcatgattccttaattcttggaactaatgagctaaaatggacaagagtgcctttttgttggttggttggttggttggttggttggtttgcctcacaggccatctgatgcctcttgcctgaaaaaaagtgtctatacttgtaagaataa

SEQ ID NO: 1241980 - DNA, 4001 bp, Homo sapiens
cactgggatgagtaacttccagggttgcctgcccgggcctgcaggcctgtacgccaagtgagtagggcaggcagggggatggaaagtggggatgcaggcctcatttaagaggccagcatcccagcaatcagggcctggctgacaggctcctagacacagagaccaaacctggaagccccataaggggcaaatgtatatcgcattaactatacccccaagcccacagacacacagccaggtgaacatcagtgtgatcccacagagtggccaggacagatggggaagcagctcatatcactaggaaaataaaaaggtaattttaaaaacacaaagtgtgaactatttcaaattcctctctagccagtgtgtgtgcacatgcgcatgttgtgtgtgtgagttattcactgtgtatctatccccagagtgctactcaggtcagcaggagcatttttgtgtttcttgaatcacataagcaagtccctatgcccaattagtgtctatggtctctggagaagtccagagaggggccagaggccccagggagtttctggaagagagcaagtggatcctgtgcccaggggaaatgagactggacatggctgatccttggcaagatatctgagacagcaaatgactctcctgccccttctagggatgcttctggccccaggtcctcgctctgtcctgtcactgccccatctttgatcaggccatagtcccaggcaggtccctggactggtgaatacacccatcctgtgtctcaccttcttgaaggctttgtgactttcagactgaagagtggctaaatctatccaggctaatgtgttaacaataaagggaagaaagcatttctctctacttgtggggctttctccccctctggggtacagaatgtacattttaactggggtattctggagacgatgtgtccacttctgctattgctatcaaggaatgccttttatttcagtccaggcaggaaagaggcagtgtcatgtcagaggagggattctgggggcggcagagccaggcagggcacagaaattgcgccatattgctacctagctgggctgttccctcacacatatggtggaggaagggagaagagaggtgctgagatctgggccctcagcaggaaggtgtccctcctgtcccaccagtatggggctcctccaggggtggtacaggccagcagcctgagcaccaaatccttcccatcttagcggctccagccagtgtggctgccacatgcagggactggaacccacacgtgcacagctgggggtcatgcagggcaggcaagcgactgatggtgacaaagacagtccctgacgtgcctgccgaatgtctgccttccccaggacacccgccttggcgagcctcccatccgcgattcacgcacaccttcatgcacactggcacgctgaaacccggactgaggttactgcgggcttggggcttccggagaagacgcaggggcagggcctagaaggaggggccggaggagccagggagtcctggcctgagaggaggggtaggagccgtgggtggggcaggttccctaagcggggagggcgatgggggctgacactagggggtgtcagggagcgaggaaattgacccggcaggatgagggcgtggcgaggggggcctggagcttggcgaccccgggaaggggctccgggagggtctggggaatgaatggggcaacatatggcggctactggggatacctggggcggggagggtctgggagggtctgtgatacggatctgcggagctgtccgccctacctgtccggggagccgccgtctggggccaagggctccccctcgggccgttgctccccttccggacccgggccgggagccggaccgctgccgccgctgctgctgctgctgtcaccgtccatgcccgtgggcggcaccgctgtccgggcgctggtgctgaagccgcggcggcggcggcggcggcggcggtggcggcggcagcggcggcggggtgctcgtgcgcatgcgtaggctctgagcgggccggtcgctgggcggggcgaggaggagcccagccaatgggcgcggcgccgctgccggagcggagcgctctgtctctaagatcccggggctgcggatgtgagcgcccctctgctcccgccaggccagagagccgctgttaggagtccggccgtgcaacccttcctagcggcctcggccttcccgtaaggaaccagagagcgcgacacatgcagagatcctcacaaatcaaaacgcagacccttccagccggatagagggcgagctccacgcccgcacttcaccacgctggacgccccgggtcgaggcgggcggcttcaggcctgcgaggttcccggctcgctcagcgccctcctcccctccccagtggggcgaggcatcaggttgggtctttcttcccatccttctggacttcgacttggacctgggtgtgcaccccttagatgcggagccctgactccgttactcaagtgcgcagtctggtgaaggaggtgggggaagaagagaggcgctcagatcatccccagctccttctctttcttttttaaaatttaaaaggtttataaagcaaacaaatcacagtaagctaaggttaatttttgattcaggggcacatgtgcaggtttgttataagggtatattgagtgatcccagatccttttttatagtcaccgctgcccccccaccccacctcagcctgggaggtgcccaatagccactgactccagggcactgggaggtgcccaatagccactgactccagtgccacctcccccaccagggagtagctgtgagtagagcacatttgggtatgatggactgtggacaggcctggctaaggggtctagaactagaatagatattggcagtgtgagaagcctggggggctgggagtggagaggatcctggatgtgggatttgactaggcagaaagggttttacagcaagcaggctgttcagggcctggttacttgtgcagggagaggccttggttgaagacatggggctgaggagagagtcaggaacacttggactataggtatccctaaaatgtgtgccaatgccagtccgtgtaagacacaggtcataagaaatggggtggaagaatctagaggtgtagaagtgttgggtctgccctgaatagcttatagtttggttggagagataaagggccagcccataaattgctgccaataggcaagatatggtgaggcccatgaggtggttgagaaggggacagtatgcaaaaaggaaggacctctttcttcctaataggccttagagaaggcttcttggagatggtggggcttcagctggcttggaagaaagggtgggctttgaaatgtggaggtaggagagagggaaggccttcctgacctggggtgggggcattcttccttacctgtgcaaacaaaggtaagggggctggaaagttcagtgtattttaagggaatggtgagaaaccatctggattggagggaggcttctggtctgtagagtgaggcatgcaagctgcaaccttggaaggcccaccagatctggatgtacaggatggcatagaggtaatgaggccacacttgaagttcctcgatgggagggcacaggagtgaaaaggaaaggagaggtgaccttacacagccatttatagtgagcaccatggcattaagcttctgagaatgccaggatggttgccccatcttcacaactagggagcttggagacaactgggtcctctgacagccaggttggatatgaaggaagacaggctctttaaagaatagaatgtggcctctaggaggctgtttattaggaagagaagattgtggtttaggcctcattccaggtcagctgggcaattctctcaggcttgccatcttgtgtcctgttttcttctacttcctcagtgatgtggaccagggggtgggtgacctgggccatggccagggggaggcccgcagggccctggaccat

SEQ ID NO: 1241981 - DNA, 4001 bp, Homo sapiens
ccccgctacgtagctgccctacgtgtgtgcatgtgcagggggcctgatagtattcaaaaaggggacaatagaaggatgttaagatatcccagggtcttggaggcagatagggaggggaaagaggaaaagaggtcaaaatggaaaaaagagaaaaagaaagaaaagctccccaggctagagaggaccctgggagcagggggtcctttggtgcccattcaggggttctgcctccagaggtgggtaatggttttcttttttccttttcaaagtgagaattgttgtgctgctgaaatatccttttcctctgtgtcagaacaacatcccaaagccattattccctttccaaaggagcggaattcgcgaaaggtgtaaaatacaggaaggggcccgtcagcggcgctggcagcttcagcctttctcaccgccgtactccccgcgttcccacgccaaaaataacccgcaggaaacgcaattgtgctctgagtccaggcagcgagcggaatccgagcgtccagcgcggggcgcagctccaggccaagctaagcgtcctgcctcccacccccaagcccgcacttcccccgcctagaacagattaactctttcggcgctgcgccgtgtcgcccccctgtggtggcggagcgagctactcacctggccgcaggtcgtctcctggcgcgtgccaagcttcgatgatgagcgagaaggtaccctgggaaagggggtggggggacggagagatggcgagatgagcaagcggggagaggtgggggtgccttgcggcagcctgtttaattaatctaattgcaggattcagttactgcgcccgggtcaacataacggggctgtgcacagtgtagcgcttgagcagggaaggcgagaggagaacccccggtagagggagggttgagagacgggagagtgtaagggagagccactggaggagggggtggtagggtaccgccccagagtggtaggtaatgaaaatcgtgtcccaagagctggggacgggaggacataaactgggaagacggagactggtgagagccttttctgggatcagtctcaggagagagtcgggaagagccaggaaagaatgcatcctgggctttttgggggtgggggtgtgtgtacaaggaaatctggggagggggctttggtcccagggcgcctcctctctcggcttctgcgacctcccagtgcgcccaggctgtgctcaccggccaggtgaaattgaagggcagttggagagggttgcgccccccgccgctactgtcgtcccggacagcgaaggagttggtgcccaataccggcgtggagacggtcccgaaggtgcagggtccgggcgagacgaccgcctggaagtgcttaaggcagacgcggaagaaagtccggcagccgggctcgcaaggccgcccactggccagtacgccgcgctcgttgatgaactcctgcagctgcagctggaagacgccggagccggccgcgcgctattgcacagggaccgagggaaggagggaggggaccggtcagctcagctggtgcccggggctgaggcccagagcgcggcagaggggacggagagggcgcgggacgtgttacctgctgccaaagtgccaccagcagcagtagcgcccagccagaggcgctccgggacgctgccgccatcccctcgggcgtcgctctctccacccgcgggccctcaatctggctctgttcgcgacgccgctttcccgcgcgtccgccagccggcggggtccctgaaaagaggcgctcctctcgggacgctgctcccctttggccttctcgctggctccgctgcagctgccgctgtaggtaatccaggtgactacggctgggcggcgaccgcgccgaggacgcgtcttctgtctaatcctggggctgcaagcgggctagtgccggtgtacgctgcaccaaggcggctggggctgcggctcttggcctcgtgttcccggcctgcgcgcagcgccgctactgaaacctgcgcgctgggggccttccttatatatattggctcctctcctcgccgcctgtcactcagactcatggtcattctcccctcccctcccggcctctagctgctacagtcccagcgccgcccggagggggcctccgcccccgccgctcccccctccccgtcagccagtcgggcgcaggtccccgcccctccgtgccgctcccaacctctaggtcccccagctctgcgcgtgccgaggtgaccagtcctccgtgatggcggggttaagggctgagaccctggccgccggaggatagaggggttgcccggtaatggggcaggaggtgagtgggtggttcggggatggtcttgggggcggagacactaggcagtccctgtaggctgtgcatccgcagcaggcgctagttacctagtgttccaaagcaggtaaaaagaacttaagcccggaatgcaaaaaccagcgctagggaaatccgatctccttttccttcctggagcttctggagcccttgtctcaacggcccccaacctatgagtgcccacccaccacgcgtccccagcgcagcagggaagccagcagaagcgttaacctctctgtggccactctgagcaaggctaggggctaagggtctaaggctcggggccctctctgtgcacctgttgggcgtctccctctctagctaagggggggcgtgcccagcgcgtgccttctcccttctgccccctgccagggcttggcgcgtgccagagacccagacgcgcggtccctgaggtgggggagggcggggcgtggtcccggaggtaggaggggggcgcgtcctcagctgtatggtaatgaggttctggccccgcctccagcgcgtcccctcacctgagtccagcttcagttcctgcgcccactgcctccccccaccccagcagccccaagcccccggccgcgccctgtcgctcagctggggcaaggaggaactctcctgacgccagagttggctcaggccactggagaatcaaggtgagggactgaggccgggtcggcccgggtcctcgcctcataaggcgggatgtggggtggaactggaggcttgcggagctgtttgagtttcaggcggcttcccaagtctcgcccgagagggtcccctgggtggccccactcctccaagcggcagcagcgcagctgctttctcggaacccggcgtgatccccggagaccgcagaccggggagggccggcttctcccagtctcaggggtgccggggagctctctctttgcgacgccgagggcagcgggggccctgtggcttcagctgtcagcccgcccgcgaggtgatggctgtagtcgggcggtaagatcagcgcggggggggagccgggacgcggcgcgaacccgggggaggcggtaagggtgggggagcggcgagaagcccaacagctgccaatgccgagcatggtctgatttttttttttgagttgggtggtggtggtggaggactgggggacgggtgtggtgggggggggaaggatgagaaacaagaggttgggagcgtgggttgggggaggggcgaggtgaggagacgggctccggggtcccccacgcacggccacccctcccagccaccatctggcgcgagcgggttggcgtggggaaccgaggtggggcggggcggcagatgggcccaggctgcgctcgggagttaatgtaggttatgggcaggcggagtcccaggcccgagggagggggagtccggggcgtgcctcccggcgatcctggcaagtgggctcccagatcttctctccgcctataccctatggatccctggacttgcctctctaagatgccagcgggtgccccttgctcccctccaagctggcatccagccctacctagccctgtcctctctcaactccaaatcctggcccaggagttaataaaaacatcctccttttctggcgctggtcctgcttacctgaccctcaagggagacatctagtcccacacaaggcatct

SEQ ID NO: 1241982 - DNA, 4001 bp, Homo sapiens
ggaagtgcaagaagatttgaaaatgactctaagcatctggtcacaagtggcctacagcataaccacacctgcacagcactaacagttcttacacaggcttttccaggctgcatctgaacccgtttatttagttctacataccagacctgccgtgagacagcactccactttagatggaagcagaaaactaccaccaccattctagcaggaaaatataaccaaagattccagctttgtttcttgatgaaagaggcccactcttctaaccctgaggaacttcctatctgcactactggggaacagggaaatttcttctctctatccccaaaaaccaagattctccacacacttgaagacaaagctcagctctatatgaatattttaagtcacatgtacataaaacacagatgacaaaaggggtcgttctaaactggagctaggccaagtggattacactaaaaaattaaaatggctaaaaagcaatcttctggggttaatgtatcacaaaacgtcaaaaaataaattctgttccagaatgcactgctacataatgattctgcagttttgctgaagctttattttccgcagttttaaaaacactgttggaaagcagacatcaaagggttttccttgtctaaaaagcataccattacggaatttccagttttatcaagaagaacagtttacaaaatatatttaataaaggtctggctgcctacagttccttataaggaagaccatgtataaatttcattctttaaaaaagaactcaatttatgggagtctatctatgagtaaacgaagctccaaggcttggtttaaacatttccactctcaaaaaggactgatgagtccaatctccttgagaaacatgtctacttcatctagcttttaaggagattctaaaacgttatgtatacatacacttttctcaaacaagcactgttgtaaatttttcacattgccttactatattaaaaaaaaggctaccttacagattaaaatattatctaggaggattaccaaactacgacctcctgataaatgagacagctctccaagccactgtgactctaacctttccattctaaatctttcgggcgcggaggatgaatttttctatctttttgttggaattaagatcctgcattatcaggagatacagagtcaggcttaaagccacagactccagcagctcctcgctgccctagcacagcgggcagggggagccaaggcgcagcatcgcctccacgctccgagaccaacaccaagtctcttcacctccacgctccgagaccaacaccaagtctcttcgcctccacgccgagagcagctgcgaaacggacgctctggggtttcagccgcaccaccactttcctccaccgcagaccgaagggccgccctaggaggagccttctagtccagtcacctcaggcccgtttgcttggggtggagagtgcggtggattcctaagcctttcccctaacgggtgatttcctacaccagacgcaggacccacggtcccacgggtcccagggggaactaaaccccaaggctgcaaaggggccacgggtggggcccaccaacatctcacagcctcctgaggaggcgtgcgccctggacaggaggtccctgcccccgcgtctggcccctggtatcttcccctagggctcccggccgccgctcaccgtgaaggggacatccccgacgctgcccacggagtagcagttgtctccagggttgacagctccggtgaggacctgatgcagatgcatctccggagcccgggctggacagaatgcgcgggaggtgcgacaagctccgcgcctgaccctcctcgggctgcgagagccgtttccctctgtgcctccctcggaaacccgccccgcggaggctctggcttaactcctcgcccccctttcgccttccctccgcctcgtccctgccatgggagctcctcgaccgccgccgccgcccgggtcgccgctcagctgcggaaatgcccggatgttcccactgcctgctgcaccggcgcacaaatgcgggagggcaagggtgcttgtgaggcgggggagggcaccggggggaacgcgcgagccgggagcgtgcagcaagggagcgggccagcgcgcgcgcccaccgcgggggagcgaggtagagccctccccccgcggcaaagctctcagctcagtctttcttccccccatcacccgcgtttgcgcgtgcgcgcgccgtggtttccagggcaattgcgcgcgccacgccgacccgccgtcccgtgattgcgcgcgcagacgtgcgggagttcccttggagcctcccgggctgtagccgctgcggactggggcggaggtgggggcgggggcgagtggggtgcaggtcgctcggggccacgcagcagtcggacgccggggacgcgccacgagccggttttgctgtgttgaacgtattccagaatacagtgtgcaatggtcagtgccgttgacctcagaaggacacccgtcaccgggaatttccacctggagatatcttagatatcttcagtcttttcgaaagtgcagtacataagatattttattttacataaacaatgtaggcatcttgcaactatttagagaagccatactcccctgaaagctaattattttgctcccaccttttgtcacggttattctagacagcaaaaagccgccttagagacgggtgactcctttcgactttttttcatgagtaatttcatgaattagcagaatcgcctgattttccaaactatctgctaaactttgaatggttgataacaaggatcatcagctccctgccacaggccaattcatggcaaatgttctaacccatactatgcttaaatcacagggtaaggaagtaggggacaccaagacataactatctgtaaaaccaggcagaacgccaaaggtggtgtgattgagatataaaagtctttatgcaccacagaagaggaagaagaatgttgactaagggcgtggataaggcattatggagacataacctgacataaacgctgagtttaattttgacaggctgagatagacaagaaatgctgcaaatacagtacagaaaatagagggggtgttgaaggtacaaagattaatgtttgaggcagatgatttatagggtagggaaagtaaataatacttagcaagagatcaaggtatccaagtggtctaactcttggcctaccaaaacatattatggagagtcttgaatgctccaagaagcccagatttcactctgcatgcagtgggggtatatcagatgtttctgagcaaaaatttatataatcagagctgctttgggaagatgactttgtagcattttgaagcataaagggaagggtggggaagattggaggcaaagatctgtcagtcgttggtaatcttttcagtagaaagttgcaggaggaatgaaaaataatacctaatgacctgcggcattctctctctttctctctctcccccctccctccccttccctcccccccccttcctcccttcccccgcgccatatccaagggttcctttttgttactactagattctagatgagtctcttaatctttgaccttcactgcattagaaaccaagtcaaaactatcatcaaacaacaaattgtactcaggtttccaagagtgttactaattcacattatttaaaccatttcacatttggctcttgttttacagcattccatgaagttttggcccattcacacagttgtgaagttgtgagcctctttcttcctctcggtatcaaactcaaaatctgaagcctgtatccacctgttctcttccctcatgaatcctttaaatggcttcttgatagctgtatcttaaggttgcaaatgactaattaagtctcctggaattacagctgagccttttattgtccaatctgatcagtcaaaactcactccagactaatatggcaagtttccttggtagcccaccagggcagctagaccacact

SEQ ID NO: 1241983 - DNA, 4001 bp, Homo sapiens
cagaggcagcctcctggaagatgttttagctgagaactaaagagttttatccccttccatgaaggtagaggaaggaaagtattcctggcaatgggcacatcacagaacccttccctccaagctgatgggcctgccagacctcactgccaagggcctcatttatgtgacactaactcagtgcctggctatgaataaatattagtttaaaacaaaccaaacaacctgcccagacaggtatagacagggtgaaacctacacatatgtagtacaggtcaagtctaattttttaaaaataaaagcttcagaacaaaagcatattcagctctaactgtatacacagaggcatgaacttactcttgtgagtgctgagatttgacctgaatccagggtcaggctttcccacatgtctttagccagcttgctgaaatgtgaaattagaagcctacaagctctccttaaaggagactgtcagaagcggaccacaatgaatgtagggagcaggtggatgaatcaccagcaccatgtaaaacgccagtgcctttaaaagctacagtaagccatctaaatatagatgagaaagaacgcaagtgagtaacagacaaatggtcttacaggaaagcattttaaacttgtgacagccacattcagcacatgtggctaaatataaatattccatcactgttgccattcagccaaccgtcctgaagtagctttctccagcttggaacaactaacacagacaggtattttgattccagcgtcgtttccacaggtcttaaatgctacatgggtgattggtgtggtttcaaacgtggcccaagtgacactgctatcagctactataacggccccacctctcaagacccatgcggaacaaccaaagttttgtaagaaaatggcaagaagtgaaaggaggaacgggagggttagcagcctttccttgcaatgcctcatccttcaattcacctattcaggtgggtcatgagcctctttagagataaaaagcaaactttctgtaaacaggatggaaaagcttttaacttctgtctctaaaatgcagagcattttcagtctatgattggtacttatgatcaactgtgtgtcacttgtcaccgaaaacccagaatatgagtacaagctgatgtcaggttgcagatgtccgtgtccctgtttaataaagaaaatgggattattcactatctgacgcttttatcaggtaggcagtaggtgcacagaacaaatccagctagtcattctcaagagaggcacggcgtttgtccaaggtaccagctcagattaaagacactcatccctagggtttatgcatcaacagagaatatgagccagtcgttcccagcaagtaaacaactgtttgtgtgtgcctcagtttcccgattcccaggccgcctctcccacagggaaccaacacaccctatgagaactagtccggcgcgcacggcaggggctacccaaacacttgtggagcgaatggaggaatgaatgggctcggcagggactcgcgagggacccaagtgccgcaccacatgcctcctccgcgggcgaagcgccctccaccgaccgcgccgcacggcgcccagggtctcccgccacctctgcccggcctggccccgaggcgcctggcgacagcctccccaacaaacgcggctcaggtttcccgtcgccttcaatgctcctggcttaataacccttggcccctcgggagcccggcccgtgccccgcgccgccccgcaccttctcgccctcatccgggttcttgtccgggtggtacttgagcgccagcttccgataggccttcttgatctcctccggggacgcgctgggcttcacgcccaggatgtcatagtactgggtctccttcaccatcttgtgtctgcggggggggcgggcgaggccggtcagagcgccccggacgcccctgccggcaccctggcccgcgcccctggcccgcgcccccgccgcccgctcgcgcgtcacggtcacggtcgccgccgccgccgccgcttgtagctcccgcccgccccccgccccgcgccggaccgacttccacgcctggctccaccgcactagagccaccggctcctccgcggcgggttttattcggcgccggcggaagcttccgcaaggagacggtgacgccacaaaggcctagaaccttcgcggaggttccggcggccccgcggcgggttcgcggcccagacccccgacgcccgtccggcgcggcccagccgctcacctgggcttctcgggcgtctgctcctttggctgcccgtctgattccccggagctccagctctgactgccgccccgggccatggcgggggccggagaaggcggcttgggcctggagggcgccctccgacaactgtcccgccgccccgaggccgcccccttgcccttccgtgggtccgtggagccggctggctggagagtaggcggcctggagggctgtgttggccggagccctgcgccgaagggtgggactgggagagctgcgccctgcggtccccacccggcctctccccgggggtgtggccgccgtctgttcggtcacagccaggctgcggcctaaggtgtgcctgggattgttgcattttttagggggttggagtgggtaggggccctctgctgcctcatgactgcaaggctgaggtgaacctctggccttccagttgaggtacaggggtcctttgctggccccagatgtggacagtatcctctcgaatgcccaccactgggaacccttaagtccctcaaggtgagcagtgacgtcccccacatatgggcagtgacgccccccaagtctgccaagggccgacagtgccctctcttctcccagaagtgggaaactgccccctctcctctgcacatcatcagtgagcaaacatcagggcccgaccaggctgttgggcccagtgttatgcacagggggtcccatggcctggaccctgaaacggctaggtggcccaggatgcttgccttggaagggtacaggagtaggtcccgacttccctaggctgcccccagctcccaacgggtgctcagggagtccagatcacaaaccgttgcagaaaagtgggcgtggaaagcaggccccaacgctatcacagaattgcaggcccctgtcccctagccctcccttggcttctgccaggggaacagtttgtcagaaaggggggtcactgctcacctccctgggatgccctggccttgttttgggtactgtggctgaagcaggtactacctctcctccatgtgttccatgggggtgagaagtgacttgtactgtacaagagaaattaagctgctcttcttggagatgttgctttttttttttttaaattatgccttgtagagcagaacctttaggcagagaactcagagctagaggtcagaaactttgttttctatccagatcttactgtctgagccttagcatctcaacacttttcttcgtcagcaggacatggggattgccacttgcctgcctttctcacagggctcttataagcatcaaatgggatgataactgtgaagactcctagcgcagtgggtctcaaacctggctcctgacagagatcacctggaatcttctaaaaatccctctgggttgcactccacacctgttaccttagagcttctaggggtgaggcccaggcatcagtgtttttcaagctccccaggtggtacagccagagccgagatccactgcccagggtcacatacttgtccagatttagtactcgggaccataggcattcgtaaaatgggcatgtgcaggagagggatggcttaaagacagagcctagaaacatagaatggagctatgcactttggacgacagtgaattctggaaccagtgagacttagacctaggttcaaatcccagcactgctacttctggctgtggaaccttgggcagacaacttaacctttctgagcctcagttttcttaaccttttaatgaggatattaattataac

SEQ ID NO: 1241984 - DNA, 4001 bp, Homo sapiens
atctgcaggtcaggactaggtaaataacttcatgggaacgtccaccggaaacactcaccaaataccctggatactcacatgtcatttagacttaatagaatgatctaagaatggaaaaggagtacccagttgcttgggacattcagtcagaggccagatctcacatgggatgggggttccaactaccagtagggagtccatcctctagggtcccagcactccaaagtctaattcagctcccggcccggacccccttctcccagtgggagacgagtgctatgatgagcttgcctttcagaccatgatcatttgccacagaaccttaacaggattactatacagctgaggggaaaatggctttgaagactacgtaacaacttgggaaaagtacttataataaaatattaagtggaaacaagaaaacaaaatgtctatgtatcaggatggccatgtatgatcatactggggaaagcttggaaagaagcacagagtggttaggataatgtgtacttggtaggtttccctctgtgttctaaaattttctgcatggtttgctatgttctgatttttgaacttgaaagtctattattcaaactaaaagttacaatgaaattgaccaaaagaccaaactcatctcaacagggtaatagccaagaatataccccacatcattgcccctaaaagggactatcttggtgacccactacctaccacccatgcatcttgcaaaaaaaacaaaaaacaaaaaaaaaacacccgcagagaagtacagactccatacagagtgcccaaaaaacacaaggtgccccaatgcttagcaacaggggacaacagggcaaaaaacaaagaccaacatttcaacggccttctcagttttcccagcaaggggtaaagaactggtgtagtctatttttgaagagacgttaataatacagtgacgaacttaggaggaaaaaaaaatttaaaggttctacctgtgataaagtggaaaagaactacacacacatacacactcacatacacactcacacacacactcacacactcacacactcacatacacactcacacacacactcacatacacactcacaaaaggcctgcacagtgcacccagcacacagtggggaccagaagaggaggtatttgttgaatgaatgaatgaatgaatgaatgagctctctctggggaactctacagccgtttctataaattgtgtccccagtctcctcatcctctttgatttccgatctaaattgccactctcctcccaatatccctttcactgcaatttcccttccaatttgtgcctttatagggccctctcctcctacacacaattttttaaagtgcatttactcagccagctaacaaacattttagcacctaccctgcacagctagatactcaccccataagtggccatgggggcacagtcactgccctgcttacattatggcaggtaatacagttatcaaacaagtaatcaccattaaaggaatacagttaatcaaacaagtaatcaccattaaagtaggatgcacgttgggcctgtggttcagtctatgaggcagaggcagcctcctggaagatgttttagctgagaactaaagagttttatccccttccatgaaggtagaggaaggaaagtattcctggcaatgggcacatcacagaacccttccctccaagctgatgggcctgccagacctcactgccaagggcctcatttatgtgacactaactcagtgcctggctatgaataaatattagtttaaaacaaaccaaacaacctgcccagacaggtatagacagggtgaaacctacacatatgtagtacaggtcaagtctaattttttaaaaataaaagcttcagaacaaaagcatattcagctctaactgtatacacagaggcatgaacttactcttgtgagtgctgagatttgacctgaatccagggtcaggctttcccacatgtctttagccagcttgctgaaatgtgaaattagaagcctacaagctctccttaaaggagactgtcagaagcggaccacaatgaatgtagggagcaggtggatgaatcaccagcaccatgtaaaacgccagtgcctttaaaagctacagtaagccatctaaatatagatgagaaagaacgcaagtgagtaacagacaaatggtcttacaggaaagcattttaaacttgtgacagccacattcagcacatgtggctaaatataaatattccatcactgttgccattcagccaaccgtcctgaagtagctttctccagcttggaacaactaacacagacaggtattttgattccagcgtcgtttccacaggtcttaaatgctacatgggtgattggtgtggtttcaaacgtggcccaagtgacactgctatcagctactataacggccccacctctcaagacccatgcggaacaaccaaagttttgtaagaaaatggcaagaagtgaaaggaggaacgggagggttagcagcctttccttgcaatgcctcatccttcaattcacctattcaggtgggtcatgagcctctttagagataaaaagcaaactttctgtaaacaggatggaaaagcttttaacttctgtctctaaaatgcagagcattttcagtctatgattggtacttatgatcaactgtgtgtcacttgtcaccgaaaacccagaatatgagtacaagctgatgtcaggttgcagatgtccgtgtccctgtttaataaagaaaatgggattattcactatctgacgcttttatcaggtaggcagtaggtgcacagaacaaatccagctagtcattctcaagagaggcacggcgtttgtccaaggtaccagctcagattaaagacactcatccctagggtttatgcatcaacagagaatatgagccagtcgttcccagcaagtaaacaactgtttgtgtgtgcctcagtttcccgattcccaggccgcctctcccacagggaaccaacacaccctatgagaactagtccggcgcgcacggcaggggctacccaaacacttgtggagcgaatggaggaatgaatgggctcggcagggactcgcgagggacccaagtgccgcaccacatgcctcctccgcgggcgaagcgccctccaccgaccgcgccgcacggcgcccagggtctcccgccacctctgcccggcctggccccgaggcgcctggcgacagcctccccaacaaacgcggctcaggtttcccgtcgccttcaatgctcctggcttaataacccttggcccctcgggagcccggcccgtgccccgcgccgccccgcaccttctcgccctcatccgggttcttgtccgggtggtacttgagcgccagcttccgataggccttcttgatctcctccggggacgcgctgggcttcacgcccaggatgtcatagtactgggtctccttcaccatcttgtgtctgcggggggggcgggcgaggccggtcagagcgccccggacgcccctgccggcaccctggcccgcgcccctggcccgcgcccccgccgcccgctcgcgcgtcacggtcacggtcgccgccgccgccgccgcttgtagctcccgcccgccccccgccccgcgccggaccgacttccacgcctggctccaccgcactagagccaccggctcctccgcggcgggttttattcggcgccggcggaagcttccgcaaggagacggtgacgccacaaaggcctagaaccttcgcggaggttccggcggccccgcggcgggttcgcggcccagacccccgacgcccgtccggcgcggcccagccgctcacctgggcttctcgggcgtctgctcctttggctgcccgtctgattccccggagctccagctctgactgccgccccgggccatggcgggggccggagaaggcggcttgggcctggagggcgccctccgacaactgtcccgccgccccgaggccgcccccttgcccttccgtgggtccgt

SEQ ID NO: 1241985 - DNA, 4001 bp, Homo sapiens
tggatgaatcaccagcaccatgtaaaacgccagtgcctttaaaagctacagtaagccatctaaatatagatgagaaagaacgcaagtgagtaacagacaaatggtcttacaggaaagcattttaaacttgtgacagccacattcagcacatgtggctaaatataaatattccatcactgttgccattcagccaaccgtcctgaagtagctttctccagcttggaacaactaacacagacaggtattttgattccagcgtcgtttccacaggtcttaaatgctacatgggtgattggtgtggtttcaaacgtggcccaagtgacactgctatcagctactataacggccccacctctcaagacccatgcggaacaaccaaagttttgtaagaaaatggcaagaagtgaaaggaggaacgggagggttagcagcctttccttgcaatgcctcatccttcaattcacctattcaggtgggtcatgagcctctttagagataaaaagcaaactttctgtaaacaggatggaaaagcttttaacttctgtctctaaaatgcagagcattttcagtctatgattggtacttatgatcaactgtgtgtcacttgtcaccgaaaacccagaatatgagtacaagctgatgtcaggttgcagatgtccgtgtccctgtttaataaagaaaatgggattattcactatctgacgcttttatcaggtaggcagtaggtgcacagaacaaatccagctagtcattctcaagagaggcacggcgtttgtccaaggtaccagctcagattaaagacactcatccctagggtttatgcatcaacagagaatatgagccagtcgttcccagcaagtaaacaactgtttgtgtgtgcctcagtttcccgattcccaggccgcctctcccacagggaaccaacacaccctatgagaactagtccggcgcgcacggcaggggctacccaaacacttgtggagcgaatggaggaatgaatgggctcggcagggactcgcgagggacccaagtgccgcaccacatgcctcctccgcgggcgaagcgccctccaccgaccgcgccgcacggcgcccagggtctcccgccacctctgcccggcctggccccgaggcgcctggcgacagcctccccaacaaacgcggctcaggtttcccgtcgccttcaatgctcctggcttaataacccttggcccctcgggagcccggcccgtgccccgcgccgccccgcaccttctcgccctcatccgggttcttgtccgggtggtacttgagcgccagcttccgataggccttcttgatctcctccggggacgcgctgggcttcacgcccaggatgtcatagtactgggtctccttcaccatcttgtgtctgcggggggggcgggcgaggccggtcagagcgccccggacgcccctgccggcaccctggcccgcgcccctggcccgcgcccccgccgcccgctcgcgcgtcacggtcacggtcgccgccgccgccgccgcttgtagctcccgcccgccccccgccccgcgccggaccgacttccacgcctggctccaccgcactagagccaccggctcctccgcggcgggttttattcggcgccggcggaagcttccgcaaggagacggtgacgccacaaaggcctagaaccttcgcggaggttccggcggccccgcggcgggttcgcggcccagacccccgacgcccgtccggcgcggcccagccgctcacctgggcttctcgggcgtctgctcctttggctgcccgtctgattccccggagctccagctctgactgccgccccgggccatggcgggggccggagaaggcggcttgggcctggagggcgccctccgacaactgtcccgccgccccgaggccgcccccttgcccttccgtgggtccgtggagccggctggctggagagtaggcggcctggagggctgtgttggccggagccctgcgccgaagggtgggactgggagagctgcgccctgcggtccccacccggcctctccccgggggtgtggccgccgtctgttcggtcacagccaggctgcggcctaaggtgtgcctgggattgttgcattttttagggggttggagtgggtaggggccctctgctgcctcatgactgcaaggctgaggtgaacctctggccttccagttgaggtacaggggtcctttgctggccccagatgtggacagtatcctctcgaatgcccaccactgggaacccttaagtccctcaaggtgagcagtgacgtcccccacatatgggcagtgacgccccccaagtctgccaagggccgacagtgccctctcttctcccagaagtgggaaactgccccctctcctctgcacatcatcagtgagcaaacatcagggcccgaccaggctgttgggcccagtgttatgcacagggggtcccatggcctggaccctgaaacggctaggtggcccaggatgcttgccttggaagggtacaggagtaggtcccgacttccctaggctgcccccagctcccaacgggtgctcagggagtccagatcacaaaccgttgcagaaaagtgggcgtggaaagcaggccccaacgctatcacagaattgcaggcccctgtcccctagccctcccttggcttctgccaggggaacagtttgtcagaaaggggggtcactgctcacctccctgggatgccctggccttgttttgggtactgtggctgaagcaggtactacctctcctccatgtgttccatgggggtgagaagtgacttgtactgtacaagagaaattaagctgctcttcttggagatgttgctttttttttttttaaattatgccttgtagagcagaacctttaggcagagaactcagagctagaggtcagaaactttgttttctatccagatcttactgtctgagccttagcatctcaacacttttcttcgtcagcaggacatggggattgccacttgcctgcctttctcacagggctcttataagcatcaaatgggatgataactgtgaagactcctagcgcagtgggtctcaaacctggctcctgacagagatcacctggaatcttctaaaaatccctctgggttgcactccacacctgttaccttagagcttctaggggtgaggcccaggcatcagtgtttttcaagctccccaggtggtacagccagagccgagatccactgcccagggtcacatacttgtccagatttagtactcgggaccataggcattcgtaaaatgggcatgtgcaggagagggatggcttaaagacagagcctagaaacatagaatggagctatgcactttggacgacagtgaattctggaaccagtgagacttagacctaggttcaaatcccagcactgctacttctggctgtggaaccttgggcagacaacttaacctttctgagcctcagttttcttaaccttttaatgaggatattaattataactacttcataactttgtgaaacacctggtatatagtcacaatattgatgctttttgggggtgggggggtgcgggcaggggctaaggtatagaagctgatagtgattctcttcttgatggaacttagccaggctcctatgagccctcttctcaactaggcttcagtcttggcctataaagactgaacagacagcaacacagtttctaataattcaacgtcacatccttaagatcaccagttcccaggctttttggcaccagagaccagtttcatggaagacgattttgtcacggacagggtggtgggggtgggcaataattctatgatgaaggcctggcgtggtggctcacacctgtaatcccagcactttgggacgccgaggtgggcagatcacttgaggccacgagttcaagaccagtctggccaacttggtgaaactccatctctactaaaaatacaaaaattagccagggatggtggtgctcgcctgtaatcccagctac

SEQ ID NO: 1241986 - DNA, 4001 bp, Homo sapiens
agaagttgcagtaagctgagattgcgccactgcactccagcctgggcgacagagcgagactccgtctcaaaaaataataataggccgggcacggtggctcacgcttgtaatcccagcactttgggaggctgaggtgggcagatcacgaggtcaggagatcgagaccacggtgaaaccccgtctctactaaaaataaaaattattagccgggcatggtggcaggcgcctgtagtcccagctacttggagaggctcaggcaggagaatggcgtgaacccgagaggcggaggttgcagtaagccgagatcgcgccactgcactccagcctgggccacagagcgagactccgtctcaaaaacaataataaaaaataataataataaagaatttaaaaaataataatttgtaaacatagagcacttagaatactatccagaaaaaaaaaatactgtctaggacatagtaagcattatacagatgttaggaattattaatcctaaaatattgaaacacgagagaggtggagcagatgcttttgatgcttcatagacatcccatggccatttctgatttcagctgcggctgcaggggacagatttgtgcaggttgacagcatttctcaagggccctctgggtctctctgattttctgccccagagcttcctcttctcaaaagctcactcaccccatgagcagggcagcccagaagtactgggacattagtgggcactatttttttttccttttttttttttttttttgagacagtctcgctctgtcgcccagactggagtgcagtggtgcaatctcagctcactgcaacctccgcctcccgggttccagtgattctcctgcctcagcctcccaagtagctgggactacaggtgtgtgccaccacgcccggctaatttttgtatttttagtagagaaggggtttcagcatattggtcaggctggtctcgaacttctgaccacatgatccgcccgcctcggcctcccaaagtgctgagattacaggcgtgagccaccgcgcccggcctagtagacactaattttctttctttctttctttttttgagaaagagtcttgctctgtcgcccaggatggagtgcagtggcgcgatctcggctcagttgggcactaattttcatttgatgaacgcctctccttcgtatattgttaaaactaccaccatgatccagggggagataaaagaaatcctaaatccagcttgatcagtgtttcactccctggcatctttatcaccacctaaggtagcatggacctctataccatctgccttaaccttctgatcctcctgcttttagcccactaactagcacatgctgagaagggcatcagctacttgaaaagagtcaatgggcttgagtggaaaagaaaatagagacagcagggtcatcggtcacattggcaagggggcatgaaaagggagtggagaggctttgagatcttacttttctttcgttctaggctcttagtggaagaattaaatcagcctgcagaagagactgaaatgaggcacctcttgtcacagtcaaggcagaagcggaaacggaggccgagactgcgcaggcgcagaggaggctagcgttccttgctgcctcgccccgcggcctctaggagacaggggccacggggagagcacagccacccggcgcgaagagccctctgtaccccgcttcctcttgaggccctcggaccgtccaggaaatgtctgggagcccgcctgcggagggcatagcgccgaccctcgctccccgcccaggacccgaatgaacctggagagcggatgccagcagtggccgaggcgctaggacaggaaggaccgccagacctctcaagatcagccttcctcgccaccgttctcacctctttgtccgctgccttctcctcaatgcctagcagcgcgtacaggtccatctgtaagagctccttggtcactgccatggttccggcctgacggattcgtactacaactcccaagagtctaagcgcgcgtgaggactgcaggctccgagcggcgcctagccctctgggaattgtgttctgggtcaggcttgactgactctgagggaggccggcagtcgtgaatgaactacgactcccagcagcccccgttgccgccgctgccgtacgctggctgcaggagagcgtccggattccctgctctaggtcgcggcgggacagtgccagtgggcgtgtggggcggggcagggcagggaagggaagggcggagctggggtgagggtccaaggggcccaggacttggccggcgtgatctcagctctgcagaccctgcggtgctgggagccaccatggagagtaggtgctacggctgcgctgtcaagttcaccctcttcaagaaggaggcgagtcttccctccccgagggctgcagggccagggaggagaggagggaaaagcgcgggacttaacgtccaaagacttggtcttacggctcctttccagctgtgtggttttgatgaagtcattgatcctcagtttccatttctgtaaaatggggctaacattctctcgctttcagggtttatgtgagggtccactgaagtgctttaggtgagagttccctataaactgtaaagcgcgctgccgtcgtttttgcaaagctactcttttctgtcggcccagtgtagcatctggcggttttcttctctccaccctgctcctccgaagcgcggtgtccatcacaccaagcccgttactccctctgctctgaaatcttccccatcccgcagcctgcccttctccaggtcgctggagttagattaccacacttcctcctgcttccggggcaccatggtgaaggctgactgtcctgtccctatcacagacctgccagattcctctggtaaactgcaggttccctctgcctcagttgtggccagggattctgaccaggagatgatgggaactagatggagtaaattagtgtcacgcaggaaggcaggaccgtgcagcattcaccaacctggattttggagtcagcgttcaaatctgagctctgctgtcttattgaggcggtgaccttggtttggataagttatgtaacctctctggccctctcaaaataaggataatcacggttggcatcaagattaagtaaaataatgtgtgtaaattgtaaggaataaatcacatgatgaatgttaagtactgggtttagtgcctggcacatagtaagtgcttaataaatggaggctattgttagcccatcctgagccaagcctccctccatctctgcaagagcagaggaggcatcggctctgccctgtctctctgattctcctttgtggaagagtcagtggcctgaaatactgggctttatctatctgtcttctacatccctgggtcagggaattgaagacagggtagaaagcatgggaattttgtataaaccttcatttggcttgaataaggtactggaaaccgaggaattgctttactcaccatccctaggccttaggggccccactcctcttcttcctcccagcagctggtcataacttcagtgacttctctctgtgtgtgcttggagagtccctgggagcagcctgcaggggcgggtgagagggggatctcccgcttcatgtttcttgtagtacggctgtaagaattgtggcagggccttctgttcaggctgcctaagcttcagtgcagcagtgcctcggactgggaacacccaacagaaagtctgcaagcaatgccatgaggtcctgaccaggtaagaggcaggcatgggtgaaagttcagccaagtatggcagtgggcatctggccagccctcacagctttgtactctgtcgcgagagtcagccgaggaagtgtttggagtggggggcactgcctggtgggatggcaggatttataacactagatttcttctctgtagagggtcttctgccaatgcctccaagtggtcaccacctcagaactataagaagtaagtgctgaagagaaaaag

SEQ ID NO: 1241987 - DNA, 4001 bp, Homo sapiens
cattgcaaattaatgaatggtctgcctggataatcctcaaaataacattcaactataaaattcaaagactcatttatttattagaaaaataatgttctatgagagcatatggacacagggaggggcacatcacacactggggcctgtgggggtttgggggttaggggagggataacattaggagaaatacctaatgtaggtgatgggttgatgggtgcagcaaaccaccgtggcacatgtatacctatgtaaaaaaactgcacgttctgcacatgtaacccagaacttaaagtataataaaaaaaaaatttaaaaaaggaaaataatcttcttagaaagatatgtaagaatcccagtttcacttattcacttataatacataattatatataatgcatatatatagaatacataggcatctgtatcataagcatacaggtaaatgcttacgtattcatacttacagcatatgtccttacagctcttacgcttcagcaagaattttccaacattgcttttttagcaaactttttttattataaagcaacatatgcacattacaggttatttagtgtaactgactctaccaatcttctctcctcccctccaatacttctaagtctttgtttgttgtgctttactttaatcgttaaacttttggcaagcgatgtaaatttgaattattcacttcctggggtacttttaattcttaaaataagacacaatggttaaagcttaatcatttatgttacagaggacatttactgaacaacaataattattgtgacattatggtctagtctcctaaaaatgacattgaaggaaagggaaccggaatattccagacactacagtaggtctgaaatctcatatcaagtccttaataggtcaaaacttacagccagtatcaattacctaagggacttaacgaaaacgtttatgaaatcttcaattggattacaaaagcaagcacatcgttgcactgtatctaagacactctacagggcaaaatctcatgaaacaagtatttaagtagtctaactttttaatgttgctagtgtgttcccttctgcctcagtttatagattgagtatggaaatatttaagcaggtttgtttttggtttgtcagtcacaggacttatttagacacttaaatttatgatttggttactacagacatcaaactccttttggaatacggagtatagggtaaggtcactctaaagcaatgatgagagtccgaagcaacagcaactggatctagcataagactagtacaattcggtctctaccacgaagagagatctctgtacttgagtgcccaaaggcagaaacacacacatgccataagcaatccacatctgtgaagatgagggaggggtggacttcttgggatgggcggaaacacttacaactagggaggaagccaggctgcggcggacccagctgaccaaaggaactacagaagaggacgaagaaagcgagggggaaagggcgagggttattaactgagttgatggaataaggtagtggctccaaacttcacggctcattagagcttgaaaaaaaaaaatcagacgccgggtcgcacagaagtaattaaaccaatccctctggcggtggggcccaggcgtcggtactttttttaatttcccacttgaatccaatgggaatccaagtttaagggctagaagaccagagagcgacagacagggaggaggcgcgccagccaggggccgaggcacatgcgggccggcaacagcgaaggctccgcctcttcctgtggctcggaggagccgcggaacccccaacgcgcgactcagacggagacacccactctttcggcgctagcggcggctggaagggacgagagcctggcctaggaggaaggaggcggctccaggaccgcattacctgatcagagccgcgaccctcatgctgggcgcagtgcgcgtgcgtgcggcgagcgcgggcgggagccaggaggtcgcgccgcagctcgcgtgacgcaccgcggggcctcgcccgggtgttcgctccgccgcctgtccgcggatcggcgctgcgagccccgcggctgcctgcgggacacctgagcgcggagggtgcggcaccttggcaccttgaccctgtggcagggacatctcggcccaggaaagaatgaggtttaggcacggcctaaccacctaagtgagggcactgaagctgccgggggaagggcaaggtccgcgttgcagagcccaagcccagtggcgcaggatttgttttggtaagaggggatttagcgtcccaattgctgcaaattgacacagttgcggacgtgcaagcgcagaagaaatttgtccttcctcaccccacagaacagaaacaactgtacacttctgctttttaacttacatctcctctgtcctccaaacctgtgtgtccagatgtgaaactcagatccccaggggctgtggtaatttttaaatctggggctagccccccccacctctaggccctctgtggctttggctcttggtcaagcttgtgtatttgacaaggccaggccaggctcttcaccaaagagcaatggccttgcagaaagaaaatctagcttctaagtttatttgccaagtatgtattgagtgcctttcgtgtaccaggcactgttttagactctgtggatacaaccgtaaataaaacaaaaacccggcattccgggcatagagcttaaatggggatggagagaacagacaatacatatcttaaaggtaaatagtctgttgaagagtgaaaagtgctattggaaaggggcggggtgcggtgggggagagtcaggagagaggtggagaggcaaattgcagaattaaatcgtgtctatgtaggccttattggtaagatgagagttgagccaatttaaataaggagagttcgctatgtgtatgattggggtgtgctccagacaagaaaaaaaaatcgaaggctctaggtgcgttgtgtgtttgtggaagattaaggcagatccgtgttgctggagcagattgagcaaagcagagagtagtggagagcaggttaaggtgatggaggggaaggattatatagggtcttgtaggtaattgcagacttttgaagggtgtgacttaaaattttaaaaggattgcagtgttgagaatccacctattaggaagctgttacagtgttccagtagagagatggcggagcctagaatcaacatggtgaatttggtgagaagtaagaggattccagctctattttgaagatagagccaatagaatcaaattcgatatgggatacaagagaaagaaagtcatgagggatgatgccaaaggcatgaattaagtaagttaatatatgtagggaacttaaaattatgccaggtacatagtaagcattcaattttattttgacattctcaactctaatagtaggggtgactagagcagtgacagtctacatatcagttttagcgtctagaatcatacagctttaagattttgcagttatgaatatttaccaaatgagtcaagtatttaagaagtttgcagtctaattggaggagataaatacgtgaaacacacttaaaatgatacagctccaatgagtggaagaagcaccagggctctcgtctcatgccgaattgggtaaaatgacacagacacacatggagtggttttaaggggtggagaatttaataggcaagaaagaagggtgaagaaaggaagaagctcccctgtagagacacatggaagtgggctccaaagcctagagaggaaacccccagtgctggggttaacaggcagttatatgaggagactggaagaggcggtgtcagatttgcatagggctcaggggattggtttgaccaggcatgtcattcacatagcccacgaaaaacctggctctcccaccctagccttttaatatgcaaatgcaggtcgccttgatgttctacacgtgtggcgatatgtggggatggccatgttgccagacacataca

SEQ ID NO: 1241988 - DNA, 4001 bp, Homo sapiens
gagatctttttcaagtgactcgacttcaagcatagaatccctctgctcatcctgctcttctcacaggaatctttcctttcctcaccatcaaagcctgctcaccaggataatgaaataagataagactttgatcattaagatggaccatatgtggccaaaaagagaagccccaaaatagtagttaaaactgataccaaaatatcactttttggggcaatatataatgcctacattattttgtatctgcgttttatgttatcagaattcaagaattattttatttcagagatgtgtagcccaatatagtcaaaagaatatcctaacatagcaaactttggtgtccagacaaaggaaaaccatggaaaggctttaaaaagttacaaaaggcatacagatgtgaagttactcagtgactattgcaaatcatcaaaaacggcatatgattaataaaatttatttttatgtgcctattcctgttcctcttttacataataatgtcatatcaagctggatggagatagaattaactcaggaggatagccagtaagagttacaggccatttttgcagaaagggaattaacttgaatttaataacttaagacttttcacgagataaacaattttctattcatcttaagtgcattccattttcttgctgcattactctgagaataatttaaataggtaacttttctggaaaaagaagcattaaacttgttgaaattctggcttaggaaaaaaaaaaaaaggaaggtctgctattacatctgttactctataagttttaattttgggctcccatagcccaagtaggtgatgaagggatggggtgggaaaagctaagtggcaagtgcaggaaaaacagcgaggttatgccagcacagcaacaatggactaagatgtcaagacacctcatagcactaagcccctcactcagaaatagagcatgttgactcagaaaatagctttaggactcttgagtttggatccactcaagtgaaattccttaatttttaactcaagggccaaacagccgtccacttaaacacctaaagcctcactgaagcctagctatctcattctttagggtccacacctagttgagagattcaatagcacagagggggcaaagaccttgaaaaactatgaatgaggaacaagaggagaggcatagcagagaatattgagaagagagatgggaggaatgccaagtcttagaagaaaagtgtgtgagaagacaggtgtggcaggaaaggaaagtgtcctgctgcgagtgggtggaacagaatgggagagggcagtgagcagggagggaatcgacctagcatgaggcaggagagaaaaaagaccaccagctgaaaaaccagaaaatctgaggccgaagcccatctgccaagtcggacttaaggaaaatcccttcgcctctgtgggcttccgtttcctcatctgtaagcgctgacaatacccggcctcccaaccccagcgagactcaattaagataacggacgtggaagccaggaggccagcgcccagagctcaaggggcgcccagtgaacggtggttgactcggaatctcagagcctcggcttcctcttccggcaagtgggggggaggggggaagggcaccaccggctctgcactgggcagggcggcgcgccgggtaaaccgcaaagcgcgctgaccctgagaacgcgccgagcagtccctccgtgaggcggaaagggcctggtgagccgtggcccaggcctcgccggcgcaggagaaggagaagggggcggatactgcaccttccccccggccccgcccggaccgtcccgacgtgcgctatggagcgggcctgcgccgcttcatgctgcgccgcctccactccggtcctggttgcagtggcttcctcggcggcggcgccggtgacaacccaggcggcgaacgcggcactaagaagcagcggcggcagtagcagcggccttggcctcggaggctttagcacttccggttcgttgcgatccgctttccgactggcgaaggcgcagccgggccaagaagggcgccgctgtctgctgggtggggtccaacaccacagcgcagtctagtggccggaggagccaaggaggcgcggggtggagactgggccgagcaggggatagagatgaactccagaaaggaacagcgacttgctgaaagtcacagggcaaaatgtggcgcgtctgtagtcaataaataatatatattgagtgcctgctcaaaatagacaaaattcctgtccatgtgccaggcagagagagccttagacgctgggagcaaaccagggtaaatccctcccctttcaacgagatgatattgaggaaagagactagggccttggagatctaagcgtctccttgtggtggaaagaaatctgaacctggagtccgaaacttggctctaatattaactagcgatctttcagcaggtcactcaatctatttgagccataatttctttacctctaaaagggatataatacatttcacttaattgcaattaaagaaaaccagctgggcgtggaggctcacgcctgtaataccacactttgggaggccgaggcaggcggatcacttgaggtcaggagttcgagaccagcctggccaacatggcgaaaccccatctctacaaaaaattcaaagcttagcttggcatggtggcgggcgcctgcaatcccagctactactcaggaggctgaggaaaggagaatcgcttgaacccggaggcagaagttgcagtgagctgagatcacgccactgcactccagcctgggtgacagagtgagactctgtctcaaaaaaaaaaaaaaaaaaggtatgcactttaacacataaaatgaagaaactggggcctaggggaaagaagtgaatgacttgttataatcagagccagaggcaggtcccttgacctgcaatttctttcctggtctacactgtatattggctgagaaaaagggaactcaggaagatatccaggaaagtagcaggtgtacaacaaaactgtgcaaaagcggggcctcccctattttctattattacaaagaacaatgtgtcagagtcgtgtgtcattaggatttattataatagcactaataaaaaatccatttgggtactatgctccactccacagtatataattattcactctgaggttaaatgagccttccctcaggctttttaaagttgagctcccttaaaaaaaaaaaaaaaaaaaaaggcaaagtcattttccttgggtctcttctattaattttctccaaatgacctgagagcagattttaaaggctttaaatgcacacacaaacacacacacacacaaaatacagagaaatatcttgcacttcattaattcaacaagtgtttgctgaatctctgccttgtacctgtcactgttttaagcagcggggccacaatagtgaacaaagtagataaagcccctgttttcatgcagtttatagcctaataagaagagatagagccccctccccgcaaaagcaaacaattaaaaatatataatttcatgcatttaaaaaaagagccatggacagataaaatacttgcttatatcacatagctaattatatatttgactagattggaatctagatttcttttttttaatttttatttatttttttttgagatggagtctcaatgtgtcgcccaggctgaagtgcagtggcaccatctcgactcactgcaagctccgcctcccaggttcacgccatgctcctgcctcagcctcctcagtagctgggactacaggcactcaccaccacgcccggctaattttttgtattttttttagtagaaacggggttttaccacgttagccaggatggtcttgatctcctgacttcgtgatctgcccgcctcggcctcccaaagtgctgggattacaggcgtgagccaccgcgcccggccagagttcttgatttttattcttattttcaaaccctgagaaagctgtagaggaacat

SEQ ID NO: 1241989 - DNA, 4001 bp, Homo sapiens
aatgtacattagcttacatttaaattatctggtattcctgaatcgtactaagccctggacactctatgcatacacatgcatacttgcgtgtacatgtacaaacattgtacagtccaaatgatggtctcctattctgtaagttcacagcaaatgtccatcctgcatttctaaaatatacctgatattatataatattggtaatctgtgcagatgtttggtaaatgacttaattcctgattatatacaaacacattctcaaaataggtgacctgaattttctaatgtcaaaaataggaaaatagggtcagtgtaccttctcagcacagtgcatatatttcactgccccacctacctcgtcacttaagtagtttccctggtgcctacctgattttattttcatctgctcagatctcttccacattcaaagagatctttttcaagtgactcgacttcaagcatagaatccctctgctcatcctgctcttctcacaggaatctttcctttcctcaccatcaaagcctgctcaccaggataatgaaataagataagactttgatcattaagatggaccatatgtggccaaaaagagaagccccaaaatagtagttaaaactgataccaaaatatcactttttggggcaatatataatgcctacattattttgtatctgcgttttatgttatcagaattcaagaattattttatttcagagatgtgtagcccaatatagtcaaaagaatatcctaacatagcaaactttggtgtccagacaaaggaaaaccatggaaaggctttaaaaagttacaaaaggcatacagatgtgaagttactcagtgactattgcaaatcatcaaaaacggcatatgattaataaaatttatttttatgtgcctattcctgttcctcttttacataataatgtcatatcaagctggatggagatagaattaactcaggaggatagccagtaagagttacaggccatttttgcagaaagggaattaacttgaatttaataacttaagacttttcacgagataaacaattttctattcatcttaagtgcattccattttcttgctgcattactctgagaataatttaaataggtaacttttctggaaaaagaagcattaaacttgttgaaattctggcttaggaaaaaaaaaaaaaggaaggtctgctattacatctgttactctataagttttaattttgggctcccatagcccaagtaggtgatgaagggatggggtgggaaaagctaagtggcaagtgcaggaaaaacagcgaggttatgccagcacagcaacaatggactaagatgtcaagacacctcatagcactaagcccctcactcagaaatagagcatgttgactcagaaaatagctttaggactcttgagtttggatccactcaagtgaaattccttaatttttaactcaagggccaaacagccgtccacttaaacacctaaagcctcactgaagcctagctatctcattctttagggtccacacctagttgagagattcaatagcacagagggggcaaagaccttgaaaaactatgaatgaggaacaagaggagaggcatagcagagaatattgagaagagagatgggaggaatgccaagtcttagaagaaaagtgtgtgagaagacaggtgtggcaggaaaggaaagtgtcctgctgcgagtgggtggaacagaatgggagagggcagtgagcagggagggaatcgacctagcatgaggcaggagagaaaaaagaccaccagctgaaaaaccagaaaatctgaggccgaagcccatctgccaagtcggacttaaggaaaatcccttcgcctctgtgggcttccgtttcctcatctgtaagcgctgacaatacccggcctcccaaccccagcgagactcaattaagataacggacgtggaagccaggaggccagcgcccagagctcaaggggcgcccagtgaacggtggttgactcggaatctcagagcctcggcttcctcttccggcaagtgggggggaggggggaagggcaccaccggctctgcactgggcagggcggcgcgccgggtaaaccgcaaagcgcgctgaccctgagaacgcgccgagcagtccctccgtgaggcggaaagggcctggtgagccgtggcccaggcctcgccggcgcaggagaaggagaagggggcggatactgcaccttccccccggccccgcccggaccgtcccgacgtgcgctatggagcgggcctgcgccgcttcatgctgcgccgcctccactccggtcctggttgcagtggcttcctcggcggcggcgccggtgacaacccaggcggcgaacgcggcactaagaagcagcggcggcagtagcagcggccttggcctcggaggctttagcacttccggttcgttgcgatccgctttccgactggcgaaggcgcagccgggccaagaagggcgccgctgtctgctgggtggggtccaacaccacagcgcagtctagtggccggaggagccaaggaggcgcggggtggagactgggccgagcaggggatagagatgaactccagaaaggaacagcgacttgctgaaagtcacagggcaaaatgtggcgcgtctgtagtcaataaataatatatattgagtgcctgctcaaaatagacaaaattcctgtccatgtgccaggcagagagagccttagacgctgggagcaaaccagggtaaatccctcccctttcaacgagatgatattgaggaaagagactagggccttggagatctaagcgtctccttgtggtggaaagaaatctgaacctggagtccgaaacttggctctaatattaactagcgatctttcagcaggtcactcaatctatttgagccataatttctttacctctaaaagggatataatacatttcacttaattgcaattaaagaaaaccagctgggcgtggaggctcacgcctgtaataccacactttgggaggccgaggcaggcggatcacttgaggtcaggagttcgagaccagcctggccaacatggcgaaaccccatctctacaaaaaattcaaagcttagcttggcatggtggcgggcgcctgcaatcccagctactactcaggaggctgaggaaaggagaatcgcttgaacccggaggcagaagttgcagtgagctgagatcacgccactgcactccagcctgggtgacagagtgagactctgtctcaaaaaaaaaaaaaaaaaaggtatgcactttaacacataaaatgaagaaactggggcctaggggaaagaagtgaatgacttgttataatcagagccagaggcaggtcccttgacctgcaatttctttcctggtctacactgtatattggctgagaaaaagggaactcaggaagatatccaggaaagtagcaggtgtacaacaaaactgtgcaaaagcggggcctcccctattttctattattacaaagaacaatgtgtcagagtcgtgtgtcattaggatttattataatagcactaataaaaaatccatttgggtactatgctccactccacagtatataattattcactctgaggttaaatgagccttccctcaggctttttaaagttgagctcccttaaaaaaaaaaaaaaaaaaaaaggcaaagtcattttccttgggtctcttctattaattttctccaaatgacctgagagcagattttaaaggctttaaatgcacacacaaacacacacacacacaaaatacagagaaatatcttgcacttcattaattcaacaagtgtttgctgaatctctgccttgtacctgtcactgttttaagcagcggggccacaatagtgaacaaagtagataaagcccctgttttcatgcagtttatagcctaataagaagagatagagccccctccccgcaaaagcaaacaattaaaaatatataatttcatgcatttaaaaaaagagccatggacagataaaa

SEQ ID NO: 1241990 - DNA, 4001 bp, Homo sapiens
gggcactgaaagtgcattcctcctagagatacctcagaaatatcactttgcagttcatggacctgctatccacataactaaatggatattagtgaagctttatataaataaccttcctctagaaaaatcaaccaccacaaatacctgtaagacagtaaaagagaaatgtttatggctccacctcttagttcacctatatactctcacttatggctgaggtggccacgtagaagaggccagcaattgtaaatcatgggcagctccctccagtggtctctgaaactacatgatcagggcatctgtcctaaccgagccaacagcctgcctcgactgtgagaaaatcattgcaaatgattttattgcaaatggggttatttaaaatttttaaaacatacttgttaacatcaaatatgtgcaaggaagtacaatttgagtcatgggggctaaaaagacttagaaaacataaagactgttcctaaggaactaacaattttaacaccttgatggtgcgtccatcattctggaacttaaggctaaaaatacattaattttttattcctccttctacccaatttccaccccaaattaattatactcaccaagttgcatctaccttgtatataatcctctatcttcactctcaaagtcaggattctaattcagttccttattaactcatagatgggccacagcaatgtcttaaacctctttgagtacttattattagttccacatatttgacatggaaaaatgcatttattgtggaggtactttagtgaatctatcccctccagcattcaactctgtaagagcagattccttccctgatctcacctattcctgattcttatgcaacagcaggaactcaacaaacacttgttaactaaatcaaaaccattctgcaaaacacatccagtaagcatctcactactgaagtatctgacaaactacctttatgggccgtctgcagcctagcacaagtggcaggctggcaatttttttttctccaaaataataacaaaaagcttctacctcttccattattgtaagctgactcacctcccaatggaacactatacagactcccctgtcctatattgtggaccaattcagtattagaaaaaaaccacttccaattttctttagagtgtttttaagaacttggtcacataggacctacaggtccaacattcatttttcataatccaaggtagtagtaccctttttcatataggatcaatggcctctcccacaccacccgccatatggtaacaaactgtcttgccttcgttttcatggtgcactgggttagtccttacatgctgcgatctacagtattgattttaccatccaactttgtgggcctggcgactgaaaatgttaatatacttccttatttgtcctacattcccaataaataatttagacgtaagaaacaggctcttttgcttattatgtaaccacaacctcaatattttaaatacactgcatggcatcactaattctacgtctgtactacgcttccccttccgtgataaccaaacccccacaaaccactccaaatactaaaaataaaataaaataaagtatggggttcctagggaactgactttgccaggacatacttttcgttggggcggaatgcaccgaaaatcattggtaggaaaaataattttttttttgaggaaaaatttggaaacctttttcccaaagggcccgcaagatcctaaaaaaagcaagagaccgcgcagaaaccgaggatccccctcacaggcgacacccagcgcgacctccgctagggtcctgacaaagaatgtccacttcccgcggccgcacctctggggccagaccactggtctccagagaggcgcggggacctccaccagggatcggagtggtactcagacctgcacacccgcgagtcctcgaacagctccacacgtctccagctccgcccgagcccgagccacgcgccgggccgtgatcgcgcacggaccagacggagcgctttccgggagacaccagagggaggagccaggcagttactagcgtcgttgctaaggcaggggccgcgcacaccgcacaccgcgcggcttaagcaacaggctgggacgacagcggggggggggttagacgggaagttccgcctcagcctctcaatcagcggcggtgtcgcacttctcccgagaggctccggcgaggggcagggccgcgttcgtccgggacccgcctcaagcctcgcagcctttcacccagtttcctcccgattcttgctgggacaacaaaattgggaagcggttctcgaaacatactgtcaaggcgtagttgcagtgagttgtgaagaaatgttgatcccagagaaaagtttgcattttgcccacctcaaagatattttgattgtgagaacttggttacattagtctttcgtggctatatcaatatcattatttcgtgtgctgtgtggtaatgaaagctattagaaaaatcatttgtatcttaatgatttagtttgcataaaaacacgcatatagagttaagagtactttgtgtttttccactttgaagtataatatgtggataagttattagaacatttgtccgtgcctctccccaaacaatgcgcaaacggaagtgcactctaacaactaagattttaaaacacaatggtcaaatgttgagcaatgttttattgactactctgaatttatcaagtggtagataaaggacattacaatgccctagaagtgctcacgatatcaagtaaagcatgttaaattcaagtacagaaaatgcaatattcttactactgagataaaaaatggaatttaataaattacaggaatttcaagaaagctgagaatggagtggtcaataaaggcttctttttcggacttgggtaaggccttgaagaatgatttaggtttaggacagtgtttttcaactggaaaggggattgtgtgggacccattagtggaggtcttgacccatttgtaagcaaggaaatctctttaaacttaaaaaaaagaaacaatatagattggaaatatcagcgcatgtaagtaaatttagtgttagttagtaaagtactgctttatggagcttttaattgtatatatgcgtgtatgtgtgcactagggcttgtttgtaaaatgtatttcttactgtatttcaaaccttaaaaagtttgaaagccagtgatttagggagaaaggtgaattttctgggtagggaaagtagaatagcaaagtctataagccaagaagaattcacaaccattttcctttttagtttaactctaaattttatcaaagtagttaaattgcacagattaaaaagcaaataatactacttgttagattgagcattgggttgctatcgtatgtaataaattactccaaaatatggtggcttaaaacaaccattttattatgttcacaggtggtgttgtcaatagggcatagtcatcagcttttctttggtaactcaattagaaagactagagtgggcatgctagcagagcttctgtaactatatggccggggtttcctcacagtatggcagcaaggtagtcagacttcttagcttaaactcagagctccaaagggagtgttgcaatgaacaaggcaaaaattgcctgaccttttctgaccttgcctcaaaaagtaacgcggtgctacttcccccactttcttttgcttacaaatgtgtcaaagtcctgttccattttaggaaaggagacatagatccctcttctcaaaggattggcaaagatttcttgtccatgttttaaaaccagcatagtgaatttacttctgtaacagaaaaccccaaaatatcggtggtttaatacacttttttttttcctcacaaaagatccattgtggctatttctaggcagacgaaatgttaaattcaaggccagatgtttttatttttaatggttctgctgccttctaggactagcttgtttgacaagaaagaaagtatggcaaattacccaa

SEQ ID NO: 1241991 - DNA, 4001 bp, Homo sapiens
tccatgctagagccaggcagaagcccatgatgaaaataataggggctcagggattagaatgtcccaaaatggagaccctagaaaaagacaggcaaagaatgagccccagctactcagaagaatcaggtgaaagactctgcaggcctctgtgaatcaaggcctggggctgggccaaggtcacagtaggtagcaaagttcaagagactcactctttccgaaaattctttaattgattcggcaaatacttcatgagcaccactacataccagccactgacatagacactggagattaagtgacgaacaaaacaaacagaaatccctggtacataccttcatggactttaccttctaagattagttggaaaaccctgctttggcccagcactctgcagagtgtgttccttaggcagggccctgcttggggatcaggagactaggctgaggtctcagtgctgctcccagtccactgtgggatcttagataaatcacttctccaatctgatccttgttttcctcttccagctatgggagcaaatatgcctgaactgtttacttctaagcatggttgccagaatcaaatgtgagaaggaggtttaattcaaagcaagtgacaggtgttgggcaaatgtgatatagagagggtaggcgggagcttgtctcctctggttggatccagaagggatgcactaccaggtgctcatgtatttagtgcaagcttcctgctctctctctctccacccagagtcaacagggaaacagaggcagcagaggactcaggctgggactcctgagtgcgagtaaggagtacctaaagccggcgaagacctcctgaaggcaacctggagattggggttaggatagaggaagaaaggagctcagggaaagcctcatccccagccaaacatcagggttcctggatgggttgtctagaggagagaacccagggagtgacctcatccctactccatctcctattaaatgaaaaaacctaggccctgccataactggaaagctcagtatcacctgctgcatttcacagagtctgtccaggtgctggcctttaatagtgcatgaagagctgggctctggatggttgaagctgtaaagctggatatacggaagtagccacagcggtccttccctgatcccaagatgtcattcccctcccccgccaccaccatgtcttcaggatcctgggcctcaacgctaatgtaccactcagcccctaagggcatgaaatgggctttcagaccaggctgtgtggggatgacctgaagaggaaggtggacatgcttaataaccactccttgtgggtgggttgcccttaatgatttacacaacgatggggcagtaacttctcaacaaccttgacaggaaggttgcccaggacagggcagtgaagccccaggcagagccagcggcagaaccagagagagaacacaggcctgcctgttcttgccccacatggctgcttttccagcctgaagccctagagtggtgaccctggtggccctgaggtgggaggaagatgggtcaaggccatcttggtcctaagggagggctgagggggaaagcttggatcctaaagcccaaagctccctccctggtatgttgtgctggtgccaggagaagaacccgcaggcccaggcaaactaggccacccaacattcccaggtcccaaagaacccagtctctcaaaaccttgattgggcagaggacaggccctaacaggaccggttttagccttaggataagatcggaggcgcagggggctagcattcccctttcttccataacgtggaggagctgcggctcccccgccaccctgcccttggagctccctcccccggagcgcccaggcccgcgggccgggaaaagccctcccaaatctgacctgcggccacggcgtcaccagagcccgggactgcaacttgtctccggcctggctgccagctgggcccgcggagccctctctcgtccggtgcctctgcagctctgcgccgggacgggcggggctgggggtgaggaggggaaggcacggcccggctcggctcagccacggggcggggcgcagtggggcgggatggagtctggcgcctggggaggcgcggaggtgcttccagcggacggcagcgcgcgaggtgagacggcgagggctcccggggcgcaggtagagatgttccgtcggtgccgaaggcccggctagtgcggttgtgtggacggcgaaaaaagcaagtccgccttcacaagtcccatggggctggggagagggtgggaggcggagagggtatggggaggggagactctcctcagatcctctcgacaccgtcgggtctgggctccaagtccaaggccatcgatcacctgccacccacagaccaggccaggcgtcaaagcaagtcacccatccgacctaaacccctctaagaccccggagtcacgtctccctccggggatcctcgtgaggtcttgggggtcccaccgccctgcgagccgcgcccgcgccccgccagacccggaactgcgtcgctaggtttgcgctggagctgctgggattgctgggcatgggtgggggggcgcagaggaggaggggggattggagggacctctgcggagctggcagaccccggtactactgtcctggcgcacccagcccttctctgtaccaggccgggagagggaggcggcgccgcagagcctcgggtgcagtctgagaagtttgggagtgacttgaagagtgactggaagcaccccagacccggtttgtccggtcacagccgggtccttacgtgagttaggagaggagtgggggtcggacgggagccccactgagagtaagggcgcgcgtttgttcacagaacgtcgggacctggttccctctttaatcacacccccgggggcgcttcgtgtgaggttccacgggggaaggcgagaggcgcaggctgccacacacgcactgtttggaagaggggaaggtagggaatagtggtccgggtgtgggtggtgggggatgcggctgcttagatctgtgcggtccaggtgattttggagggggtcttgaagtgcttgctcccgccctggcacctagggctgcacttcctgctttcatccagaccaagttcggatcaagtgggagttcttcaaagagagagtttggtaagaaactggggaggcaaggaaaacctcttaaggccataaatgccacaaggtttatagacatcgaatcgccatcccagtttaactcgagtctggatactttggcttgcatgattctgcacccttgaattccttatccacatcagcccttactggggaatcctgcctccaatccacttttcagatcttgttcaatttctccacttaactcctatttttgtgcaacaacacacatatacattcatacacagatacacacgtacacacagaccccttccttgaagaggaaagtctagcacaggagttcctgacagggtccccttagctagccacagctgtaaacgtttaatggggtctaccccaatcagagaaaaaagcatcacattgcagtagctgtgcattaccaatcagaggtcttggcaactccagccatgtcacccactccccacttgtggagaattagtggcccttactctatagtttccagcagatgggggaggtgggcaagggggaagacttcaggaaaaaagtcctgtcaggctacaagagaggccacaagacgttagcacataactttgaatgaagaaggctggaggttgttctaggctgaattttcttaaagattgtaactttatgttttacccacctctcatacacacataggaactccacttcaacctgtggtaggtaaggattgggtaattgtgtctataataagattgagcataaggaaagtcttcagtacataagggagcctggaaagggaggatgctgcctcctcctccctaggccaggtgagaaaggaggaccctaaagtgtgggaaactccccccaccccatgag

SEQ ID NO: 1241992 - DNA, 4001 bp, Homo sapiens
aaagctgttgtgagaatcaaaatgatataatttatgtaggggtaccccaagtcagtcctcctccctctgggctagggggaggtaaaatggttacaaacacacggtgaggagagcggtggctggggagctcagttcccaagagctataatgggggtccagtgacacccctaggttggaataaggcgtaagagaaaggttagatacagagcaaatatctctgtatcaacatcccaaaatctctccgagatgaaggcagtctcgaagtgctgcgtagagaggaagtggttgggagtcggatgggtctcctgtggactcgcagacgggatctggcccctcccccaggctgagcagagcgccagatcaaccccactggtctccccctttgccctcaccaaagaagacccccagtacggtgcggttgtggagcgacggcaggccggctatgccccgcgtggctgcgttgctgagccggcgcgggttgggcagctgcggctcctccagagcctgatacacaccgtcggcgtaattggctggtacgcggcgctgcaaccggcagcctgcggaggcagggagcggggctctgtctaagcactccatcccctaggatcccccaaacctctccctaagcctccctcaacccccatcccacttcactgacagaaccttccctcaagggtctcttggccccgggagcgcataagattgcgctgtgtaggcagcggagctgctgggcgcgtgttccccgcagattccccgctcagggcctttcgcgccccggcccttcgcgagccacggccccagcacgcccgggcccccagaacgcaccaacagcaccacgctcgtggtgcctcaggttgttaaaccagccgtcatagcgctgcacttcccagggcagtgagagtgcgtcctgactgcctgtgggcacagagaagggcctcctcagcactacgctcccagctacccctcccgagcaacgaaggccttggccagtccttccccagctcgcggagcgcccctaaccggacccaagtgtcgggccgcactgggaagtttcccatcccgctgagctgcacggcgaaatgaccttccagtctcagggagccgcttgccgcacctctccccgccccacctcccagggatcctggggaacaccccgccgctagaggagcctgatacttgcccgatggacccagggatccagtcagaagagctcccaggagcatcagtgcctctggtcttgcacggagcatgccaaccctgcagcctgcggggtgagggtgggggtggtaggtggtatgcgaaagccactgttagggcgtcctctatgcctcccctcttgttcctacagctagtactggaggaggagcaccagctgtttccacttctggaaggtagctgttagaagcatcaccgaggaccttcatccaaacgccactctttccaggacaattggcagctctggaggcattgacactgttccccatccgccaccccatcagagagttaacccccgaccataggaacccactgggcaggagtcttctggggcatgtcagtccagggcaggactggtcaagcctcccagggtgtgcccaatgtctccaatgtttcacctccacccgcccccgatccgtcaggctccgcttctcctccaggaggcagggaagggaaaaaggttactgacctgggagtgagggactgcagcacccttccacaatgaatccccccttccccaataaactccccttctgcaatgaacgcctgtgcatgatgggcgagggctagggtcagatcccaaactctggtctaacctgtggtttagggtggtgttgggttcagatgtcttctttcctcttaaaatctttgcttctgtgctctacttcttgccttcaccctcactcttccagctccgccgatcctcagcctccccggctgcactctcacctttctctctgggtccttggtctcgccactgtgcaggtgtcggctcaggacagacctgcgccagtgtgagcatctggacctagggctcaccctcctgccgtggaggtggggcccttatttgcacaacctcttccagctcagaccagcccctgggctgggacacccgtgtggcacgtcgcccacgctgctataaaaggggtcccgcgcgacttccaaactcagcgccaacccgcagaaccaggaaagtaacggctacagacagtgagaaatagtttcgctcgccggctagaaaaactctgtcggtaccaaccccagagcgttgagagcagcccacctccacgcttccttaacggagaggtgcaggactcagacttcaccagcccactcggtcccagccttgtacgcaaagagacgccaaggacgcgctctcccgcgtccaggcagccccagcttgctggcttgcctgcccgcctgcgtgcagcactcggccggcgtgcagcatgaccctgtggaacggcgtactgcctttttacccccagccccggcatgccgcaggcttcagcgttccactgctcatcgttattctagtgtttttggctctagcagcaagcttcctgctcatcttgccggggatccgtggccactcggtaagggtgtcctcatagtgcaggtagagtgggggaaggctcatgggcagattgtctcctgagggacccaggacaggtaagactgtacaagagcctccatgaatagtcgaattgaggctcaggtggagtgaagtcaggagtctggtgcagcaagcacccctttccaaggatagggagagctccccatccaggatatcctggagaaggaccccagctgggtccttgggaaggctgctgcagagaatgggcacccagtccagtaatcctgaggaacagtctaggcttcttgtgctggagggcctcccacctctcccaggactaaagctgcactctcatcccatccggtgggtgatgaccttcaggccaaaaggacagatgccagcagctcagactgcagtgttcccctttgcactgggttgagacacatgtgtatgggtgcctcatcctcaggactgagactcccacattggattagaagttggagccaactgggtgcattgtcttagactttccccctctcccagaacctaggttgtgcatttttcagttctgggaggacccagcttttctgcatcttaatctgtgttgctttccctggaactggtgcacctaggagtatctgcattcccacctcctcccctcggagatcaggctggggcctccctcttctgagggaggtgacccctgcgtgcctagcacttctggactcactgagcctcaccaagcagtgactggaccaggaggcagaaccaggaccaggcgccagacagctaggggagtgaaggtggtggaagagtgccaggaagtgggggtggaggggaggtgctgttagggtagatgggaaatggggctagggaggtgaaagtgcgtggtcacaaaatatcagaaatgccagtagcccagagggacttgcaggaaaagcgtgcctaacattagtctcaaaagtctggatataactaaagatccaggtgaagtggggtcaagggtggtcttggggactctggtttggcagggctcaggcctgacccgggtgcctattcctgcagcgctggttttggttggtgagagttcttctcagtctgttcataggcgcagaaattgtgggtgagtgtgtggtgcagcccatggggagaggacggggtgaggaaggaggtgggcagagggcacctgggacaatagggaactggggttggttttctgctccctcttcccactctccagctccttctagggcccactttttggcccttaccatgcaaccacattggacctctaagtccccatctctctgcagtgtcccacctcccataccactctctaattccattttcccaccctcatcccacccccaccgtgtgcctttccctacagctgtgcacttcagtgcagaatggttcgtgggtacagtga

SEQ ID NO: 1241993 - DNA, 4001 bp, Homo sapiens
gacacaagatacagtcaaatatgcacctacaaatttagataaacagagacacagacgcaagaaccacccagactgtcattctcagtaatatagacttcatcccaggcccctgtgacaaaattgggatgctttctcatggggtggggggagtttcccacactttagggtcctcctttctcacctggcctagggaggaggaggcagcatcctccctttccaggctcccttatgtactgaagactttccttatgctcaatcttattatagacacaattacccaatccttacctaccacaggttgaagtggagttcctatgtgtgtatgagaggtgggtaaaacataaagttacaatctttaagaaaattcagcctagaacaacctccagccttcttcattcaaagttatgtgctaacgtcttgtggcctctcttgtagcctgacaggacttttttcctgaagtcttcccccttgcccacctcccccatctgctggaaactatagagtaagggccactaattctccacaagtggggagtgggtgacatggctggagttgccaagacctctgattggtaatgcacagctactgcaatgtgatgcttttttctctgattggggtagaccccattaaacgtttacagctgtggctagctaaggggaccctgtcaggaactcctgtgctagactttcctcttcaaggaaggggtctgtgtgtacgtgtgtatctgtgtatgaatgtatatgtgtgttgttgcacaaaaataggagttaagtggagaaattgaacaagatctgaaaagtggattggaggcaggattccccagtaagggctgatgtggataaggaattcaagggtgcagaatcatgcaagccaaagtatccagactcgagttaaactgggatggcgattcgatgtctataaaccttgtggcatttatggccttaagaggttttccttgcctccccagtttcttaccaaactctctctttgaagaactcccacttgatccgaacttggtctggatgaaagcaggaagtgcagccctaggtgccagggcgggagcaagcacttcaagaccccctccaaaatcacctggaccgcacagatctaagcagccgcatcccccaccacccacacccggaccactattccctaccttcccctcttccaaacagtgcgtgtgtggcagcctgcgcctctcgccttcccccgtggaacctcacacgaagcgcccccgggggtgtgattaaagagggaaccaggtcccgacgttctgtgaacaaacgcgcgcccttactctcagtggggctcccgtccgacccccactcctctcctaactcacgtaaggacccggctgtgaccggacaaaccgggtctggggtgcttccagtcactcttcaagtcactcccaaacttctcagactgcacccgaggctctgcggcgccgcctccctctcccggcctggtacagagaagggctgggtgcgccaggacagtagtaccggggtctgccagctccgcagaggtccctccaatcccccctcctcctctgcgcccccccacccatgcccagcaatcccagcagctccagcgcaaacctagcgacgcagttccgggtctggcggggcgcgggcgcggctcgcagggcggtgggacccccaagacctcacgaggatccccggagggagacgtgactccggggtcttagaggggtttaggtcggatgggtgacttgctttgacgcctggcctggtctgtgggtggcaggtgatcgatggccttggacttggagcccagacccgacggtgtcgagaggatctgaggagagtctcccctccccataccctctccgcctcccaccctctccccagccccatgggacttgtgaaggcggacttgcttttttcgccgtccacacaaccgcactagccgggccttcggcaccgacggaacatctctacctgcgccccgggagccctcgccgtctcacctcgcgcgctgccgtccgctggaagcacctccgcgcctccccaggcgccagactccatcccgccccactgcgccccgccccgtggctgagccgagccgggccgtgccttcccctcctcacccccagccccgcccgtcccggcgcagagctgcagaggcaccggacgagagagggctccgcgggcccagctggcagccaggccggagacaagttgcagtcccgggctctggtgacgccgtggccgcaggtcagatttgggagggcttttcccggcccgcgggcctgggcgctccgggggagggagctccaagggcagggtggcgggggagccgcagctcctccacgttatggaagaaaggggaatgctagccccctgcgcctccgatcttatcctaaggctaaaaccggtcctgttagggcctgtcctctgcccaatcaaggttttgagagactgggttctttgggacctgggaatgttgggtggcctagtttgcctgggcctgcgggttcttctcctggcaccagcacaacataccagggagggagctttgggctttaggatccaagctttccccctcagccctcccttaggaccaagatggccttgacccatcttcctcccacctcagggccaccagggtcaccactctagggcttcaggctggaaaagcagccatgtggggcaagaacaggcaggcctgtgttctctctctggttctgccgctggctctgcctggggcttcactgccctgtcctgggcaaccttcctgtcaaggttgttgagaagttactgccccatcgttgtgtaaatcattaagggcaacccacccacaaggagtggttattaagcatgtccaccttcctcttcaggtcatccccacacagcctggtctgaaagcccatttcatgcccttaggggctgagtggtacattagcgttgaggcccaggatcctgaagacatggtggtggcgggggaggggaatgacatcttgggatcagggaaggaccgctgtggctacttccgtatatccagctttacagcttcaaccatccagagcccagctcttcatgcactattaaaggccagcacctggacagactctgtgaaatgcagcaggtgatactgagctttccagttatggcagggcctaggttttttcatttaataggagatggagtagggatgaggtcactccctgggttctctcctctagacaacccatccaggaaccctgatgtttggctggggatgaggctttccctgagctcctttcttcctctatcctaaccccaatctccaggttgccttcaggaggtcttcgccggctttaggtactccttactcgcactcaggagtcccagcctgagtcctctgctgcctctgtttccctgttgactctgggtggagagagagagagcaggaagcttgcactaaatacatgagcacctggtagtgcatcccttctggatccaaccagaggagacaagctcccgcctaccctctctatatcacatttgcccaacacctgtcacttgctttgaattaaacctccttctcacatttgattctggcaaccatgcttagaagtaaacagttcaggcatatttgctcccatagctggaagaggaaaacaaggatcagattggagaagtgatttatctaagatcccacagtggactgggagcagcactgagacctcagcctagtctcctgatccccaagcagggccctgcctaaggaacacactctgcagagtgctgggccaaagcagggttttccaactaatcttagaaggtaaagtccatgaaggtatgtaccagggatttctgtttgttttgttcgtcacttaatctccagtgtctatgtcagtggctggtatgtagtggtgctcatgaagtatttgccgaatcaattaaagaattttcggaaagagtgagtctcttgaactttgctacctactgtgaccttggcccagccccaggccttgattcacagaggcctgcagagtc

SEQ ID NO: 1241994 - DNA, 4001 bp, Homo sapiens
ggcagagccttcccccccaccacaggtaagagccctccctcacctgtgagtgtgatgttgactccacccagcccgacctgcagcccaatatcagcgctgatccactcagaactgaaggccttgtatgatgtgttggtgctgacctggcccacagaccactcagaactgaaattcacagctgtggttggggagttggacatatgggaactcagagatgactgggcattactaggttagagtcagaaggagaaatacaaggggtccatgtctgttttggtcataactggatacccgttaactagccagggtctggctcatggtaagtctgccaaccacatgtgtgggatttcccttggccatattctgtttacctcttccctccctttctccctgctttagggagagtcactcagggagctgggaaggaaacatgaaccaaaaccatgccaggcaaggcaaacgcagatagcttcaacaaaaactttctttgagacggagtcttgctctgtctcccaggctggagtgcagtggcaccatcttggttcactgcaacctccgcctcccgggttcaagcaattctcctgcctcggcctcccgagtagctgggattacaggtgtctgccatcatgcccagctaattttttgtatttttagtagagatggggtttcccccatgttggtcaggctgatctcgaactcctgatctcaggtgatctacccacctcagcctcccaaagtgctgggattccaggcatgagccactgtgcccggcctcacggagactttcatctctcctatttgcctcatcaccaaactaaagcaaacagctgtttcccatttcctcccttcctttctggggccctctccccacagacattcattttgacctcctttcccccgaataaaagtgttaggaaggttgaggagatgcatccagcttgttttccagggtgacacctctccaggcaagggtaagagtggggagataaggccatggtgagagaagcatatgggcagggtctggaagccaccctgaagcaagggcccaccgctgtggggaaacaaggagaggagatgcaggctgctgagggagttgaagggatggaggcagcagcccaagtcagctgcacttcgcactcacccaggattgcagccccgatgaataagctggtcaccacccgaagcagccagaacagcctctgagtcacaaggtaggtgggttaagtaaagagtgccttccttccacatctacccttcctgtttccagacttgggggaggggcgggaattctaaagctgagatcacttggtcaattgaaatcagagtgtctggcacataataagtgcttatgtatttatgtatgcatttatttatttattagagacaggatctcactctcttgcccaggctggagggcagtgatgcgatcttatatcactgcagccactcaagtgatcctcccacctcagcctcccaagtagctgcaactacagatgcacaccatgatgcccagctattttttttttttaagagatgaggtctatactataaacccaggctggcctcgaactcctgggctcaagcaatcctcccacttcagcctcccaaagttctgggattgcaggcatgagccaccatgccccaccagcgctcaatagtgaactgctgaatcaatgaatggggagctttctgcctggggtcgtggctatcttttctccgcactggggtctccttccttagcctggttgtagtcagagactctgaacccctcagcctgaggctgaggtctctctgggctggggtctccaggactgggtttctcaccgtctttccccgaatgccaggcaggatgacgatgaacgtggccagtgcagtcagaaagatcatgatgatgctggccaaagtggtgtccatcgggaaggttggcttggggccagcatagaaggggaatgtgtgtcccaaagtagccatcttggtgaggtggtgcagggggggcaatgctgtacaacaacaatagacatttattgcatgccctcaatgtacctggcactgtttttagtgctggagatacagcacagaatgagccagactaggttcctcttctctggagctcacattttgtgcatcatcagactctgctattaccaccgttccactgcccctcagccatccatctccccatcttttaggtgacagaatgagggtctttgccatcagtctctgttgccccattctcctctcttaacctccaggttccataagtcagtgctaccaccaccctgggggcttctctgtttcttctgggactgtctcaagaaataaaattctcttctctctccttcaggcccctagcacagatagatcacagaacataaaaggagctatattatcaggtgaaggcataaggtgaaagatggtacagattacaaaaagattggctttcttcctcagtccccaaaggaacaaaggccaggcagctctctgctaagtatataatccagccacatcatcagaggactgaattccagacctagcactgcccacacaggtctgtccagctttctcaagcaccctggctcttgttctggtaactgcagaacagttgagcttcactgagttcacctaaataagcactgaaggggcacctgccctctatcaggcagtgctggggccagatgtccttctattccacacattaccaacaatggcccttctctttgattcaaattcccaggccaagtttcagctcaaacgctagctgtggtcttctctgcccatcccctgatctgagaacttgtttgactcttatttgttcttttgcagacaggatattgggaaaatggtacctgaacttaatgtgtttagttaaatctcagacagaatggattgcatgacacactactattttagcacaaataaaggggaaaaaaagtcttgccaattaaaccatggccaccattgctggtgagatgtacctaatttcagagatgtcagaatgtgaaaaaaaaaaaatgcatcttagagtcaatgatcccagttttcctcatttcatgcagtgtgatctgtactggggtttcagtttgcccagaaggctccataatttagtctgaccacacattgtcttattaagcgttataatgaaagaataagcttgggagtcaagtagccccagagggtttgaattctgcctctgcctcttgcaagttacttgacctttacagacatccagttttattaaaaatttgagatagtaatgtctatcttgtaagcatcattgtgagcatgaaatgagattgtgtatataaagtgctgagaatagtactggaaacaaataagctatcaagttgggaaagagggggcattttgttactccatttatctctttcttcaatctctttttttattttaagtaaataaaaaatggagtacatttaaattttttattaagttcttatgttccattattttgtttgtttgtttgtttgagacagagtcttgctctgtcacccaggctggagtgcagtggcaccatcttggttcactgcaacctccgcctcccagaatcaagcaattctcatgcctcagccacctgagtagctgggattacaagtgcgggtcatcacacccagctaatttttaagttttttttagcagagacgggatttcaccatgttggccaggctggtcttgagctcctgatctcaagcaatccaccatccttggcctcccaaagtgctgggattacaggcataaaccaccgtgcccggcctctccaatcttttttgaagagaaccctgagctggaatccattctgggactagtttctgttctttactaatattgtcatattggacaggtaagcgacaacctcttgagtccttggtttcttcatctgtaaatggatttcataatccccaggtcccttttagttctaatgctgggatcctcctaatatgccctagctcccagccttcctctctccttctaagctggccaccttc

SEQ ID NO: 1241995 - DNA, 4001 bp, Homo sapiens
caaatatgcacctacaaatttagataaacagagacacagacgcaagaaccacccagactgtcattctcagtaatatagacttcatcccaggcccctgtgacaaaattgggatgctttctcatggggtggggggagtttcccacactttagggtcctcctttctcacctggcctagggaggaggaggcagcatcctccctttccaggctcccttatgtactgaagactttccttatgctcaatcttattatagacacaattacccaatccttacctaccacaggttgaagtggagttcctatgtgtgtatgagaggtgggtaaaacataaagttacaatctttaagaaaattcagcctagaacaacctccagccttcttcattcaaagttatgtgctaacgtcttgtggcctctcttgtagcctgacaggacttttttcctgaagtcttcccccttgcccacctcccccatctgctggaaactatagagtaagggccactaattctccacaagtggggagtgggtgacatggctggagttgccaagacctctgattggtaatgcacagctactgcaatgtgatgcttttttctctgattggggtagaccccattaaacgtttacagctgtggctagctaaggggaccctgtcaggaactcctgtgctagactttcctcttcaaggaaggggtctgtgtgtacgtgtgtatctgtgtatgaatgtatatgtgtgttgttgcacaaaaataggagttaagtggagaaattgaacaagatctgaaaagtggattggaggcaggattccccagtaagggctgatgtggataaggaattcaagggtgcagaatcatgcaagccaaagtatccagactcgagttaaactgggatggcgattcgatgtctataaaccttgtggcatttatggccttaagaggttttccttgcctccccagtttcttaccaaactctctctttgaagaactcccacttgatccgaacttggtctggatgaaagcaggaagtgcagccctaggtgccagggcgggagcaagcacttcaagaccccctccaaaatcacctggaccgcacagatctaagcagccgcatcccccaccacccacacccggaccactattccctaccttcccctcttccaaacagtgcgtgtgtggcagcctgcgcctctcgccttcccccgtggaacctcacacgaagcgcccccgggggtgtgattaaagagggaaccaggtcccgacgttctgtgaacaaacgcgcgcccttactctcagtggggctcccgtccgacccccactcctctcctaactcacgtaaggacccggctgtgaccggacaaaccgggtctggggtgcttccagtcactcttcaagtcactcccaaacttctcagactgcacccgaggctctgcggcgccgcctccctctcccggcctggtacagagaagggctgggtgcgccaggacagtagtaccggggtctgccagctccgcagaggtccctccaatcccccctcctcctctgcgcccccccacccatgcccagcaatcccagcagctccagcgcaaacctagcgacgcagttccgggtctggcggggcgcgggcgcggctcgcagggcggtgggacccccaagacctcacgaggatccccggagggagacgtgactccggggtcttagaggggtttaggtcggatgggtgacttgctttgacgcctggcctggtctgtgggtggcaggtgatcgatggccttggacttggagcccagacccgacggtgtcgagaggatctgaggagagtctcccctccccataccctctccgcctcccaccctctccccagccccatgggacttgtgaaggcggacttgcttttttcgccgtccacacaaccgcactagccgggccttcggcaccgacggaacatctctacctgcgccccgggagccctcgccgtctcacctcgcgcgctgccgtccgctggaagcacctccgcgcctccccaggcgccagactccatcccgccccactgcgccccgccccgtggctgagccgagccgggccgtgccttcccctcctcacccccagccccgcccgtcccggcgcagagctgcagaggcaccggacgagagagggctccgcgggcccagctggcagccaggccggagacaagttgcagtcccgggctctggtgacgccgtggccgcaggtcagatttgggagggcttttcccggcccgcgggcctgggcgctccgggggagggagctccaagggcagggtggcgggggagccgcagctcctccacgttatggaagaaaggggaatgctagccccctgcgcctccgatcttatcctaaggctaaaaccggtcctgttagggcctgtcctctgcccaatcaaggttttgagagactgggttctttgggacctgggaatgttgggtggcctagtttgcctgggcctgcgggttcttctcctggcaccagcacaacataccagggagggagctttgggctttaggatccaagctttccccctcagccctcccttaggaccaagatggccttgacccatcttcctcccacctcagggccaccagggtcaccactctagggcttcaggctggaaaagcagccatgtggggcaagaacaggcaggcctgtgttctctctctggttctgccgctggctctgcctggggcttcactgccctgtcctgggcaaccttcctgtcaaggttgttgagaagttactgccccatcgttgtgtaaatcattaagggcaacccacccacaaggagtggttattaagcatgtccaccttcctcttcaggtcatccccacacagcctggtctgaaagcccatttcatgcccttaggggctgagtggtacattagcgttgaggcccaggatcctgaagacatggtggtggcgggggaggggaatgacatcttgggatcagggaaggaccgctgtggctacttccgtatatccagctttacagcttcaaccatccagagcccagctcttcatgcactattaaaggccagcacctggacagactctgtgaaatgcagcaggtgatactgagctttccagttatggcagggcctaggttttttcatttaataggagatggagtagggatgaggtcactccctgggttctctcctctagacaacccatccaggaaccctgatgtttggctggggatgaggctttccctgagctcctttcttcctctatcctaaccccaatctccaggttgccttcaggaggtcttcgccggctttaggtactccttactcgcactcaggagtcccagcctgagtcctctgctgcctctgtttccctgttgactctgggtggagagagagagagcaggaagcttgcactaaatacatgagcacctggtagtgcatcccttctggatccaaccagaggagacaagctcccgcctaccctctctatatcacatttgcccaacacctgtcacttgctttgaattaaacctccttctcacatttgattctggcaaccatgcttagaagtaaacagttcaggcatatttgctcccatagctggaagaggaaaacaaggatcagattggagaagtgatttatctaagatcccacagtggactgggagcagcactgagacctcagcctagtctcctgatccccaagcagggccctgcctaaggaacacactctgcagagtgctgggccaaagcagggttttccaactaatcttagaaggtaaagtccatgaaggtatgtaccagggatttctgtttgttttgttcgtcacttaatctccagtgtctatgtcagtggctggtatgtagtggtgctcatgaagtatttgccgaatcaattaaagaattttcggaaagagtgagtctcttgaactttgctacctactgtgaccttggcccagccccaggccttgattcacagaggcctgcagagtctttcacctgattctt

SEQ ID NO: 1241996 - DNA, 4001 bp, Homo sapiens
aaatatgcacctacaaatttagataaacagagacacagacgcaagaaccacccagactgtcattctcagtaatatagacttcatcccaggcccctgtgacaaaattgggatgctttctcatggggtggggggagtttcccacactttagggtcctcctttctcacctggcctagggaggaggaggcagcatcctccctttccaggctcccttatgtactgaagactttccttatgctcaatcttattatagacacaattacccaatccttacctaccacaggttgaagtggagttcctatgtgtgtatgagaggtgggtaaaacataaagttacaatctttaagaaaattcagcctagaacaacctccagccttcttcattcaaagttatgtgctaacgtcttgtggcctctcttgtagcctgacaggacttttttcctgaagtcttcccccttgcccacctcccccatctgctggaaactatagagtaagggccactaattctccacaagtggggagtgggtgacatggctggagttgccaagacctctgattggtaatgcacagctactgcaatgtgatgcttttttctctgattggggtagaccccattaaacgtttacagctgtggctagctaaggggaccctgtcaggaactcctgtgctagactttcctcttcaaggaaggggtctgtgtgtacgtgtgtatctgtgtatgaatgtatatgtgtgttgttgcacaaaaataggagttaagtggagaaattgaacaagatctgaaaagtggattggaggcaggattccccagtaagggctgatgtggataaggaattcaagggtgcagaatcatgcaagccaaagtatccagactcgagttaaactgggatggcgattcgatgtctataaaccttgtggcatttatggccttaagaggttttccttgcctccccagtttcttaccaaactctctctttgaagaactcccacttgatccgaacttggtctggatgaaagcaggaagtgcagccctaggtgccagggcgggagcaagcacttcaagaccccctccaaaatcacctggaccgcacagatctaagcagccgcatcccccaccacccacacccggaccactattccctaccttcccctcttccaaacagtgcgtgtgtggcagcctgcgcctctcgccttcccccgtggaacctcacacgaagcgcccccgggggtgtgattaaagagggaaccaggtcccgacgttctgtgaacaaacgcgcgcccttactctcagtggggctcccgtccgacccccactcctctcctaactcacgtaaggacccggctgtgaccggacaaaccgggtctggggtgcttccagtcactcttcaagtcactcccaaacttctcagactgcacccgaggctctgcggcgccgcctccctctcccggcctggtacagagaagggctgggtgcgccaggacagtagtaccggggtctgccagctccgcagaggtccctccaatcccccctcctcctctgcgcccccccacccatgcccagcaatcccagcagctccagcgcaaacctagcgacgcagttccgggtctggcggggcgcgggcgcggctcgcagggcggtgggacccccaagacctcacgaggatccccggagggagacgtgactccggggtcttagaggggtttaggtcggatgggtgacttgctttgacgcctggcctggtctgtgggtggcaggtgatcgatggccttggacttggagcccagacccgacggtgtcgagaggatctgaggagagtctcccctccccataccctctccgcctcccaccctctccccagccccatgggacttgtgaaggcggacttgcttttttcgccgtccacacaaccgcactagccgggccttcggcaccgacggaacatctctacctgcgccccgggagccctcgccgtctcacctcgcgcgctgccgtccgctggaagcacctccgcgcctccccaggcgccagactccatcccgccccactgcgccccgccccgtggctgagccgagccgggccgtgccttcccctcctcacccccagccccgcccgtcccggcgcagagctgcagaggcaccggacgagagagggctccgcgggcccagctggcagccaggccggagacaagttgcagtcccgggctctggtgacgccgtggccgcaggtcagatttgggagggcttttcccggcccgcgggcctgggcgctccgggggagggagctccaagggcagggtggcgggggagccgcagctcctccacgttatggaagaaaggggaatgctagccccctgcgcctccgatcttatcctaaggctaaaaccggtcctgttagggcctgtcctctgcccaatcaaggttttgagagactgggttctttgggacctgggaatgttgggtggcctagtttgcctgggcctgcgggttcttctcctggcaccagcacaacataccagggagggagctttgggctttaggatccaagctttccccctcagccctcccttaggaccaagatggccttgacccatcttcctcccacctcagggccaccagggtcaccactctagggcttcaggctggaaaagcagccatgtggggcaagaacaggcaggcctgtgttctctctctggttctgccgctggctctgcctggggcttcactgccctgtcctgggcaaccttcctgtcaaggttgttgagaagttactgccccatcgttgtgtaaatcattaagggcaacccacccacaaggagtggttattaagcatgtccaccttcctcttcaggtcatccccacacagcctggtctgaaagcccatttcatgcccttaggggctgagtggtacattagcgttgaggcccaggatcctgaagacatggtggtggcgggggaggggaatgacatcttgggatcagggaaggaccgctgtggctacttccgtatatccagctttacagcttcaaccatccagagcccagctcttcatgcactattaaaggccagcacctggacagactctgtgaaatgcagcaggtgatactgagctttccagttatggcagggcctaggttttttcatttaataggagatggagtagggatgaggtcactccctgggttctctcctctagacaacccatccaggaaccctgatgtttggctggggatgaggctttccctgagctcctttcttcctctatcctaaccccaatctccaggttgccttcaggaggtcttcgccggctttaggtactccttactcgcactcaggagtcccagcctgagtcctctgctgcctctgtttccctgttgactctgggtggagagagagagagcaggaagcttgcactaaatacatgagcacctggtagtgcatcccttctggatccaaccagaggagacaagctcccgcctaccctctctatatcacatttgcccaacacctgtcacttgctttgaattaaacctccttctcacatttgattctggcaaccatgcttagaagtaaacagttcaggcatatttgctcccatagctggaagaggaaaacaaggatcagattggagaagtgatttatctaagatcccacagtggactgggagcagcactgagacctcagcctagtctcctgatccccaagcagggccctgcctaaggaacacactctgcagagtgctgggccaaagcagggttttccaactaatcttagaaggtaaagtccatgaaggtatgtaccagggatttctgtttgttttgttcgtcacttaatctccagtgtctatgtcagtggctggtatgtagtggtgctcatgaagtatttgccgaatcaattaaagaattttcggaaagagtgagtctcttgaactttgctacctactgtgaccttggcccagccccaggccttgattcacagaggcctgcagagtctttcacctgattcttc

SEQ ID NO: 1241997 - DNA, 4001 bp, Homo sapiens
ccctgacacactcacctaaccggggatctcccagctccaggagttcatttagccccagccccctcacctgtgagtgtaatattaatgccctccaggcccacgagcagacggacacgggctgtaacgcgcgctgcgctgaaggctttgtaggatgtgttggtgttcactgtacccacgaaccattctgcactgaagtgcacagctgtagggaaaggcacacggtgggggtgggatgagggtgggaaaatggaattagagagtggtatgggaggtgggacactgcagagagatggggacttagaggtccaatgtggttgcatggtaagggccaaaaagtgggccctagaaggagctggagagtgggaagagggagcagaaaaccaaccccagttccctattgtcccaggtgccctctgcccacctccttcctcaccccgtcctctccccatgggctgcaccacacactcacccacaatttctgcgcctatgaacagactgagaagaactctcaccaaccaaaaccagcgctgcaggaataggcacccgggtcaggcctgagccctgccaaaccagagtccccaagaccacccttgaccccacttcacctggatctttagttatatccagacttttgagactaatgttaggcacgcttttcctgcaagtccctctgggctactggcatttctgatattttgtgaccacgcactttcacctccctagccccatttcccatctaccctaacagcacctcccctccacccccacttcctggcactcttccaccaccttcactcccctagctgtctggcgcctggtcctggttctgcctcctggtccagtcactgcttggtgaggctcagtgagtccagaagtgctaggcacgcaggggtcacctccctcagaagagggaggccccagcctgatctccgaggggaggaggtgggaatgcagatactcctaggtgcaccagttccagggaaagcaacacagattaagatgcagaaaagctgggtcctcccagaactgaaaaatgcacaacctaggttctgggagagggggaaagtctaagacaatgcacccagttggctccaacttctaatccaatgtgggagtctcagtcctgaggatgaggcacccatacacatgtgtctcaacccagtgcaaaggggaacactgcagtctgagctgctggcatctgtccttttggcctgaaggtcatcacccaccggatgggatgagagtgcagctttagtcctgggagaggtgggaggccctccagcacaagaagcctagactgttcctcaggattactggactgggtgcccattctctgcagcagccttcccaaggacccagctggggtccttctccaggatatcctggatggggagctctccctatccttggaaaggggtgcttgctgcaccagactcctgacttcactccacctgagcctcaattcgactattcatggaggctcttgtacagtcttacctgtcctgggtccctcaggagacaatctgcccatgagccttcccccactctacctgcactatgaggacacccttaccgagtggccacggatccccggcaagatgagcaggaagcttgctgctagagccaaaaacactagaataacgatgagcagtggaacgctgaagcctgcggcatgccggggctgggggtaaaaaggcagtacgccgttccacagggtcatgctgcacgccggccgagtgctgcacgcaggcgggcaggcaagccagcaagctggggctgcctggacgcgggagagcgcgtccttggcgtctctttgcgtacaaggctgggaccgagtgggctggtgaagtctgagtcctgcacctctccgttaaggaagcgtggaggtgggctgctctcaacgctctggggttggtaccgacagagtttttctagccggcgagcgaaactatttctcactgtctgtagccgttactttcctggttctgcgggttggcgctgagtttggaagtcgcgcgggaccccttttatagcagcgtgggcgacgtgccacacgggtgtcccagcccaggggctggtctgagctggaagaggttgtgcaaataagggccccacctccacggcaggagggtgagccctaggtccagatgctcacactggcgcaggtctgtcctgagccgacacctgcacagtggcgagaccaaggacccagagagaaaggtgagagtgcagccggggaggctgaggatcggcggagctggaagagtgagggtgaaggcaagaagtagagcacagaagcaaagattttaagaggaaagaagacatctgaacccaacaccaccctaaaccacaggttagaccagagtttgggatctgaccctagccctcgcccatcatgcacaggcgttcattgcagaaggggagtttattggggaaggggggattcattgtggaagggtgctgcagtccctcactcccaggtcagtaacctttttcccttccctgcctcctggaggagaagcggagcctgacggatcgggggcgggtggaggtgaaacattggagacattgggcacaccctgggaggcttgaccagtcctgccctggactgacatgccccagaagactcctgcccagtgggttcctatggtcgggggttaactctctgatggggtggcggatggggaacagtgtcaatgcctccagagctgccaattgtcctggaaagagtggcgtttggatgaaggtcctcggtgatgcttctaacagctaccttccagaagtggaaacagctggtgctcctcctccagtactagctgtaggaacaagaggggaggcatagaggacgccctaacagtggctttcgcataccacctaccacccccaccctcaccccgcaggctgcagggttggcatgctccgtgcaagaccagaggcactgatgctcctgggagctcttctgactggatccctgggtccatcgggcaagtatcaggctcctctagcggcggggtgttccccaggatccctgggaggtggggcggggagaggtgcggcaagcggctccctgagactggaaggtcatttcgccgtgcagctcagcgggatgggaaacttcccagtgcggcccgacacttgggtccggttaggggcgctccgcgagctggggaaggactggccaaggccttcgttgctcgggaggggtagctgggagcgtagtgctgaggaggcccttctctgtgcccacaggcagtcaggacgcactctcactgccctgggaagtgcagcgctatgacggctggtttaacaacctgaggcaccacgagcgtggtgctgttggtgcgttctgggggcccgggcgtgctggggccgtggctcgcgaagggccggggcgcgaaaggccctgagcggggaatctgcggggaacacgcgcccagcagctccgctgcctacacagcgcaatcttatgcgctcccggggccaagagacccttgagggaaggttctgtcagtgaagtgggatgggggttgagggaggcttagggagaggtttgggggatcctaggggatggagtgcttagacagagccccgctccctgcctccgcaggctgccggttgcagcgccgcgtaccagccaattacgccgacggtgtgtatcaggctctggaggagccgcagctgcccaacccgcgccggctcagcaacgcagccacgcggggcatagccggcctgccgtcgctccacaaccgcaccgtactgggggtcttctttggtgagggcaaagggggagaccagtggggttgatctggcgctctgctcagcctgggggaggggccagatcccgtctgcgagtccacaggagacccatccgactcccaaccacttcctctctacgcagcacttcgagactgccttcatctcggagagattttgggatgttgatacagagatatttgctctgtatctaacctttctcttacgccttattccaacctaggggt

SEQ ID NO: 1241998 - DNA, 4001 bp, Homo sapiens
aaggactcccctaggactcaagaaagtgctccaaaatatactttggaaaggtctagtcaaactatatcactctacttttattcatcaaaattaagagactgtagtttttccagctacaattgtccatacctactttccttttccttttttttctgttgctatcatcaggcactactttctcttctcctgtgcttagactaatagttctcatgtttgaattatctgagatactttaaaataaatcccaatgcttgggatttagtataaaatctccttccctctcagcattacttttctcctaccttaatggttctaagaactgggcacagtagtcagatgaaaaaaaaaaagcccaaaattcgggataaaaaattatatcatcttcaagcctctggggaaatcaattcagctcttcacaaactcctgcctgtgtaaaaagtaacacttatctagttaaggattgttgtgaggactaaatacaacagcatacggaaagtttttagtacaggtaaaacgtgctgtagagatgaaagtgtggtagattacaggcagctctgcctttcgttttcagatgccttctcaaattccgccctgggccggatgaatgtatagaaaataactttttaaggcagatgcatcttcgttcatccttcttaggtattttcacgctcacatctaggctctcaccttggtttttctattgagcacagcatcaccctcgggccactcgaaagccaccatgggccttcctctctatcttctatttaggaagggcacaataaacgttgcaaagtaacgccttgctagacaccgtatagctattttacttattctgcagtctttgcccaaatctctatttaatttatgccaaagatgaaagctaaaattttaaacacgaaaaaggcagaaatcctatttatagctagtgtgttcctgtgatctctccggtgactgtttctagctgtggcagcggacggccggcccttcccagcctcctcgccggcaggtccccgctcacctgtacaggtcgtagcccgcggcgcgcgcggagccccgggtgggggccgtggcgtgctcggagagccgggcaaagcggagctgcatgccgcccacctccgcaggccgggcccgcttactgggtgaaatggcgggtgtctcttcagagcagggcatggcagagccagaaggcgagcgaggagaccaccgggggaagaggagagcgcacgatgagcgtcgccgcagggagcgcgccaaaaccgaaatttcccgccagccccgccccacccaccgcccctccccgggacgagtccacagttctggctgagaggggaggcgggattcacattttgggtttgaagcccttctcggaaagcaggtttgggatgggaaactactgggtcccagtcaactttccacattcagcgcgtggggccaactttgaaggggagcttctagggcgtcgccctcacacactagaaagccgccccctcgccaggggaccctaatggaccaccccaccccccccgccccccgcgcgcagaaggaccgctcgccaccctacttcccccacagcctcaagccgcgtggattccttccagacggccggagcccctcccccgcctttcctacccggccccggcgccgggcttccccccgccttaggaagctcgcccttccagccagcggccccgactgtactggctccgcggcagccttggctcaggcggccagcgctggacagcggccggggaatcccgtgctgcgcggcgcggccgaggggcgggcctggcccggagagtaccgcggcttcggccctctgccgtgcgcctcgcgcgttttgcatcgctgagcgaagcagagacgtaaggaaatggtagcagagcgcggggcgagggcagaggggagtcatttcccccagagtttgggctggttgggtcctcggcacctccggacgtgcgccaggcttccaccctgaagacgcgcccgtcctgggaacatgacctcggaagcagtcgcagccgccgccggacgaggggcgtggagaggcggtgccccggcagcccagggatggcgcaggccctggggccccaggaagacggcgccgttggcgtcttgagtcttgctgccgcctctggctgcctagccctcttgctttcgctcttcttgtttgctctggcccccatttttccgagagtgtacgccaggcccgggccctgctcctggactgatttacctggggcggcaccgcccgcagccatgactcccgggctctgagtttagcggcgccctaagcgccggaaccgcatctcggcgccggtgacagttattgcgcccggggccgctccccaagctgtgggcaagacaccgcgcccgatttcctttcagcaccgagtgtcagacgttgtagtgtttattcgaccggaggcagggagggcgctactatcctatcacaggtttgggataacccaacagaaacgcagtgggaaccccttggctaggagtcgaacaaggatcccgggtcgtggtagtatagtttacagtgggggataaagcagtaactttctagatagttgttaataattttttctgagctgcaagtatctccttatttctcacaaaaatctgcgagctgaattgaatggttttgaattttcaaaattaaaaaagctgtggggcagttttagagtattattggggaaattttacattcgttgctatgcctttccatacaggcccccccttttcggtctccttaactggttcgtcttcgtagttggaattcctttgcatgaggctatggaatatacactaccttctctggacgttaactattagctacagcttgaggactcccaaatttatgcctttagcaacacgatccgagccctgcaacttttcgacctcattttgagccaacattattttgctcccttattttgttgaagtactttctccagttatttacttaaaatgttcacatgagagacatactatttgattccttgcttgtactaagatgtaatgattgtaacgacttcattttcctagacccagataaaagtctcgcttcattcatgaaactttttacaatcagtagtgacctctgccccatcttatctcttttaacacttactatatcattcattagtcgttagccatatactttcattgtgtaatcttctgatgtatatgcattttatctctcacatgaattagagtcataaacttttatgaattcttcaaagcacttacttcagtgtttacacaaaagttacttgtttggcttattacaatatctaacaccaagcaggttaccttctattttttgttgttaatctgtatacataaagtgtttattgttacttttcagctgagtttattttagactaaaagagaaacggccataatctaactggcaaaaagtaataggattctgagccagtaagcatttaatagaacgttctttatgacaatagaaatataacttgttatgaacatacaccttaaatgcaagatactgcagttaagaactaaacatgtttcaaccataatttacttcatagtttttgtttttttttttgagacagagccttgctggagtgcaatggctcgatctcggctcaccccaacctcctcccaggttcaagcaattctcctcctcagccttccaagtagctggaattacaggcatgcgccaccacgcctggctaattttgtatttttagtagagatggggtttctccatgttggtcaggctggtctcgaactcccgacctcaggtgatccgcccacctcggcctcccaaagtgctgggattacaggcgtgagccaccgcaccctgcccttcatggtgttttctttatcagactatagttatcctatcagtcatgctgattaattcaattacctaagtctagtgccaatttgaaccttctgaaaatgcaagtcagtacttgaaaagcatggttgtttttcctatctttgccattttggggatttct

SEQ ID NO: 1241999 - DNA, 4001 bp, Homo sapiens
tggtgtgaagagatgtcaacattgtaaatgtttgcccctgaacaaaagtttattggaaactgaggtacttatcagcgtgaaagggcagaaaggcaaactttcaaaaggtggatgctttacaaccatagtttgaaaaggaaaaaaatgaagaaagaacaaagaaaaaaggccaaatactactaataatactagctatcattgattaagcctttactgtgtgccaggaacagttctaattggtttacatatattaacccattttattctcacaatgatctgtgtgattagggaaaatatgcagaaggaaaggagaaaaacgggtggacaaaataagagataaagaactgtgttgtatctgtcaggcagggcttggtagtttaccaagcttaggctatgaatttcctggctgagggagacagctgatcaccgtgaacggcccctggagatggaccttgcttaggaacagaattcctctaaagtccacatagcaaatgctgctactcttgatattactgtggccctctcctgggtagaaatttaagagattttacaatgagcagaaccggaagtttactttggagaccttaattaactctggtaaagcagtactaccccttctttcactgaaatccctctttaaacagttaagccctaatttattgctgatccattatttccatgtcaatttcagtatacagaaagtcacctgtgtttattaggagtctacttaaggtatcttaaatcaaggactcccctaggactcaagaaagtgctccaaaatatactttggaaaggtctagtcaaactatatcactctacttttattcatcaaaattaagagactgtagtttttccagctacaattgtccatacctactttccttttccttttttttctgttgctatcatcaggcactactttctcttctcctgtgcttagactaatagttctcatgtttgaattatctgagatactttaaaataaatcccaatgcttgggatttagtataaaatctccttccctctcagcattacttttctcctaccttaatggttctaagaactgggcacagtagtcagatgaaaaaaaaaaagcccaaaattcgggataaaaaattatatcatcttcaagcctctggggaaatcaattcagctcttcacaaactcctgcctgtgtaaaaagtaacacttatctagttaaggattgttgtgaggactaaatacaacagcatacggaaagtttttagtacaggtaaaacgtgctgtagagatgaaagtgtggtagattacaggcagctctgcctttcgttttcagatgccttctcaaattccgccctgggccggatgaatgtatagaaaataactttttaaggcagatgcatcttcgttcatccttcttaggtattttcacgctcacatctaggctctcaccttggtttttctattgagcacagcatcaccctcgggccactcgaaagccaccatgggccttcctctctatcttctatttaggaagggcacaataaacgttgcaaagtaacgccttgctagacaccgtatagctattttacttattctgcagtctttgcccaaatctctatttaatttatgccaaagatgaaagctaaaattttaaacacgaaaaaggcagaaatcctatttatagctagtgtgttcctgtgatctctccggtgactgtttctagctgtggcagcggacggccggcccttcccagcctcctcgccggcaggtccccgctcacctgtacaggtcgtagcccgcggcgcgcgcggagccccgggtgggggccgtggcgtgctcggagagccgggcaaagcggagctgcatgccgcccacctccgcaggccgggcccgcttactgggtgaaatggcgggtgtctcttcagagcagggcatggcagagccagaaggcgagcgaggagaccaccgggggaagaggagagcgcacgatgagcgtcgccgcagggagcgcgccaaaaccgaaatttcccgccagccccgccccacccaccgcccctccccgggacgagtccacagttctggctgagaggggaggcgggattcacattttgggtttgaagcccttctcggaaagcaggtttgggatgggaaactactgggtcccagtcaactttccacattcagcgcgtggggccaactttgaaggggagcttctagggcgtcgccctcacacactagaaagccgccccctcgccaggggaccctaatggaccaccccaccccccccgccccccgcgcgcagaaggaccgctcgccaccctacttcccccacagcctcaagccgcgtggattccttccagacggccggagcccctcccccgcctttcctacccggccccggcgccgggcttccccccgccttaggaagctcgcccttccagccagcggccccgactgtactggctccgcggcagccttggctcaggcggccagcgctggacagcggccggggaatcccgtgctgcgcggcgcggccgaggggcgggcctggcccggagagtaccgcggcttcggccctctgccgtgcgcctcgcgcgttttgcatcgctgagcgaagcagagacgtaaggaaatggtagcagagcgcggggcgagggcagaggggagtcatttcccccagagtttgggctggttgggtcctcggcacctccggacgtgcgccaggcttccaccctgaagacgcgcccgtcctgggaacatgacctcggaagcagtcgcagccgccgccggacgaggggcgtggagaggcggtgccccggcagcccagggatggcgcaggccctggggccccaggaagacggcgccgttggcgtcttgagtcttgctgccgcctctggctgcctagccctcttgctttcgctcttcttgtttgctctggcccccatttttccgagagtgtacgccaggcccgggccctgctcctggactgatttacctggggcggcaccgcccgcagccatgactcccgggctctgagtttagcggcgccctaagcgccggaaccgcatctcggcgccggtgacagttattgcgcccggggccgctccccaagctgtgggcaagacaccgcgcccgatttcctttcagcaccgagtgtcagacgttgtagtgtttattcgaccggaggcagggagggcgctactatcctatcacaggtttgggataacccaacagaaacgcagtgggaaccccttggctaggagtcgaacaaggatcccgggtcgtggtagtatagtttacagtgggggataaagcagtaactttctagatagttgttaataattttttctgagctgcaagtatctccttatttctcacaaaaatctgcgagctgaattgaatggttttgaattttcaaaattaaaaaagctgtggggcagttttagagtattattggggaaattttacattcgttgctatgcctttccatacaggcccccccttttcggtctccttaactggttcgtcttcgtagttggaattcctttgcatgaggctatggaatatacactaccttctctggacgttaactattagctacagcttgaggactcccaaatttatgcctttagcaacacgatccgagccctgcaacttttcgacctcattttgagccaacattattttgctcccttattttgttgaagtactttctccagttatttacttaaaatgttcacatgagagacatactatttgattccttgcttgtactaagatgtaatgattgtaacgacttcattttcctagacccagataaaagtctcgcttcattcatgaaactttttacaatcagtagtgacctctgccccatcttatctcttttaacacttactatatcattcattagtcgttagccatatactttcattgtgtaatcttctgatgtatatgcattttatctctcacatgaattagagtcataaacttttatgaattcttcaaagcacttacttcag

SEQ ID NO: 1242000 - DNA, 4001 bp, Homo sapiens
caaccccacaataaaatgggcaaattggcataatcttattaatgtgaatacctgcttattttataaccagcaattccactcctatgtatctatcttagagatttctagcaagttcctaggtgatgctgatgctttgtgaaccactgtcctacaacagggtttttcagcctccacactattaacattataggctggatcattttgtataatttaggctgctctgtgcattttaagatgtttagcagcatccaccctcttaattctagtaacactcctgagttctaataataaaagtgtctccagacattgccaaatgtcttctgggtttcaggggtgggtgggaatagcaaaatttcccccatctgagaattactgccctagaaaaagtcttggtcctatacactaggaaacatttataggtgttcatagcaacttcatagaaaaaaacctgaaaataagccaaatgtctttcaacaggtatatacacaaaacagaatattatacaacaataaaaatgagtgaatgatagctatacattggatggatgagtgaaaaaagcaagtcaaataatatcctcaagaaataatgctattttatacaacttttacttttttatttttcttttttctttttttgatggagtttcactcttgtcacccaggctggagtgcaatggggcatcttggctcactgcaatctctgcctcccaggttcaagcgattctcctgtctcagcctcctgagtagctgggattacaggcacccaccaccaagcctggctaattttttgtatttttattagaggtggggtttcaccatgttggccaggctggtctcgaacttctgacctcaggtgatccgttcacttccatctcccaaagtgctgggattacaggcatgagctaccatgcctggcctttataaaacttttgaacaacggaaactgaatccactagataaggattcctaggtatgtggtaaaactatacaaacacttctctacttacaatgtggttacctcctgataaacccatcataagttgaaaatatcctatgtcaaaaatacatgtaaaacacctaacctaccaaacaccatagcttaggctaccctaccttaaacatgctcagaacacttacattagcctacagttgggcaaagtcatctaacataataaggtgtaataaagtgtctaatataccctgtaatttattgaatactgtattaaaaatgaaaaacagaatggttgtatgggtactcacagcatggtttctactgaatgcatatagcttttgcatcactgtaaagttaggaaatcaaagagaaaccatcataagtcaggggtcgtctgtaaagataggcactagaaaggagagtggttaactcttatgtgaagttcatacaagtgggagcctttttggtaaccaacagaactgattaccacatagtcacactgtatgaattaaaacgaaggcccgggatgcacattgtgtctcacgcctgtaatctcagcactttgggagtgtcacttgaggccaggagttcaggttacagtggactatgattatgccactgcactctagcctgagtaacagggactcaaaaattaaattaaaacaataaataaaataaataaatacaaataaaattaaatacagaggttctcagaatgtggtcctccccaccaccaccagcaatattaccatcatctggggacctgttagaaatgcaaattcccagtctccttctagatctattgaaccagaagttctggaagtggggcacagcaatctgtgttttatccagcctaccagataattttgatacacaccaaagtttgagaaccactagattaagggatgagttttactggggaaaggggaaacttacaaaaccaagagaaaacacaggtttcccccttctcccatcatcccaaggagcagcatgctggggccagagtagtctgctggatccatggtgtgggtttgcataataggagaggaatcccatcctcttgttgctctcctatttatagggcacacacaaaaagaattttgtcagtaaggaaactactagagcaccaggcagtctgtttacaggcatttatttgtttgtttgtttgtctgagacagactctcactctgtcgcccaggctggagtgcagtggcacgatctcagctcactgcaagctccacctcccgggttcacgccattcttctgcctcagcctccccagtagctgggactacaggcgcccgccaccatgcccggctaattttttgtatttttagtagagacggggtttcactgtgttagccaggatggtcttaatctcctgacctcgtgatgcgcccccctcggcctcccaaagtgctgggattacagacgtgagccactgcgcccggcccgataggtattttttgaaaaagcccattatccagtatctggagaccttgggtcaaacagaaagttgttggaacttgtgttggaagaaactgtccatcccatgaaaagctgagttcaggtgtagcccctccaactgtgagccagaaggtccaggtcccactggctggttgcccaggaaaatccagagaaaacacccaaggtcgtttctgtttgattctggtcattgcattaaagcgtgcaatcagaaagcatgaaggagactgacaggtgtattagtctgttctcacgctgctaataaagacatacccaagactgggttataaaggaaagaggtttaattgactcacaattctgcaaggctggggaggcctcaggaatcttacaatcttggtggaagggaaagcaaacacgtccttcttcacatgaccgcagcaaggagaagtgcagagcaaagtagggggaagccccttataaaatcatcagatctcatgagaactcacccactaccacaagagcagcatggaggtaactgcccccatgattcggttatcacccactgggtccccacgttgggattatgggaactacaattcaagatgagatttgggtggtgacacagccaaaccatatcaccaggttatttttttcctctctctgtaattttcagtgatagatttatacttattccttttattattaatagtttatgtatgtaaatccataaattattttgtttgtaaaaaatattacaagtttaaagtaaaaatttcaaaacaatctctatagtacacaagcatacttatttccttatttcatatcctgaggttcttagagagtgtaagcatacattatggagcaaaaattaagtatgatttactattcgtaacctaaaattaattacctataattttatttacttttgatgtgcaaaattcgaaattttgccattggaaaaggttgctttctatgttttcttaacaccactttggaactttaaaaggcatttaaaaaaatccctcattctagtagcaagatcacttaggtccaccttaaaggtttttcttttctttttttttctctaggaattgaaattctccaagaacttttagttctatttagtggagaatagctttacagaccaaactctaggcactaggtgttaaatgcattagttattttactattttaaatttgggctttcggaaatgataatgtgatttaaaattaaatgagaatatctaggtagaggtcatgtagaatgtgaagtgaccctgcataattttccttttcttttgggtcctaatatcttagatatatatttatagggtatgagcttgattgtttttcctattagacttgttttggcacaataccacttatttcattttttttttttcaaaacggagtctcgctccattgcccagactggagtgcagtggtgtgatcctggctcactgaaacctccacctcctgggttcaagtgattctcctgcctcagcttccctagtaactgggagtacaggcatgcgccaccatgcctggctaatttttttgtatttttagtagagacggggtttcaccatgttggccaggctggtc

SEQ ID NO: 1242001 - DNA, 4001 bp, Homo sapiens
ggtcactacactcctttgagccacaatttggatgtcctgtcctgttgttctggctgaatttaggagaactctagtaagcccttctctggataagaaaagaaaaatgatacatcttccattttgtattaattacagaatctcacaaatggcaaggattttaaacattttctaatgttgtttttcttagacagagtcttgctatgttgcccaggctggccttaagcaatcctcccaccactgcactcggccctagtctaatatttttcttttcttttctttttttgagaagtttagttcttgttgcccaggctggagtgcagtagcatatcttggctcactgcaacctctccctcccaggttcaagcgtttctcctgcctcagcctcccaaatagctgggattataggcacccaccaccacccagctaagttttgtatttttagtacatacggggtttcaccacgttgcccagactggtctccaactcctgacctcaggtgatccacccgcctcagcatcccaaagtgctgggattactggcgtgagccacagtgcccggccttaatatttttcaaactatacgtcatgacctattaggggtcagactcaatttagtgagttgcaaccaatatttttttagagtgcatcttctgtagaaagggtaagtaaacttttcattggtgtgtgtgtgtgtgtacacactgagtgtgcaggggcacaataagtcatgatgtataatatatctaactgtgggtcacaggtaaaaaattttgagacacttttctagccccacagccctatgccaaggaggctctaccaagaaattggtaataaacaaaatgtcatgtttttacatcatacagagaaactagctaagaggattttgtgctcagtacacgtaatctgccattcattaaaaaaaaaaaaaaagattaggatccatctgggtgtccagttgaaatactaaactgcttggagacagccatttctgttttggtggggtgaagacctgtatttgagacagcagactgaaatcggtttggtctgtggcgaaggaagagaagaaaaaccattctgggtcgcgagttcctcacctgtaaccacaggagaagactgttggcttggtcagttgattttcaactaatctcccaattgaagagttaggcgaagcaattgctattgggagattaactgaaaattaactgaccaagccaacaaggactatgcctcccacaaaccaaaacactttaaccactcagcaagtcaagtattgatacatacaatcaatatcacacaaagtgtactgaaaagaaccacagacttgcatcaaaggcagaaatgaatccagggataacttcctgggattcgaagatgtgacctggtaggtataaatttctcaggcatcctctttttctaccctccagttcatctccgtcctcaagctatcagtcatggatgtggcactggcgttcttctctgccaccgtatctcattatgcaaagggaaactgaggcacgaagaacagagtgagtgagccaaagaactgcagcagccaccaacaaggctggactaagggcccaagcagctaatgcctcactccccacacaatccccatactatttagaatcctgcagtcctcagccttccacctcaaaccaaactcctggggccgcccgtagtacgtggtcccctgctcatccgatgaagcccccagctcttgcctgcctgcctgcctctataaaggtctacgaggcctggaactctgaagcctaaagcaaccccggcagccccctcccacgaccgtccacaaaccagtagcctcccttcgctcccacctccgcgccgacgggcctggagctcctccgcacaccacaccaagccgaccactcaacaccagaggacccacagaagaattctctccacgcccacccccacagcatcggccttcaccaccgccgccgctgccggaagcgcccccacgtctccacgccaccaccgtgaggtcacttccggcgcgacaccttggaatccagggccgtcaattgaggggcgtggcacccgggaaatttaagaggttggaagaacgtcccttcggccttacagaattgcgcttgggtagtcattttgccctccacgcttacttatgtcctgtggcgtcttggctggaatcggggctctacccacgactccccagcctcgatgcctgggcccccctcttgcaggctcgatgaaaagcacccgcttcccctcctgttaccccagcgccaatcgcagagctggagcggaggactttcagggaggcctggtgacgtgacagcccctccgtgctaaactgcagctgtgggacttaataagtgcgacaaccccctgatggattaaagaaaacaagatattcctgccgtggtcgatcttcaaagcgtatcagcttcagcccttttgggggttaaaatcagccagtccgtgcttgactgctctcccttcccccatactcagtacacaggaaagtgccgctcttctacccctggcattttagagtcttgatttgtggggagacgggaaagcatgcgtttagggccaagaccgtgtaatgaggaatattgcacagccttgaagcctgacacctggtttgggaaccactacttgggcgaatagcatagagtagggtagcagttccaaacctagctctacaaaatcagttgaagaactttgtaaaatctacactttctaggggactgcttcacccttccccctccatcaccagagattccctaggtcagaaggggtccttgtcttttaaaattactgttattaatgaacacttatagagcagtttttggttcagggcaaaactgaacagaaagtacagagttcccatatatcccctgtacacacaggcacatacacaacttgtcccctcatggacatcttgtgctacagtggtacatttggtaacaattgattacccaactttgacacatcattatcacccagagtccatagtttacattagagtttactctcggtgttgcacattctgtgggttttgacatatatgtaatgacatgtatccaccattatggtatcatacacgatagtttcactgccctgaaaatcctctgtcctctgcctatttatccttctcagtcccctaaccactggcaaccactgctccttttactgtctccatagttttgccttttccagaatcccatatagttggaatcatacagtatgcagccttttcacatcggattctttcacttatgcacttaaagttcttccatgtcttttcatggcttgatagctcatttcttttttgtgctgaataataatattccatcgtctggatgtgctgcggtttatccattcacctactgaaagacatcttggtggcctccaagtttgggtaattatgaataaagccgctatacatcatgtgcagatttttgtgtagacatgagttttcaattcatctgggtaaataccaaggagtgcaactgctggattggatggtatatttagttttgggagaaactaccaaactgcctttcaaagtggctgcatcattttgcattcccacagcagtgaatgagggtttctgttgctccacatccttgtcagcgttttgtggtgtcagtattttgccgttcaagtaagtgtgtagtagtatcttattgttttaatatgcaattccctaatgacatatgatattgaacatcttttcatatacttacttgccatgtgtatatcttctttgatgaagtgttcattcaggtattttgcccatttttacattgtgttattttcttgttgtgatttaagagttctgggtatattgtagataacagtcctctatcagatacgtcttttataatattttctcctagtctgtggcttgtcttctcattcttcttttgaagagcagaagttttaaattttaatgaagtccagcttatcaattatatttttcacagattatgctattggtattgccctaaagtc

SEQ ID NO: 1242002 - DNA, 4001 bp, Homo sapiens
tcttatcccagttcctagctggcatgagcagctctatgagatatgactcagcctgcttcttcacctcgccaactggtccttcatcttcaggatggtaaatatgttttatttcatatgcccatcccaatcactttgctgtggttacctaaactaccaagaggtttgaaatcaagaggaggcttagcatgaaggagcgctatggagttacagcagtatctgtcagaagaacataccatgggttagctatctctgcctttcccatatactgggctttgaccacatatatttccctctccccttgatgacacattcccacctgtaatgattatctccatttgtcatcttgagcccccttcaagtgtcatctctaatactaattatgttgtgaggtcttttcctaacccctcacttcctaatcctctagttctcccaaccttagagtctacttttttctcttgtttgtctcattttgctctgctccccgttaaaacctcccctgggctagtgccctactcataaatctccaccttcagacatactaagcaaaatatcttgaacttaacagacgtttgataaatatctgatgaattaaataggatcacataccacagactctaaggacattatgtcaagactacagacattttatatgtaaagccatttcaaaaacaaaaaattcaagttctgctttaaaaaacaacatgacataatatatagaagaatgctactcactaggtaaccgtgttcatttcaaatgctttatagcaaagcaggcttccctaacatcacacaaaacttttaaagaaagaagacttgcttcttagcaaacatcactctcagctgtccacagcttcactccactgagacatacagagacacatctcccttatttatcaaaataagccatttaaaaagtattcttaccatggtcaacatgagccaaaacacaaatattcctgatgttggcagtgtttttctggagttgaatcatcttatccaaactgttgagcaccatgattacttatttcctgtgactaaaaattaaatatgtattacaaatggcccagaggctaaaggtcggggcaaaagaaaaaaataataataaacgctgggaggtggcaagcttctcaaaccccttaaaccaagaacccagtgaatgtttattgatgagatagaccaccaaggcctaagtccagttcgagcactaaagtcagtatcctaccacgattacacttaaggagtttgctcatccttccggatccaaaggctgcgatgaatcacgcagctcgaggggactgggtgcacagtgacaccagtaaccctgccggtggaggagtactccagtaaacatctccaggccaatgaccacgtacaggaagggttgcatccaggagggagagaaaatgctgaagaagatgctccctttctctcttcagtcttcccccaagtccctcattctgacattctcgctcgtcctcgcgcgaggtcaaatacccagctttattcctgcccatggagcccgaacaaagttttgggtcacgtgcttattatccaagcaggtgcactgccggtctttcattcctttctaaataaaaaggaaaaacctctacactacatgcccttcatttctgcagggtcccagattcgttctctttgaggatcctgggtccacacagacaggcgaccgccccggccccagacgggaagcggcactccggggaccgaagctcccagcccgcgctcggccccagcccctgttcccgcctcagagccgcagcgagcgggttcctccggcaccgcccaaaggctggcctaggaggttccagcccccagcgccagcccacactcaccggctgcagcagccccaccagccccgctccttctctcgggtcgcacccacaccgagagcttccgaaagtccgagagctctgcgggtccgacacgcccgcgcgccagggggcggggccggctgtcgctcgacctttcacccgcacgtctctgacgccgccggaagccggcgccgagtctgtcaccgggcatccctctgttgccttgactacggcgggcgctgtgggagtggagaagctgcaagtgctgaggcgcggtggaggaaagcatgggagccaagagtatgaggagctggtgtctgtgtcagatttgtagctgcgggtaagaaacggctggtgtagcggcgggcccgggcttgggagccgacctagggcctaggtgcacggagccggctcctcgggaaccctgagagtggccgtcccccggagatgaagggacgagggcgcagcgacatccccacttatcccgctccgcgaatactcgctcctcacccgcctgctacccgggggtaaaacgtttgttcgtagcccctgagactcccaatcaaggatgcaaagtaaaatgccacccgggccaggtaagtaatatatgtgaagccgcgacgggatataacgctggtgagtagtgggatgtgatccgactgggagagtgcatttccaccccataatcccccaccacgaagatgagaaagaacagtgctcaaggccctgagtctgcaacccatatcacattttctttcatctgtagctttctgtcctcccagccagaccatattcccattcccgtccaggcagcagttctttgggatccgcctgactgaaaagtcagtaagtagtccctaccctgaaatctagaatccaactgtgagtcctgcctaacaaccttccatcacctgtaaacacagtcctctccttcctcagcttcactattgacccagggattagatcattatttgctaagtaaatatgaacgttgtcaatccctggtgtatttgtaatcccattcaaagaaaacacctacatgttgatggaaagcagtttttttaatagtctcataataaacacagttcataattatatatagattaaaatatcaacaaattaactttgggtgtatgaatcctcagactggtgtgcaggagaaaatttttacttttctcctaatttatattcaacgcaagttcctttctcattcaactgtaaggaaattcagtcttcattatgttgagggccaccattggaatggcgtgattttacttcttgtttgtttgttttgggctgtggttgttagttttgtctttttaagggtttatttttattttttgacaatgcaataaatacacaagaagtatcataaaaatctaagcaaaaatatctataatattgtaaaacgccttcataattctatcttccacagataacaaatgttctttaagacttgttttacatatgcattgatttttttttttttttttttttgagacagagtctggctctcttgccaggctggagtgcagtggcgcaatctcggctcactgcaatctccgcctcccgggttcaagcaattctcctgcctcagcctctctgagtagctgggattacaggctcgtgcgaccacacccagctaatttttgtatttttagtagagacggggtttcaccatgttggcctccatctcctgacctcatgatctgcctgcctcggcttcccaaagtgctgggattacaggcgtgagccactgcgcctggcctgcattgatttttttttttttttaacaaaaaaagagaatattctgagcatactattctacaatccggttttttactatttacaatctcaccaacttccaatgatcatgcataaagaccaccctcattctcttaaataactgtatactattagcttatatgatatattggtcaaggttcttagttgtggataacgtaatctcctctggttagtctaggcaaaaaggaatttattaaggagtatatatatagttcacttggaagaacttaagaaatcattttcaaaataagcttccacaaaaattttaccacagaccaggactgacaagggagccactgcctctgccataatcagaaaattgcaacagagctgtagactccagaatcactcgtctcttccaaggtc

SEQ ID NO: 1242003 - DNA, 4001 bp, Homo sapiens
tgtgagttgtattcatcttcctgggagttgataatcaggctggctagctatccagtctatgggagcagagagagggctgcattatctccaggttggcacagcatctagcaggggctccctgatgacacctgggcacaacaaggacctcacagcaaagacaaacaggaggaaatgcctagggtgtggggacatgccaccactaaattacaaaaatatatgcctttcttctttgtatgtttcaacagtaccgcttcccactcttgtaccacttggccataacactttattatccctagtacctaaaaactagacagtattactgagaccttaaatgtgacatttgtcatctttcaaggtgccagttactgtaatacagctatggttcattttgagtgtctgggtgacggtgacatatttaattctatttttgtcttgtccataagcaccaaataaagcaattttgaaattactttcttcacactcaatttattatctagaacgacatttcaatacacagtatatttgttttgtggaattcattcgcagtgtatctggaggcctggatttaacatatttcctgtagtgatagctactctatttgtaggaactatttaggtcactggagtggagaaaaagaggtcgctacttaacagaaatggcatgtatccaaatatagatgcagttttctcaacacctgttgcacatcaaatgatgaagagattgttacaatttccaaaaccctggaccaaaaccttaaatgatcagcactttgtttcaactgatacacggcttaagtcagaaaaataagttcttcttaccaaaaacagtgagcctaaatatgctggctgctttagaaataaaacaggtgatcaacaaagcaatctgtttctgtctaaataatttcccagcaaaagtcacttcttttgaaactatatgatttgaaccacagggtatgcacagtgattgtgtgctttcagaaacacggtaagcatgacaaatattttcagttgtcaagggtaagcgaggagggaatgacccacctaagaaatggaaactaacaaatagtaatatgacactcccccttagttccacaggctggtgcggctgctacacgcagctcacttcctacgggcggctaaaggcggtgcatgaactgaacgtaggcggcctctttatcccctccccacaacactgtggggtggcacgtaaagacctcaagggaagggggcctgggcgatacgctctcctgctgccattcatttgttcaagaaatagttgaacaaatgaatagttaaacaaactctccaactaggactctgtcccattcggataccctacgcctctccccccatttccatccctaggcatcactccctcgtcaagaatatgctgattatggctcgcgccccctctctcccttggaccctcccgccagggcgaccggacgaggccagcgggagcaacgccttccgaaccgcaaggaaggagggctcggagtgcgcagggcgcgggttcgcgggaccctccagcgcgcggggctggccagccggggcggggccgagggcaccgggcgccgagctccgggaggggtccccgaggtcgcgccggccgggaggggcagcggcgggaggcggccgactgcggcgcacacgtggggagggcggagcggggcgggagccgggcgaggggcggtgacggtacctgatgaaggtggtcttgccggtgctgtactggcccaccagcaggatcatgggcttgttctcgaagtcggcgtcctccagcgcaggcgagtggaactcgtggaagcggtacgcctcctccagcggcagcaccttgcgcaggtagagcgagcgcagcccgcccgtcaccgtctgcaccgcgtccgcgccgccagcgcgttcgcgcccgcccgcctgccgccccatccagctgaacatcctgccgccagtccacgctcggatgggaccctgctccgggttcgactctccccggctcgcactgagccgccccggccgcgctggccgccgcccgaggagggccccgccttgtgctgccacagccagtcttcggccgctacgtcacgcgcgctcgcccactattcagacgagctctctcaggtccttcctgattggatctctgccagagagggctgaaggcgtcagccaattgagaggaggttcttaatgaattattgatgacggagtcattctagaggactgggcggggagatggtgtcttcccggccgggtggcactgaccggtcatgctcagggcccccttctggttgccggtgcctcacctctggccaggtggcatcggcttccgggtaaatctgagctgcccaaagcgagcctccggaggctgctccatctcctggaacgtttactcattcaggcctctggacgtcgatactggggatgaaaagttcagaaagtggacaggcaggttctgtcttcccgggggcgggtggttatgactccgttttacaggccaagagacccaggctcacgggcataattgacacaatcttgaggggaagtggactggaatctatttgagtagccgtttctcctacttctccacattgccctcactaaattctggatcagctaaaggctttttccccttagttttctttatgtgtttttctgtaaagccgaaaatttagtcattactctcattattacattatcctcattattacaactttatttccacatattgacatgtgagtcattgtcacctcctagctgttttttgttgttgttgttgttttctgagacggagtctcgctctgtcgcccaggctggagtgcagtggcacgatctcggctcactgcaacctccgcttcccgggttcaagcaattttcctgtctcagcctcctgagtagctgggactacaggcgctcaccaccatgcccagctaatttttgtatttttagtagagatggggtttcaccatattggtaaggctggtcttgaactcctgacctcagatgatccgcctgccttggcctcccaaagtattgggattataggcgtgagccaccgcccctggcctgtttcttttctaggttaaaaggatactcacttatctaagttgagattgggggaaataatcaccttttgtgtccttgattgtagcttaggaatatttcttagttgttttagagcatttctcaagtgtgatccatggggccacctgcatatatgcatttatgagctgggatgcttgttaaaatgcagattcctggtcttcagtccagacctactgagttaaaatattgaggagagatggagctcaacagatgccctaggtgactctgatgtggcctaagtctggggaaacagtacaccctgcagtacttctccaacctaacagaaatgcggattctgattcggtaggtatgggatggggcccatgactctacatttctaacaggctctcgggtattgccaatgctacccatccctggaccatacttggagtatgagagaacaggactttgcatcaaaagatctgggtttgaaccttgactatgtaaattaatggctgtgtgattttaaatgtgatgagttacctctctgccctagtttccttaagagcaaaatggaaactcctttggagttgttgtgtgggtcacatagttggagggaattgtatgtaactagggaagtgaaaagaaagccaagggaaaataaagttagacatctgccttgtgtcaaaataaaacaaagattgaaatgtaaaaagaaaatgaaaccactgcactactagaagaaggtacaagagatttatacaatttggcggtggaaaagcctttctaaccaacattaaggacagaaattatgaaagcaaaggctgacatatttgacaacaaaagtaaaagcttcgatgtatttttttagaatacataaaaacaaacggatataaatacaatcttaccatatgatgcagaaatcagctccttagtatttacccaaatgaattgaaaacttat

SEQ ID NO: 1242004 - DNA, 4001 bp, Homo sapiens
tgatacacttattttgctgaacctagccttctgatgtaatcattactctcctagaacttcagcatcttagtaaggtaaccacggcaacatactcattgatagggcaggttttcccagaccagcaaattcttataggcaaaaacttaatttacaaagtttaatttccagaaattaatttgtgaattagatagctgaagctggatcattttcccttaatactggttaacacatacaatagaaagtagtatacagagaaagtatgtatgcaatactattagccaaacaaaatacacagaacaagaaattttattatctccaatgctggtgcatgacaaataacaagcttaattagaggaggagacagagggaaacttcagataccaaggtaatttctgggcaggtttaaaacctttaaaagttgatagaataactgttcataaagtctttttagatatagcgctttttacttgacaacttttattaacagttcttacaatatgaagttcaactaaagtccttcatctgtcaagttaaaacagcaagcaaaacaaaatttctctagtatataacagcataagcaatggtttgttttctttgtacattcacacacatttagtgtctagatttgaaactttttaattaaggatgtcttaatttttgacttttaaaaatggttatgacaatggattttcttgatttatagatcacagtggctttataaatgatcaagatacatgtacaaacaaaatttcagatgctcttggaaacacatcttaagatacaaagcacacgtgatacatatttgagtttactcatccatttatcttacactgaaaatgtagcctttgataactgtggcttgactagatcacaaaatagaattttccaagttttcttaagctttcagtccaaataactcaaaagatatgtgtcctagttggatacatttttttctcattatataattagtatcagtgggcttttgtattggcagtttgtcttggtcatgacttattcttgcaaaaccatctttacagcaaacaaatatgaaagatattttccccaatgcaaggaaaataatctggatcaataacaaagtcaaagccataggtgttttaggacgttcttgataattgatttcaacggtcttaaaatcttttttctttttctttaatgattctcttcctttttcacaactgtgcagtcactgtcctattgtgttctattctgaaaaacaaatttttttgaaggtcaagtttttcaatggcacaaaactatttggaatgaacccaaaagatagcggaaagttgggtccctcctcaagtagtttcctcctcttttaacagcatctaactactctctatcaataatctcatcacagccgagttcttcggtcagacgattgacaaccatcagtgaaaaaagctcttcgataaaagctaactgatcaaacggggtcttctcataatgcatctgaaacccgccatccagggctggttctcttgttctcagaaacatcttgtcggcttcttcaagagcggctgatactctgtagccggcaccactgagctgctcctcttcgggatagtcgtagtcgtcctcccagtcatcaaattcctcgccctcgtcctcgctctcgaagtctgcgcccgccacctggcctggctgctccccagcgttgggcccgttagcaaggctccgtttcccctctggcgccgccattggctgggcctcctcctcctccattgggccttcctcctcgagctgttgggccccgctgcgggagggacgcagggatagctcccggctcccgctgcctacctccatctgcggaaggtcaccctcgccaggcatcacatccatctgcaggtcactgctctcttcatacagctcggacaactcagccatttccgacattgtgcaaaccgctcaacctctaggaaaaagcttccagcaagacagatgctgcgcggccgtgcgttcgtgcgcgtgcgcaaaggctgcgcgcttgcgtaaccccgcgcgcaggcgtggtcctcaggtaccgcctcctacttggcgcgccactgtggttggagtagctcagtgttttctccggggtgttggcgtcgccttttgagctacgtttccatcgattcgaacttcgtatctagggaccctgcatgcaagagcgtaacagtttctgtgttacttaaccctactgctgcttgtaatgctgcaaaccggaaaataaccttacatggccttcgtaacatttaatgctccttcccccccttcctcttcccctgggcaatttaccgatgtactgatgacttgtaaatccacgtctccaaaccagacaacatccataaccacagatcagcatattaagaactaatccattttgtccttttagtgttttcatttaaaaagttaaattcacaaacaacagatatattgtactttttttttttttagttatagtgaagaaatacttggtcccatttcttttcgcctgggaggtatctttccactattagcaatgcggtgtgtattctttgaattctttttatttgcatttacatgtatctttatgtattgacagcaaaatactattttgtgtgttttttaaaaacatgttttacctgtttttaccttcaacttaaaagcctcaggttttaagttgtatatacttatatgaattatatgactgtgtatacttacaggattcaagcacatttcatttattctgcactttatttctattattattacattatagttatgtagaattatacaactcaccataatgtagaatcaatgggagccctgagcttgttttcctgcaactagatggtcccatctgggggtgatgagacacagtgacacccgaggtgtgttccttatgtccggtctattctgtaatctcattttggttgctgttactgtggaaaatcctgcctcacaaagataggatgttgaaaatggaaggaggcttttcagtacttttgtggcaatctcaggatgttccgccttgactttaatcgagaacgtatggagatttgaagttgtctcaaacatacttttaaggccaccgtcatttgcaatatcaagcagttgatcctcttctagcgtggacaaagtggattcacctggcttattcacaaatgggtcacagatccattccgtcttttgtggatgagaagtgtgatggttaatactgagtgtcaacttgattggattgaaggatacaagtattgatcattggtgtgtctgtgagggtgttgccaaaggagattaacatttgagtcagtgggctgcgaaaggcagacccacccttaatctggttgggcacaatctaatcagctgccagcttggctagaatataagcaggcagaaaaatgtgaaaagagagactggcctagcctcccagcctaaatctttctcctgtgttggatgcttcctgccctcgaacattggattcccaagttcttcagtttcagaactcggactggctctcctctctccttagcctgcagacagcctattgtaggaccttgtgatcatgtgagttaatacttagtgaactcccctttacatatatatacatatatatgtgtatatgtatgtgtgtatgtgtatatacgtgtgtgtgtgtgtgtatatatatatgtatatattccattagttctgtgcttctagagaaccatgactaatacaggaagtaatgctcaaaatattttgaaagctgagataggtgatcatgcaccagctgggagaaagaagaccctggctcagtctctttcaaaatctctgctaatgtttgaaatgtcagaaatcccagtgttcatttgtcacccgcatgattccagtttggctttgaatgcagccaccttatctgccaagttgaacacagttgttgttcgtccctgaagtgacagagttcactgagcaggttgaatatgtcacacaagtaagcaagtttttttgtgacccattctgtgtcactgaaatgtgccgcc

SEQ ID NO: 1242005 - DNA, 4001 bp, Homo sapiens
tgctttttctcttccatttttctgcagccctaggagcagacaactaagcttgtataaagtaaacaaactagttcagaatgaagccttaggagctttgtgttgagtcccatgtacactttgagacacctattttggctgcttcttgggcctacttcctgattctcaaggtttgggaagatagaagttccccagtcaccaacttctctgtcatgttaaggggaataatttatatttttaccatttcaggttaaaaataacttcatattattaagcattagaaaagtaagctccctgagggcaaggatttttgtctgttttgcccacagctgtattcctaatgcctaaaacaaatatttaatgaaggaagaagcaccctgagtttgagagagaatattttgtcctgatagctccagaagatggtatttcttgaggaaatcctggatgtgtagatagagcagatgttgtgaaatgccaaagttaaaagcagatgaagaggccaggcgcggtggcccacacctgtaatcccagcactttcagaggccaaggtgagaggattgcatgagctcaggaacttgataccagcccgggcaacagagcaagactctgtctctacaaaaaattaaaaaaattaaccaggtgtagtggcatgtgcctgtagtcccaggtacttgacaggctgaggcagaaggattgcttgagaataagctgcagtgagccgtggtcatgcctctgcactccagcttgggagacagagcaagaccctgtctcaaaaagaaaaaaaaaaaaagcagatgaagttagaactatgttttaaatgataatatgataatattcagaaatagtttggtagatcaactcttcaaggatggggaaaaaactgtcagtataaatactttataacgtgccttaatttccagacaaaaaggcaaaatattattttaaacaaaatgccattttaaaaggtctagagctagagcaagctggtctaacccgaggcccatgggccgctttgaatgtggcccaacacgcattcgtaaactttcttaaaacattgaggtttttttgcgaattttttttttcttttaggtcatcagctatccttagtgttagtgtattttgtgtgtggcccagggaagccaaaagattggacactccttctctagactcagtctagaaccctctctctactacagctaagatgaatgtgtgctttattctgagctaaatgtcttagaggaaggtgcagaggtatggaaagttcctccataccggaaaacacagtgaggatgcctggggagtacagagggaattatgtggcgtgcagatttgaatgcatggatgagacttgagaattctgattgaggacgtaaggcctgtgcgagagcccaaaaagcgttctcagaacaaagtagcaaggggcgcgtatgaattgctgtggtatcatccgcaagggctttcagaggggaaaaaggacaaggttggaaggaggcagttatgttatgggatgtaggcaggaataagaagcagtgccaggtaagagggaggaatccagggggattcctctggggaaatcatggggaaaggactgtagaagaattcggcctaggtgggattctgcagaccagctgcaggtgcaaggactaaagtgagcatgggtggaacctaagggatgaaaagactgcaggatcctaaagcggcggcccaatctggaagtgtccgggctttggcccagggcccggggaggccagggcacgccagcccgggcctgacaagccacgttcctaccggtccgcaagcgtccggccgcaggtcttggaagtccgcgccgtaaatggcctccagggcctgtagctcgtggtcctgtcgttgcgggtagctctccggaggctcgtcccggccgcgcccgggggccccacggcccccagccatggcagcgctgcgcccaaggcagggcggccttgcctgggcggcggtgggcccccggcagcctgcggggcggggctccgcgctggggacgggctatgggcggtgttccacgctggaaacgggctcgtgggcggggttccgcgccggggacgggccgtaggcggagctccgcgccgggagctagctccggaggctccagaagcccaggcgaaggaagaaggcagggggacagctttgcccacatcctgctgggggaaggggagcaaaggaactccacgaacttaagaaatgaatcacagataggaatgaaaacgccacattgtatagttttcacgaaacaagtatctttaacagaagtgcttgctggaacttctccaccctggcatggctagtgcgggaaactcttttttcttttttttggcagagtttcggctcttgttccccaggctggagtgcagtggcgcgatctcggctcactgcaacttccgcctgccgggttcacgcgattctcctgcgtcagcctccagagtagctgggactacaggcgcgcaccaccacgcccggctaatttttctatttttagtagagatggtgtttcaccatgttggccaagatgttctcgatctcctgaccttgtgatccgcccgcctcggccttccaaagtgctgggattacaggcatgagccaccgcgcccggccgggaaactcttaaagggcagacgtcgatgggttctgaggtcacttctaatttcaccttgtaccttcccagaacaagactaccgggagtaaaaattgtgaccccccccaccctccttcctcccactttagtacccccaaacttattctctgagccacagattcaacaccctcattatgttctctgtctctacattccccagctttggggatctccactaccaccttgcaaattcaattgaaaactgtctttccactcaggcatctttatgagctaccttcccatgaagagaatcatgttcccttcccagttcactcagtgtgaatttagggagtctttgtgttatatcctgcctcaagtcgtcgtttttcaagtttataaaataataacctgtctacccagacattgttattgcacttcatcttcagtaacttactaatgctgcatgtccatttcgaataatcctattgtactaacccaagttaggtttaagtgacgtttcttctgtctaccttgcttactcctccactgttcactaaataatgattgtgtaaattccttgctgccatctatccactcatttctggccagataacacaaatgcactagcttgacccaaggccaatttaaatcatcatcttccctctgctggagacccgttccttctccagtgatctctgactaggtaaatggcaccattcaactgagtgtgattctgaattccctttctctcaactcacatccaaatagtcaccacttctgtccatccactacactctaacccattgccactaacttagttcaggctactgtcaccaattccctgggttacttcaataactctcttaattagtcactgtcttcattcttgccccacattaagccattcttcctattgcagccagagtaatgtttctaaattgcaaatatggccattgcactctaatccttaaaattactccatttctctattggtctttaaaaaaattcttttaaacctatatttatgaaaatgtcaaacatacttagaagtaaactcctctgtactcatcatccagcttcaacaaccatagatattttgtcaattttatttcatctcttctctccatccctcaggagtgttttttttaagtctcaatcatatcattttaaaaaataaatacctaaggatatatctctaactagaaaaggaaccaacataacatattactaatcttataccctaaaaatgtaaccctttggccagggacagtggctcacacctgtaatcccagcacaaggtggaggatcacttgaggccaggagtttgagaccagcctgggcaacatagcgaggccccatctctacaaaaaataaaataaaaaattagctggacgag

SEQ ID NO: 1242006 - DNA, 4001 bp, Homo sapiens
ggcaacaagagcgaaactccatctcaaaaaaaaaaaaaaaaagaattatattcatcaagatcgataccatttagatcccttaatcccaaggaagttattccatgacattagtctagactatccattaaaacttcattttctgcaacttctttcctaatatctctaatcttttctctgcatttgttaatttattcccaaatttcataacagatgtcttaactgccacttcctatatgcatggaaaaaaatgaaaggaccaatatgaacccaaggctcaaaactgaaaatctgctacaatgtagaggggtaactaatatcttgtaatgcggctggtaacaaaatctagtcccatgtttctacaacatgtaaataaagcatctgagtgtcttcaaacaataaccagtcgatttattaacttcaatgtgtgcaaagctcacaacattcttgaacctcaggctgtcagtaaatcggacatccacacatccaacctcatcggactggggagagaacagaaaaactcaaaacaacattcctattaagttcatagtgattatctagcttaaacttttcagcccaggcaggatttatagggttctccgtttgtgtttataaattaggagaaattcactaaattaggcaaaaccacaaaaaaaaatcattttccatttcacacaaaactttatctgcacaaatataacaagattttgagaactttgttaataagagtcttaacattttggatttgagacttctgtaactactgtaaaaaaaaaaaaaaaccatgtagaagtaaatgtcacttacagctgtataatgaacccttcggagttttcaaaatcaaacgactgaggtaaaaatgattatctacaaggcacagacaaaacaacaacaacaacaaaaaaccacgggcccgtcatctacaaccaccaccaaatcttcaatatttccttaggtgtcgtatgtgtgtagttgagtaactgtcgtctctccatttctcaggtcacggtgtgaactacctgggtttctgtccactaactgcgggctatctcagtggtcagttcattctttttaccacagggtgggggaagggagagccaaaagttatttccctttactgtttctagctgtctcgtgtgggaaaaaaaggttgaaattcaactacaatatttcactcatctaatccctcgaacaaactgtataagtagacctcagggtcataaatgagttactggccctgggctgacttgagctcgaaaagacaggcgagtctcaaggctttccatatggataagctacaaggctcaattcccaacttcccggtctcattcctgcgagaggctccggaccgcgaagcttgcacgtgggccgacccggccgatgctgtcacctttcgtcgccagccggcgggtgggatccacgccggagagcagactctcaaccggcgagggagtccgggaggccacgctgccagtcttcggcccacacatggccggcaagcggaggggaagagagcaccgccaggccctatgctcgcgcctggacccacggcccgcaggccccggcagcgacccggggcccagagtcggccggcaacagcgccagcccgcttccgcgctgcccggcgccctagcccgcacccaccttgacgtcctcgtcctcgtcctcgccttcccagcggtccccgccggcagtgccgccgccccccaccttccgcactgggtcttccacggagaaagcgtcggcgtctacggaagaaagcgagccgtgttagtgcctgccactgcgtggggccggcgccggcccgggccctgccccagcaacttctcctcaccccaggagtccgagtcccccgccgccgccgccgccgccgccatctcgagccgggtgtgagcgtgtgtgagagggagagctagcgaggagttagcacggcggaggtgagtcactgggtttgctctcgttgaccggcgcggagcaggatgggaccgtggctgactgtgcgccgagccgaggccacgccccctcaggcggcggcggcgacgcgcgcgggtaagaagtgggcggggaacgcggtcggtggcgctgcggggctgagggagaggcggaggggggggcggaggggggcggagggaggggcggaaagagcagagggaggggcacagggggctgaggagtgctgggtcgggcttccagctccctacaacgcagaccagtactggagttcgtggtgctggaagaccgccgcccgactctgggccccgggtaggaaacgtaagtgccaggaagttagcagagtggttctttggctggcgcctgaacctcgccagtcttcgtcgcccctcccctgccaacgcctaccccgcttcgaccggagggtgcgctgtccctctggtcactgtgatcaccgtccatggccgcctgcggatacccacgccgtgctcagaagagggctctgaggccacgcccgcctgtggggtcggtggccgggcttccgggaccccagagggagtcgtcgcgcgctaggtggaggggacccctctggaatccggcgatccccgggcgcagatgcaggagcgggtggggagagccgcgttcctggcatgtttgcctcgagttagtcacgaaggaatcgaagagagccttagtcttcgaggcttttcccttcctgtgagcccctttgaggccagcacattgatttttttttctttcgcagaacaatttcggacctcctggggtctatgctaggtatgaggtgtatctttgccctccatcaagtagcaaagatggacatgtaaacaaatttcgacactgtgatgactgccacaaaaagcagcattatgaggttgaatgtaaaaggataaccttagcggcggcgggggccggaggatgaaggaaggcttcctgaggtaggcgctggttgaaactgaagttggagagagcaagtggcatttgctgaagtgcatttccggtagaaaactccagtggtccctcacctgactgagtggcgcagtcagagataaatggaacaggtacactgaccagaaagggcaagatgggctaaacttcgccgttgggccactgggctcccccgcaggattttaaagagctagccagtagatggattttgtttttgttattttcgcaatttattttcaaatatgtaatacgcgaacttggtacaacattcatgtgataaaaaggtagatacgtgggcaggacgcggtggctcacgcctgtaatcccagcattttgggaggccgagatgggcggatcatttgctgtcaggagttcgagaccagcctggccaacatggtaaaaccccacctctactaaaaatacaaaaatcacctgggcgtggtggcgggcgcctgtaatccccactactagggaggctgaggcaggagaatcgcttgaacccgggaggcggaggttgcaacagtgagccgagatcgcgccacggctctccagcctgggcgacagttagacccgtctcaaaaaaaaaaaaaaaacaaaaaaggtagatacaacgatcagctgctccgctccgttctttctagtggtaaccattgttccccctttctggtgttatcttttcagagtctacaaataaacattttataaagatgatccttcaatacatattctacagcccagttaaaatgtgagaggccatgatctacagacagccatttataaaggtggatcagggccggacacggtggctcaacgtctgtaatcccggcactgtgggaggccaaagcgggaggatcgcttgagcccaggagttcgagaccaacctggccaacatggtgagaccccatctttacaaaaaaatatatatatccaggcatagtggtgtgcacctgtggtcctgtggtcccagctactcaggaagctgaggcagttgaggctgcagtgagccacgttctggccactacactccagcctgggcatcaaagtgacaagaccaaaaaaaaaaaaaaatgtggattggaaggaggcaa

SEQ ID NO: 1242007 - DNA, 4001 bp, Homo sapiens
ccttgtccagacgtttccggctggcagaggaaggcagtgcctgaacaggttctctgtttggaacatgggtctggcttctaggatattttaagggaatgggacagatgaagaccagggtaggaggtggaactggatcttttattacaacatttaagagtggagattagaaaggaagacaatgccaaagcttcccatgttagtcccaccccatccaaagtacctcacttcccactgtgccatgtgctcccttgaggatcctgggagtgactgtccttggttgcttgccagtggatctgacactgacacctggtggggaaagtggcaggagcacttggttccctggagtactgggataccttggacttcaggctttgccccaccttatcacaactccctgcaatttctggcctcacccacctcctctagtgccatctgtggctgtgatactgcatctccttcagaatagcctcctgtgttctgccaactctcaggatgtctggcatcttcagtcaggttgtgtccctgaactgatgatggggctgggatagaatccatggctgcccaaataatgaggcgctccctgagtgagcccaggcagtggaggctgttaggcccagacctggaaaaggatggtggaaaaaaataggagggtggagacctcttaagcacctctccacatttccctcccccactttccacaaaccctttcttgccggctacctgttccccctcacctgaggaagcgttggcacacaaggtccaagctaccaccagcgccctcctgacaacactgggacactatgaaggagaagaggcaggaccaaccagggcctgggagtctcagatactgggggtggaaggagacggtaagccccatgaagtcagcccctccccctcctgccgccgccactcgtccgggagccagtccgtaagtaagactaagacgggtcccacagggcttgttagcacaccaggtgcagctgggcctgagttccccaggaggccgaaacagcacagtcccctcaaaccacagccccctgggacaaccccagcagcctcctcgccccacttggagttcagttatcggaactacctcagaccgtgactactcgcagcctccggccccgaccgcaccttccacctccagcccacgtttatgctccctcgccctcacctcgctcacacaccctgagctcgcacttacccctcggtggccttggaaagcaatcaccggccgtacctgcggggagagcgaagatgtgaccgttgagcgcaggtgaagcagtgtccccaggatccggcgtccggagcccgggatcacctgcctagcgggcttcacttggagaggtggggaggccagagcttgcggaagccgctccctctcccctgcaccttctccagggtcgccggctgaggcccaaggtccctaggggcagtgactagagaagaagggggccggccgtacctgttgccgctgacactcttgcagcgcccgcagggcagcgtcgttgagcctgagcagtaagaggctagtccgggcagcttgcgtgaagcagagccggagctgtcctctcagaggctcctggagctcctccatggcgacgagttcgagtgcaagcagcacgggggccacaggcgagggccaccaccgccacctcctctgttcagggtttggttggcacacccggtaacccacgtctgccccaccctccgccaggaacccgcccccggccccacctcccgccagcgccaccccaagctttcccagccgcgtgggcggcgcttcgctctccccggccaaccgcccggacctcggcgctttcttctaggatccgcatgaatcgctttgggctatcggaagagctatccccagttctcgggagaaagagtccgcgaccagcgtctgacctctcactcagagtccccagtcctgccttagtttccccagcgaccctgaatttggagttgctgtctctaagtgaaagctgaacctgcaaccccttgagggtttcagccgcagaggggcgggagaaagggcctggttggtaggcgggctcagcggttcgcgcccagttagccccgagcttcggagacccgagagaccagaggatggctgacacgaaggggcacccgagacagcgcctgggctttttcccgcccgcggttccaccgctctgaaaccgatttctaacagagaggtaattggggccctgcggttgtggtggcagcagtgaaagttggctgtcaccgactggagcgcccccagttggtgggcagggatacgggcgcgggtagtggcaggaaagttgcagggcagagagccagaacccagtcctaggtctcacctcgtggcctaaacacgcgtcagagtggtgagaccgctccctgaggagggccaggagctgccatgaagtcgccaggcattccagagggccagatcctggtgcactgagaccccagcaccaacctctggccagcccttggtgtctccacttgttcctgtttgattatgtttcccaagagccccgatgttgtcctgtttcctaaacaggatccctctgttaaatccctggacctgcacaatccccgggaaccttaacgtcctctactacaaataaaattacctatacatttgtcaaaactcataaaaaaaaaatacatttttttttttttttttgagacgaagtcttgctctgtcgcccaggctggagtgcagtggcacgatctccgctcactgcaagccccgcctcctgggttcacgccattctcctgcctcagcctcccgagtaactgggactacgggcacccaccaccacgcctggctaatgttttgtatttttagtagagatggggtttcaccgtgttagccaggatggttttgatctcctgacctcgtgatccacccgcctcggcttcccaaagtgctgggattacagggatgagccaccgcgcccggctaatacacataaaatttgtatgtaaattatacttcaataaagttgatctttaaaatctgtgctatttctgtttctctgcggcaatatcctaatctgataaacagttgtggtaatggataaagctggtctcttagctgggcatggcggtgcatgcctgtagtcccagctactcaggaggctgaagcaggaggatcgcttgaatccatgaatcaggttgcagtgagccatgttttcgccactgaacttcagcctgagcaacagagagagaccctgtctcaaaaaaagaaaaaaaggccaggcgcgctggcagattccatctcaaaaaaaaaaaaaaaaaaaaaaaaaaaaaaaaaagaggctgggtgcggtagctcatgcctgtaatcccagcactttgggaggctgaggcaggtggattacctgagctcaggagttcgagaccacccagggcaacatggtgaaaccctgtctctactaaaactacaaaaaaattaaccaggtgtggtggcgcacacctgtagtcccagctacttgggaggctgaggcaggagaatcgcttgagccccagaggtgaatgttgcagtgagctgagatcacgccactccactccagcttaggctggagtgagactccatctcaaaaagaaacctgagttttgctgaatacggggacagagaaatgggagtcatggtggaggaaataggatcaagaaaaagttttaagatgggagaaatagcatgttccatgttgacggaaataatttttagaacatctccaaaattttgatggtgtaggagatttactgcagtagtgcccttgaataggtttgaggtcatgagatctattcaggattagctaaagcctaaaggtaggagtgtgggcagttcgtttatggtaacaggccacaggcagagaaggtgggtgtaagtgtagaggttaggtagatgtggtgggagtctgaaaatttttttctgattgcttccatttttctcagtgaagtaggaagcaactgagagagagaatgagggaggagtgattggggtt

SEQ ID NO: 1242008 - DNA, 4001 bp, Homo sapiens
taatggaaaatagatttatatgatagcaaaagtaccacattttaaaactcgtgggacacagctagagttctgagaaatttataaccttaaatacatactaccaggttgctgcaaaagtaactgcggttgttgccattaaaagtaatggcaatgtggccgggcgcggtgcctcacacctgtaatcccagcactttgggaggccgagcttggtggatcacctgaggtcaggagtttcagaccagcctggccaacgtggtgaaaccccgtctctactaaaaatacaaaaaaattagctggacgtggtggtgggtgcctataatcccagctactcgggaggctgaggcaggagaattgcttgaccctgggaggcagaggttgcagtgagccaaggtcgtgctattgcattccagcctcggcgacaacagcaagactgtctcaaaagaaaagaaaaaaagtaatggcagtctaaaaataaactaagcatccatttcaagaaactagaaaaaaacccaagtatttttgaaaagattaataaaatcaatactggtgatgggtacagtgacctgtaaaaataaatgaaaataatttttaaaaaatcaatactggtgagcctgatgaagaaaggagaggagacaaaatattcaatatcaggaatgaaaaaatgaacatcacagatcttgcatatatggaagtgatcatattatgaacaactttatatcaatacatttgaaattttaggaaatggataagtttctagaaaaaatgtaacaaaatgacaggagaaattagaaatataaatagccccgggccgagcgcggtggctcatgcctgcaatcccagcactttggaaggccaaggcggatggatcacctgaggtcaggagttcaagaccagcctggcaaacatggtgataccctgtctgtactaaaaatacaaaaattagccgggctactgcagaaatctagatgaaggatggtggcttggattaggatgagaggtgaacacaggaaaaagtagtaggtaaagccaacagagtatcctgacagttggatatgtggtgtaagggaaccagagtagaaaaaggatcacttcaactggaagatgttgccaccaaaagatagttttcaacctactttcttataccttatgttccaaacatcttctatttttcaaattattaagcacttttgtagctgatatataaaataccgaaataccagcctcaagcagtttagtttccaaatcttcaggataagagctatctacgttaactccacctaggagaagaggatgagtgtgtaactcaggactggcccatgggctacggtaacatctatacctctgtaccttctccaccaggatccggtctgtctcttgcacgctggtatcaggcacttgcttgtccaagtaaccgactgggtagagcgagtctccctggccactgccccggtcacttcgacccctaaaaaaccaaaccaagaaactaaagctgcaacctccgatacttcttatcccacatttcctgatctaccaatcataggaataaagatcttcagatgcacctactcagattagaccaagccccctcgtatgttcctcagtcctttgacttatcaggaggactgatgtaagcattgtttgagcagagaaacttccacggcagaaaagccgctacctccccaggtgatgtctgtgtgccacccatctttttcagagttatgcctgagggctcaggtctcattactctggtgcagttctgggatgaacagtgatgtacagcttgcccaggtgcctcacctgctgcctcctccaggcccgcttagctcaatggcccacttgaagcgccggcctcggttagccaccaggcccccctgggccgtcatggcaacagctgcgtcctatagcctcgatgcttctcagtccaaagcgtactccacaacaggcccaccagcgttctccgctttgtctcactctgcaaatgcacttccggcgcgtgaatacgacgtcatttccgccctggaaattggtggtgctgtgggttgaggagtccgggtttggatttagaaaagcagggaggaaaaaaaaccaggcaagacttagtgcttcctaaagccacttccgcgcgctccccttttgaatgtccttgttatgtgttccctgacctctgaggtgcactttatggggctgaaggaaagcccatactgactcagcgttaagaattggtgggcggatcacctgaagtcaggagttcgagaccagcctggctaacatggtgaaaccccgtctctactaaaaatacaaaatattagccgggcttagtggcgggcgcctgtaatcccagctacttaggaggctgaggcaggagaatcgcttggatccgggagccggaggttgcagtgaactgagaccgagcgattgcacgccagcctgggcagcaagagcgaaactctgtctcaaaaaaaaaaaaaaggaagccaagaaaagcttcttaacctcctacgcgctccctggaacaaaagattcaaatcctgggtttaaatcctagcttgaccttgagcgagttacttagtagtttctgagtattgaatgtccactgtgtcatgtgtttatttcatttcacttgcacagtaaccttgcgaggtaaacagttctaaccacattctgcacaaaggcaaggcagcattgtgggcatggaaggggacatgggctcggtattcagttagcctgcgtttgttgttgtttgttttgggtttgttttttgagacagggtttcactccgttgccgaggctgtagtgcagtggcgctatcacggctcactgcagcctcgacttccccggctcaagcgatcttcccacctgagcgttccttccaacctgagcgttccgaggagctaggaccacagggcgcgccaccacgccccagtcttgttttgttttgttttgttttgttttgacagggtttcgctatgttgctcaggctgctctcaaactcttgggttcaagtgattctcctgccttggcctcccaaaatgttgagattacaaaggcatgggccactgcacccagcagatggcctccttttgaatcctggtttcaccacttaataattgtatgaccttgggcaagttgaatttgtttcagcctcttcatgtaaaagttggataatctacctactttcaaggcttgtgagattagtgcccaccacatatctggtgtttggtttgtttgtgtttttgttcgagacggagttttgcttttgttgcccaggctggagtgcaatggcactatctcggctcactgcaacctccgtctcccgggttcaagcaattctcctgcctcagcctcccgagtaccagggattacaggcgcacgccaccacgtccagctaattttgtatttttagtagagatgggatttcaccgtgttggtcaggctggtttcgaactcccgacctcaggtgatctgcctgcctcggcctcccaaagtgctaggttatgtggtgtttttaatgatgtatcacatcattaccaaataacaccattgatgtgtttttaatgacgtgtcattaaataatgtatgtcattctttaaagtgattgggttttgtatggtatacctttttcataatatagcctattattggacatttaaattgtttcctgttttccttccttttataaccagtgttgctgtgaacatatctgtatgtcttttcttatttcctaaagttatagtcctagaagtgaaattggagttgctggatcaaagagtatgcacatttttaaagaattttcattttaaatgcccacaggagccaggcgtggtggctcacacctgtcatcccagaactttgggaggctgaggcaggaggattgctttagctcagaagttcaagaccagcctaggcaacatagtgagaccttgcctctgcaaacaacaacaaaaaaaattaaaatgtccactaggaaaaatggcaccatttacatttcacagtctataatt

SEQ ID NO: 1242009 - DNA, 4001 bp, Homo sapiens
cctcagcctcccaaagtaagattacaggtatgagccaccgcgcctggaaattctccatcaacctttctacatacaaataaagaacatgaaatggtatcaaaagctgttcaaaaatattaagtgaaaaaggcaggatacaaactactacatgttgtattttactagtaaaaacctaagtcatatgattccaaaagaagctggaaaaatggtaggcaccgtggctcacgcctataatcccaaaaatgtgacaggctgaggcagaaatatcacttgaggccaggagtttgagaccacactgggcaacatagcaagaccctgtctctacaaaaaattaaaaaattagctggacatgatggtgtccgcctgtagtcctatctactgaggaggctgagacaggaggatcacttgagtacagaagttcgaagctgccatgaactatgatctcgccactgcactccaggctgagtaacagaaaaagaccttgtctcaaaaaaataaaaagaaagatacaatgaaacattaagggttgttttcctactttgtttctaatatactatttttaaacagaaattaaatgctttttaaaagaactgtatacagaagagtggccaaatggtcaattaaggcttattcctaaagcttaatgagaactttatcattaaaacatcattaattagggtaaactctaacgaatgccctaatgccagattcttaatgacagacagcagtaaaatactggttgtaaatttgtcactatttattaatctgaggttgaataaccactcaagggcacttagatgatctgaacaaatatgtaaatcagatttggatttaaatgtctacatttaagttgtctgattttcagataccatttgctggtgtacgaacccaccaaaggaaatacttcctaattatttgctttcagtttacagtttcacctccaagtaagggtggaaagatttaaaacaacatacgcgtgcctagacatttcaaaagcaggctgctgcaaaactagtgctaacaaattcatcctgtcttttaatatagacagaaaacccacttccactaatagcatgaaaggacagaagcaagaaagcaatgtagaggaaccctagtctcacataaatgacaagtgtgatatagcaaatctctcgatgaattcaactgtaaaaaagaacaacgatcccacccccaagcaaaaaaaaaaagaaaaaaaaagtgctttgattagggatttcagagcctattaattttagaagcagtaacattagcctcccagtctatgtcgtcactagaagccctttgggttttgagaattcccacttgtgtcgcatctttctacataataacaagctaccaaaagactgaagtgaatgcaaaaaacgactaggttctagggaaaccagatgagatataaaagaatccaacaagagactaataagggtccacctgtccccagggcccaggaatgatcgtccccacatggggccaaaataaggttggaaataactgactccatgctctgaccatggcagggggtgagcgcctgccatgctcattccagaggtacaggaccaggaaagggaaagcatccgactgcctcccaaggtctcccggcatagaccgttagcggcaccctccccttcagtctgagacagcgacgttgtcccgtcctgacacttaactctcctggtggggtccctgtccggcctccatcccagcctttttcccgctgccctcaggatgctcacttaaggaaaccgacgtgctcttctccgtctaccagcactcgggccgccgagatccagtcctgaggcttcacccctggaacaactgcacgcccctcaatcttgaagcgatctcctatgccgaccccactccctcccgatccctcagcagcagccccgggcacctccgagctctggacatcccccgatagcagcagcagcagcaggacgggaaagaagccccacagagcggccgccatgacagcagctctgcactcagaccggcagccccggaagccctcccagtctcccggccgccaccgccgccgctggcggcttgatgttgtcatcactgcgcgcccgtttctgtcataagctgtgggatccaaccagagggaagagatcatggccgatcgactagcgaggcggaagtaaggcggaagtactgcccttaactcccggcactctggattggaagacggcgcacagagcctgtgtcaagtgcctatgaaggggactgcccatgaagtgaaagtcaagtgtgtgttgctgcggcagccacggaggccaaggacctcacgggagtaaaagatgacgagactggcttcgggagaaacaccatccagaagagacctttcaaaaaacttctagagactccccaagacgtatgagatgaaaggcttcttctgtctgtgtgcgtttaactcatttctccttagccccgagattacgcgctgctgtgcctgcgactgcagcgtttacgccgagataactcgtggattacagtgccaaccttactcccaaagtttgccacgaaatatctcgcttctgttattttcgcatggttctggtatattgacttttgaaacaaaagacatcattctgtttatagcattctgtttttagtagtgggatttccatctacaaaatatagtaattctcgatcgctgaaatgtcaaatcctagaaaacgtagcattcctatgcgtgatagtaataccggtctcgaacagttgttggctgaagattcatttgatgaatctgatttttcggaaatagatgattctgataatttttcggatagtgctttagaagccgataagatcaggcctctgtcccatttagaatctgatggaaagagctctacatcaagtgactcagggcgctccatgaaatggtcagctcgtgctatgattccacgtcaaaggtatgactttaccggcacacctggcagaaaagtcgatgtcagtgatatcactgacccattgcagtattttgaactgttctttactgaggaattagtttcaaaaattactagagaaacaaatgcccaagctgccttgttggcttcaaagccaccgggtccgaaaggattttcgcgaatggataaatggaaagacactgacaatgacgagctcaaagtcttttttgcagtaatgttactgcaaggtattgtgcagaaacctgagctggagatgttttggtcaacaaggcctcttttggatacaccttatctcaggcaaattatgactggtgaaagatttttacttttgtttcggtgcctgcattttgtcaacaattcttctatatctgctggtcaatcaaaggcccagatttcattgcagaagatcaaacctgtgttcgactttcttgtaaataaattttccactgtatatactccaaacagaaacattgcagttgatgaatcactgatgctgttcaaggggccattagctatgaagcagtacctcccgacaaaacgagtacgatttggtctgaagctatatgtactttgtgaaagtcagtctggttatgtgtggaatgcgcttgttcacacagggcctggcatgaatttgaaagattcagcggatggcctgaaatcatcacgcattgttcttaccttggtcaatgaccttcttggccaagggtattgtgtcttcctcgataactttaatatatctcccatgcttttcagagaattacatcaaaataggactgatgcagttgggacagctcgtttgaacagaaaacagattccaaatgatctgaaaaaaaggattgcaaaggggacgactgtagccagattctgtggtgaacttatggcactgaaatggtgtgacggcaaggaggtgacaatgttgtcaacattccacaatgatactgtgattgaagtaaacaatagaaatggaaagaaaactaaaaggccacgtgtcattgtggattataacgagaatatgggagcagtggactcggctgatcaaatgcttacttctta

SEQ ID NO: 1242010 - DNA, 4001 bp, Homo sapiens
aaactacgccccctgtggccagtctgaagctactgaggtgatgtcagcaagcgcagagctgtgaagaggcgcggactggcacatcatcatgtggtttttccagcacagagatacaggagacataaacgccctcaagaacataaaggtaaaaaggagtaaaatacgtaggaagtgatgagtttagagtacttattatctttctttttaatataaattttttacttgtaagtttatacaatttaatttttaataatgcctgtgtttaagaactggttcacaaggttcctcaaaatttagcaattggctcttgcaagtcagcacaagccagctccagccactgcagcatgtcatgagttcatactcagtgattctcatctggtggctactgggccctctgccacccactgcctggaaagaatttagtgcccaggggcatcctctggtttgggactagactaaacaatctcctgatatctttgtgtttctctgattgagtagattttaatttgtctggtctctacagaataaaaagaacgatttggccaggcgcagtggctcacgcctgtaatcccagaactttgggaggccgaggcggaggatcacgaggtcaagagatcgagaccatcctggccaacaaggtgaaactccgtctctactaaaaatacaaaaaattagccgggcatggtggtgggtgcctgtagtcccagctactcagaaggctgaggcaggagaatcacttgaacccaggaggcggaggttgcagtgagccgagattgcgccactgaactctagcctggtgacagagagagactccgtttaaaaaaaaaaaaaaaaaggacaatttattggtgtctgccctattttcacaagacgtggctgagattattgacttaattcacccagagttctttttcttcccttctcagctgttggtctcagcgtcagttgccctccgcacaccagaccaaccagggcaggggagtgaggcagtttctatagcaacagaaccacagctgcaccccactgtccccacacctctgcaccatttccctctgcctacccgcttgcttctcccaggacacaaaacagccaggcaattcccaggccaggatataataattcctgccaagagtgctgcgactctgaccacctgtgttggtttcttgctttgtgtctgcctctgccccttttaggtggattccctgactccctcctctccttctctcccatttggtgtagaagctgtgacaccttcatgctacccagggtgtctctcatttgtatcagtaagctgtgaacacttatgctatgatgaccttgggataagaatataaatccatgttaaccaccatcaccatctcaccatcatacaactatcatgaccagtttaccccaacatgctaccccataaccaccccacagcaacatcaccatcacctccgcctccgcctccaccagcacccatcatcacaccacgctccacagccagctcactatcacctctaccagcacccacctaccacaccccccccccacagccacctcattatcaccagtaccccctcccccaccatagttataccaccatctccccgcctaccatccatcccacttcctttaatgaaaacaggtgatgctgcgggggctgcatacagtccagcaagccctgtcgagcgctggcttggctcaccctgtcccatggttgcaggccgctcctcttatccacttggccgcagaaagcgcctctctcaaactgttgcttctgggctccttctgggctttctgtcttccagacagaaaatatgaaggcacttttgttggcttaagaatctggaaatagcaaaacctccccccactactcctgtgagcaccctgacatgtttcttctctcctactccctctctgctggtatctcctggaccagttactgggagtaaccctgttcattttatctcttgtgccaggaggcccaggcaggaatacgcctggcagccctgggggagggggtgggatggggaagacctgccaactagagaagcctagaacaaaccttgaagcctcttgcttcagtggtctcaagagactctcagagatgttatctggactgcactggaagactctggaagagaggaggccacaaacaggagtcccatatccaactccaaatctcaggccctaaacgtgacaggggctgcaagttgcaagatgttcatgggctgttttgataatagagagaacacgtgcatctgcaatttatctgtgtgaaaaagataaggaagtagaatttgttggtgaaaaataaatgtattaaaagtagaagctggggccccaactcttccaagcctacctggtctgggaccctctaccagagaaggttgggaactatcttgggactcaggccctatgtcttttcaatttttctttctttagttcctgaagagacaagagaaggatctcatatttggccctacctgggcttgtgaaactgtgttaccagaagcactttcagggcagctgtacttgctgcatatacatgagacgtctatagaatgatataaaacacactgccaaaaatattggttgcctgtggggaggggatctgggcagtggggtagaaaggttatctttctgctgtttactcttttatacttttaaaactttgaacttttgaactcatttgaaggatcttattatgtaaaaaaaaaaaaaaaaaaaaaaaatgaaacttctgcctttcactagcgcagtggctcatgcctgtaatcccagcactttgggaagccaagtcaggcggatcacctgaggtcaggagttcgagaccagcctggccaatatggtgaaaccctctctctactaaaaatacaaaaattagctgggcgtggtggcaggcgcctgtactcccagctactcaggaggctaaggcagaagaattgcttgaacctgggaggctgaggttgcagtgagccaagatcgtgccactgcacagccagcatggagcaagactccatctcagaaaaaaaaaaaaaaatccttcataagaaatgaagaagttaatttttcattatttgaagatgtcattttttacctggaaaacttgaatctactaacaatgattataaaaggtaatttagtgagctggctaataccaaaagtatagaagccaatagttttcatacctgcaatcaataacaagtcagaaactgtaattaaagacccaacctataatagcaacaacaacaaaaggtgaaatttctagaaataaacttaagaaatgtgaagtgctgtcagtaaaacacttggaaacggtatggagggacaccaaataagacttgagcagataaaaaggaagatcaccatcctgtgtaggacaactcaactttataaagcggtcatttcttcccaagttgatcttaagtttaattcattcccaataaaaacaccaagattgttttttgaaactaggtaaactgattctaaggttcaaaaggaaatttctaagataataataaagtgtgaccagccttcctagatatgaacacataatatgatattactgtaattgaaaagtccatagatcaaaatacatgtattaaatgtatgctaaatgtggcacttcaaatccatggggaaatgaaggatttatcagtaaatgattttgggacaactagcttgtcaaaatacagttggcttcctatcttatgccacacatcaaaataaatttcagatggatcaaaactcttattaaattcttaaagtaatagaagaaaaaatgagacacttcttcttaagttaacttgggaaaacctttaaaaatattatgcaaaactcagaagacaaaaagaaaatactgagaaatttgattccttaaaaatttttaaatggaaatattcacaatgttaaaagatatgcagatggggcacggtggctcacacctgtaatcccagaactttgggaggccgaggcgggtggatcacgaggtcaggagtttgagaccagcctgg

SEQ ID NO: 1242011 - DNA, 4001 bp, Homo sapiens
acaaaaaaaacagctattctacttagcttgacttcaaattttaaaaataagtcaaggtcaaagtctttggcaaaccacaatgaatatctggaagtaatgtctatacacattagccaacgatgtggatagtaaaaattacttaatcattccatttttttctgttagctctacaaaattactgagtcctaaattccatcccccaccacaattataatttcacttaggccagacttgtaatctgtccacaaaactgttttccaactgctgcatagagcagcattcttctggctcaggttcctggaatttccccaaattcatgattttcacttgtttatgtctagatccccaaccgggagaaaacatgtcctgaggggaagacaggacactaacctgaaagacatgggtttgaactctttaggggaggggagggtcagaactttttattaaacaaggaatacgcacaagaaaaaagatgtctaaggccaggtgcggtagctcaggcctgtaattccaggactttgggaggccgaggcaggtggatcacttgaggacaagagttcgagaccagcctgggtaacatggggaaaccccgtctctacaaaaaaaaaaaaaaaaaaaaaaaaaaaattagccaggcgtgatgatgcgcacctgtgatcccagcttctcgggaagctgaggtgggagaatcgcttgaacctgggaggcgacggttgcagtgagcccatatcgtgccactgcactccactccagcatgggaaacagagccagaccttgtctcttaaacaaacaaacaaacaaacaaacaaaagtctaatgtctacagacatctagaaagagctccagctatgcctcagagagaaaaatcccaggagtggatgggaaaatatccatgcccagaaaaaaaaaaaaaaaaaaaaaaaggagaaaaggtacaaaccatcaggtaagtttctgacccaagtttaccaatcttgtttctcatttcacctaaatgtaaactaggaaaactacacaatccacaatataaattattgttacttgacttgtgactggtcagtctccaaatactcctttcccacagcatgagaaggaaaatatgtttcctatcagtccttctcacaacagaagagagaaatgtggtttgtcactaatgaaacactgaaaatgtaccactgtcaccagttaacctaatctacaatctgctggttaaaagcaggtcagcctgaagcatataaaaagacgtctgcctttcaaaactggctaaagctgtcaaatcggatcgcaggttttacaaatacaatcacctaaattcagccctgctccataaaccagaaagcagaaccagcttccataactggccacgcagcctcccaccccaccccacccccgcccttgacagtgagtgggtcggagtagccacgatgcgcccaaagtgtttaattcttccagaaatgccggcctccgggaggaatctaggtttgaaactttccccaacagggcattccccggtgacattttgctccctcgggtgtggagcaagtgtggaggacctggcggcccgaaagtgcccagagtgaccgacaaaggtgggaaacggcagggcagagagtgggccagaagaaggggcagcagacgcgcaaattcacatcattcggggtcaccctgaccccaaacctctgacttctgccccgaactggcgttccgcagggagtccagggtaggccccagaactttggacccaagtcccaggcggggaccggcctgcgggcgcgagggctggtcgaatctgagggggccagtgatctttgcaagaccccatagggacggcgggttgacggggggccgtccctgggttcgccttcccagtccggactcaccgcccgccggagctgccccggagccgccgctcggaacatggtctccgcttccgccgcaacctcggccttacagcagccccgtgcccggccaactggcgccgcctcagccagtcacctaatgctcgcgagacgcgcgaacgagataagacgccctaggccgggagcacgagcccgcggtttccgcctgcccattgggcggctgcgcagccaatagacggcgggaagttaggggctagactgggaagtggggcaaaggtgaggctattccccggggaccttcgagtaagcccgggccgcggagcggcagagacaaagctggccacccgctgatgaccgagctcagactgtactgtctcacagccccgcaatggtcagcactgctagagtgaacttcaaaactgagctgacctcggggtaaggtacgagtggagccttgccaattccaattagatacctttcctatatgcccctatttccccctgtatttccccatggtagcaattgtcacatgggttgtaataacctaagtacttgtctgtgtcacccatctgactgaagatctgtaagggcagaaagtatgcccttttttttttttttttttttgagagagagagagtctccctctgtcaccctggctggagtgcagtggcgcgagctcagctcactgaaagctccgcctcccgggttcactccattcttctgcctcagcctcccgagtagctgggactacaggcgcccgccaccacgcccagctaatttttttgtatttttagtagagacggggtttcacagtgttaggcaggatggtctcgatctcctgacctcgtgatccgcccgcctcggactcccaaagtgctgggattacaggcgtgagccaccgcgcccggccagtatgccctacttttaaattttgtgtctacctgcaacacctagcacaatgcctggtccatactaggcattcaatcagtatgtgttgaatgaataagcaaatgaataaatgactgctaatgagtctggactttaacacgaaatttttaagagggaagtggtatgttcagaaattgtctcaattcccaattcagcaacaacctacctttccaatgttatctagtctatcaacaaatcccgttgactctaccttcaaaagataaccagaatccagcaatatcctccaacacccctttgctcctctgctggtatcaccttcactcaggaccctgtcctctctcgcctggatcattgcaaagcctcctaactggtctttctgtttctgcccatgtttccagaagcctcttctccaaactgatggactgatcatgacctctgctcaaagccctatggtggctccctctcctcccactgccctcttctctcactgttccccagatacataggccttcttgagcacacaagcctgctcctctcagagttttgcactctggctcttccctctgcctgaaatggccttctcttgttacccgcgtggcgtacttcctcacttcattcaggtctctgctcaaaaaacacatttgcagaaaggccggccttagcctctccacctaaaatagcacccatgccactcccagacgccctatcaccttgtttgattttttttcttggcatttatcactgcctaacaggatgcacatgtttgtttattgctgatctcactgcattggagtgtaaattccctgaagcaagagctttgtctgaactaacaagcactctaagggccttgcgcttttgctcttccctctgtctgaaattcccttccccatctgacagccctctttaaaacccagatcaagtgacaattcttttgttctgtttaagacaaggtctcactctgtttcccaggctggagtgcggtggtgccatcacagctcactgcagtctcgaactcctgggatcaagcaatcttcctgcctcagcctcccaagtagctgggactacagtcatgtgccaccatgcccagctatttttttttgtaggggcagggttacccagggctggtctcgaactcctggcctcaagtgatcttcccaccttggcctctcaaagtactgggattacagacatgagccaccacgcctggcccaagtgacatttcttttgtaagct

SEQ ID NO: 1242012 - DNA, 4001 bp, Homo sapiens
ccgctatcttggctcactgcaacctctgcctcccgggttcaagcaatttatacttttaaaaggtacccaagaaaggaaagtttgtgaaacacctggaaaataagagaattagagaaacattaaagaaaaaaaaattaaagtcagaaaaaaatactaacatgaagcaaagaaagctttgactggagacagctgcaaacactaagattcaagattaggaaggaaaaaagtaaggtcagcatcaagagatgggcttcaaggctgactgagaaaagggacattcatggggctgacaaaattttcctatcacagccatattccaacatacaaagcagctccagtgatttagctcttagacgggcatatccaaaatgttactgagtacaaaggacaacatcactaggttagacaagtgcacgacaatcataaaaataactctaaggccgggcacggggactcacgcctgtaatcccaacactttgggaggccgaggcgggtggatcacctgagttctggagtttgagacccgcctagacaatatggtgaaaccctgtctctactaaaaatacaaaaattagctgggcgtggtggcacgcgcctgtaatcccagctactcaggaggctgaggcatgataatcccttgaacccgcctggaggttgcagtgagccgaaaatgcacagtgatcaggccattgcactccagcccggactctgtcgcaaaaaaacaaaacaagccaggtgcggtggctcacgcctgtaatcacagcactttgggaggctgaagcgggcagatcacctgagatacggagttcgagaccagcctgaccaacatggagaagccctgtctctactaaaaatacaaaattagctggacacggtggcgcatgcctgtaaccccagctactagggagtctgaggcaggagaatcgcttgaacccgggaggcggaagtttcggtgagctgagatggcgcctttgcacttcagcctgggcagaagagcaaaaactccgtctcaaacaacaacaacaacaacaaacaaacaaaactctagttcttcaaactagaacctcagcttgcagggaacgtgtggggcctcaggctaagctgtaaagccttaggtaacacttaaaactagtaacttaagttgacctgggaaagcctgctacgacaaaaatatcctggtacttgggtactaacagcagtcagaattcggttcttccttatcttatacgtgttctaaccaaacaggtgtgaaggggtaaggcaggtgaagcagtaagaactggttcacctgagagtaggcactaatttaacgggtggcttttacctttttttttttttttttttgagacggagtcttgctctgtcacccaggctggagagcaatgccgcgatctcggctcactgcaacctccgcctcccgggttcaagcgattctcctgcctcagcctcccgagtagctgggattacaggcacgcggcaccacacccggataattttgtatttttattagagatggggtttctccatattggtcaggctggtctcgaactcacgacctcaggtgttctgcccacctcggcctcccaaagtgctgggattacaggcgtgagccaccgtgccaggcctacctttttaatcaaaacaaacaatacaccatgagaataaaatgcaaaatttctcatttttaagacaaaataaggaacttcaaataaatggcggaccataagctaggaattcactgtcctccatcgttagggctttttcctccgaaggaagtttgggaaatctggatcctaatttcagccaagtggtgcgttcctcgaacttcagtctagaactaaaagaagaggggctgcaatgaaggaagaagtctcgggacgctccacgccacccggcggcggttatcaaatcacaggctgaaaacctggagaaaggtccgcgacgccggggacacacgccgcagaggcgacgcccgcccggcccaacgtccagtctcgtctgtttcccgaggagccaatcagcacgcggccccgaggccggctccccagcgccccctgcggccgggaggaggacggcagccaggaaagatgaagagcgcgtgcagtccccgaagggtacaccctagggttcccccccacgcgaagtttctctccgcaatccgtgccacctatcgagtaggattcctagtgttcgattcctgtgagaaaaggtagactacgctgcctgtcgcaggttagtttgttgtaaaactgttggtcaatgacgttgcccttttaattgcgtcgttagcgaccgagtggcatcgcccctttaaggccggtggcagctgcggttccgggggcggggtccgtcttcagcaggacttgggctggagctgggctgattcattcggggctggaactcgaacgctgacgttggctcctgagccgggcgctgcctcgcgcctgattggcgggtcctcggggccgccctccccagcgcaccacccctgggttccctcccgggtccgcagtggaaacactgccctctcccttcttgacccctagcccttccttccctccctccttccctcctgtcgccgtctcttctggcgccgctgctcccggaggagctcccggcacggcgatgggttctcgggcctccacgttactgcgggacgaagagctcgaggagatcaagaaggagaccggctgtgagttcgggttgggggtgggaacgccgggcgcctcaggctggcctcacaaccaagggcggctgtcgctaaggtctggagctcgggtgcctgtgaggttggggggtcctgggcagcctccaggtttggggaccgagagctggaagacctgttcttccagctgcagcttcctggagcggggctctagctactgtggggctgtccttcccttcaaaatcgggactcttgatcactcgtagagcgtcgacgccccccttttctgcaccctgcccatcaaagtccccgaactcctttcctttctgttgcctcgcaccacccttccctatgaagaggcatcctgaacagtaggtaaagcccgagaagcaaattcaggaactcgagatggattctgtagaaaatccgtttctgggtaaggacctaaaacctctgacaactatgggaaattacaaacaagttcttgtcacaaattgggaaaaccacccagaaagcaagaccgtgtagtaaggctttgggagacatgacccgatgcctggagacctttaaacaatcaggggtctgggattgtgagacttctttcaatctgaacttctagagaaaaaacacggatactgtgaccaccagttttttacttacacgacgatacttgctgtcctaatctcatatatgtattgatttctactatgctggtgtacttttttattcgctattgaaattggatgtgctccaaaaatctccgtgtgaatttgtactaggaactgattttttttttttttttttttgaaacggagtctccctctgtcaaccaggctggagtgcagtggcgtgatctcggcacactgcaacttccgcctcccaggttcaagcagttctcctgcctcagcctcccaggtagctgggagtacaggtgcctgccaccacgcttggctaatttttgtatttttggtagagatggggtttcactatgttggcccggctggcctcgaactcctgacctcaagtgatccacccacctcggcctcccaaagtgctgggattacaggtgtgagccaccgtgccctgcagaactgatttttttttttatagtccagtctcttcctcattagtctgaacaaaggagcaaaaggactcgggattctgaagcgctgtaaaataccatcataactttgaatagtccttgataatgcaatgtatgatacaattgtattgatgcatacaatattttatcttttcagtaaacctttatgattcttattgagttaatgaaggatgtagcacctgagctctgtctcttcatcatacttgtctttga

SEQ ID NO: 1242013 - DNA, 4001 bp, Homo sapiens
aaccccgttctcagaggccaccacccctaccttcacagagagcacccctgtacaccttactagtccatcaaccagaaatggaaggaaggcgtctcctgtgtctttgatgccaactcggagcccaggcaaaatctggaccagagttggggttcataagcattcgctgaataaaaaaaaatgaataaagtgatggcaggattcattgttattccactcaaattaggaaaggctgactgctgacatgggggaagggaggttttgccttggcaactagtcttgcctggcaaggcagccatcacggttggaatgtccaatgcctgcagagaaagcttcagaagaggcttgttcagctggaaggccaaagggccaactctccacccccagcactgtatcagaggacagcggaatggggctctctcttccagacatctgtagtggctgccctgcacattctgatgttgaaacagcgggacatggtgtctgaaaacacctagccacactctaacggatattaattcgattcccctgagaaagcaagtcagagctccctactggggtgtgcctgcctctcacaaatgtttctgtctaatggatttgtgctcccaggaaaggtgagggaggacacatctgccgagggcaaagtgtttgaggagggcagagggagggctctgtctgcagaaaggttgttggccatcacaagttaagatttaatgtgcctcagattgtgtcctccaggggattgagtgtccactttctgtatccttgcaacatctggtcagcccggccagatgtgaaaccacaagttgactcttctagaccaaagcacttaccgcagacaggcccacaaaaggccagccacttgcatccaatgacaagccatgggggaaggagggaaccccactttccaagaagaagccaactgccaggcccctcgtttagcaaacatttcctgattctggggttctatggcttacagagatgaatcaggagtttacctttaaagttgggagcagaaatctaagccaaaaatatcatcaacaaatccaagggaatctgcttttccaacctagggaacctcttattatctatttgctgataaacccccagttttcaaatacttctttctaccaatcagactacactgacttagtcaaagtttgtttccctgccctctttcttctgatcagtaggggaatgccagggagcccacaccaggagctgaaagaatttcagctataggcagagacacttgccatcttagatctcacaactctaagccaagaaacgcgcgtgcccctctgacctgctacgcataccgggttatcatttcccgggttctagggttaggggctatccagcgagatgaaccaccagccctgacctggcctcttgggcgagagaaacacaccgcaaccacctcggagtaggcagcatgcctgtgtgctgcagcttccggtaacagaatcctgcttgctctgcttgtctgggagagtgacacgattcatttcattttgcatttaattctcagcaaacctgcggacaatgaggctgaaaagttaaacaacgtgcacagctagaaagttacgaggcgggactcgagcccataggcactctcacggaacgaatcttaagagaaaaatggcacaagcctccatcccgcccctcattccactccattccactccactccactccactccactccactccactccactccctccccgcgcccggacgccaaagccccactgctcacgtcgcctctggtcgagaagacgccgtagggcaggttgtggatggggaagtcggaatcctcggccaccgggatgaaggacatgctgaagagcacccggcacggctgcgggcctaaggtggcgtgcggagagcaggactgaactcggccgctgtggtcaggcccggccccgcccccctgcccgcccccacggcctgtccgggtgacacagcagggaccccggaggctcctacctgacttttggtctcaccgtgaacaccccgcccccgaaccccgagccctgcccctcccccctaccctgacccccgccagctccaggtcctccacagtctcgcccgcccttccagagccccgccccgcccctggccccgcccccgtgggcctcaggtcctccagtctctcctccctccctgagccccgcccctccccttgccccgaccccgcgagccccaggtcctccacagtctcaccctccctccctgagccccgcccctcccctcgccccgcccctcccctcgccccgccttgcaagccccaggtcatccagtctctccctccctccctgagccccgcccctcccctggcccgggtacccgagagtcccaggccctccagtcttgcctcactccccgagccccgcccctcccctggccccgcccccgtcctgatccccgccctgtccgcgagtccacgtgggggagatctggttccagcccccgctcggggcagctagctggtcctaccgagagcaaaccccagcttagcatttaaggctctgccctgcatgactccagcctcgctcgccccggctgctgccctgctcttcagctcaacagaactcttgtccgcttcctggaaacactttctccccaagagctgctccctgagcttcagaagaacacccagtcgcgtcctttctgccttcataccatgatgctccgtccagctatgacacttccacttgtatgtcagagaaggggacagttaggcctgtttggaaggcttcaattaatgagaattaatattctaaaaaatataactcacctgtttcacatgccagtagtaaaatgacgttgacaagatgctcaaccttggacaagttacttaaactttctctacctcagcttccttctctgtataatgttgatgataatagttcctacttcacaaagttgatataagaatggaatgaattaatatttgtgaagcacctagaatagtgcctggcatatacaggttatgtgtgtgtggaaagagagagaagggagggaaaaagaggaaaggaggggagggggataaaggaaaggaaagataaaagagaaataggagaagagagagagggagaaagaaaagaaggaagacaggaaagaagggaaaggcagactatcttagggtgggttcaaggtgttatctaatcactcatgtgcagtcagctgcagttttttgagaccatgccacagccaggacacttggaacacaccggagagtgtgtcgttgtgttattgttggtgtgaatgattcaggtacacttttaaacagccaggatgccggctgaaatctagaaaagtagacgatagtctgggcaagggttccctgaagatccttgaggaatgtgacacagtgactgctgagttagggaggctgctccgcatttcagcttagggagaagaggctggaagatggcaggataatgtgagctaagtgggcttgaaaccagacggcttgagaggagcgagtacggcaagcagggcccgctgttgagccccccttcctagcccctgagatcactctggtgcctgtccaccaggcgtgaccagtgatcatcacccagtaaggagtgtaatctgggcacagcctcttggctctcatctcctgccctgagtggctctgccaaggactggcttcagttcttttaagtcagccctggggagggaatgaaggtggtctgatttgttctggtaggttcctgaaagaggaaaagaagaggagagtatcccaacttggtggccttataaagaggcattccagggagcacttgatacctgcctaattcaagctagtcctcagctgcaacgcaatgaattatttccacgttctgtagttgccctgccccttcccattaaaaccacgagctttcttattccatgtgcaactctgtcaatacccagcaaaacacctggcacagaataggttctccataaatacatgtcattaatataaaactgttgaccaaaaggaaatgaagcaa

SEQ ID NO: 1242014 - DNA, 4001 bp, Homo sapiens
cacgcgccaccacacccagctaatttttgcatttttagtagagatggggttttgttggccaggcgggtcttgaactcctgacctcataatccgcccgctttggcctcccaaagtcctgggattacaggtatgagccactgcgcccagcctttttttttttttttttttgagacggagtttcactcttgttgcccaggctagagtgcaatggcgcgatctcggctcactgcaatctctgcctctcgaattcaagtgattctcctgtctctgcctcccgaatagctgggattacaggtgcacgcccgctcgctaatttttgtatttttagtagagacagggtttcatcatgttggccaggctgatcttgaactcctgacctcaggtgatctgcctgcctcagcctcccaaagtactgggataacaggcataagccaccgcgcccagcctgacactcttatctttcaggctattgctcttagtatgctttatcaaataccaaatatcagactttcaatgtgtctgggattggcaaactatatcaaattctcaaatccaaggaatgagttttaaataaattcagctaattaaaaatcatgtctagaattctagtgggatcacagaaatcactaaaaagatgacccatacctaatccagatgggcagtaaaaatcataaggcaaggaaaaggtgctactccatttttatgttctcatatgttctcccacgactccccacccatactcatgtaaacaaatatcaactgtattattactgagaacgaaatttaaatagaatgttaatcgacccaagctttacttaccccaaaggtttgaggcagctgtactgcttaatgtttaggttgtttaaatctgtgggaggaaaaaaacaaacttgactttatttaaggaaactctcaaaaggtgtttgtaggggagggtggcgcataagagtcttattcaaggaaagaattggagtaaaagtgctctaaggccaggcgcggtggctcacctctgtaatcccaacactttgggaggccgaggcgggcagatcacgaagtcaagagatcgagaccagcctggctaacacggtgaaacctcgtctctcctaaaaatagaaaaaattagccaggcgtggtggcatgtgcctgtagtcccagctactcgggaggctgaggcaggagaatcgcttgaacttgggaggcggagatcgcgccactgcactccagcctgggcgacagagcgagactccgtctcaaaaaaaaaacaaaaaacaaaccaaaaaaacgctctaaagacttccaaagctaatattccaaagagggaactggttctcaagagcaagaagctacaagatttgtcctctgggccttcaaaagcaaaatagttcaagtatgaatacaaacttcataaagtatgtatgttcttttagggtaagcctttcagatttgtacttgaatactgctaatttattcaccacaaataaaaccacaaagaactttggctgcgggcgactaaccctggaaataaccaaccagaatggggtttcgctgccctgggaggtgagcccggggaacagacgaagatgcagactgaaaacaactgcgttttccagtccgtcctcaaggcacatcacagcttgcttaccaaggttctggcagatttgctcccttccgaagcaccttatacctccagaagtgagggaaattatgggccgtgagaagtaaacgggcttcggtctagcaaagagtacagatcaccgcacagggggaggacacctcgctggccacccagctcggccgccccgctccctcctcccgggcgtccggggcgactcacccgccaagggctatgtcaatccagctcaggccgaaccccgccggcgagacactgagaagcccaggagaggtggcctctggtccactacaccgtggaactccagaccactccagttctccaatgtaaccgagcgccttcctctaaaatccgacaaccacctgacttccgcttccggcgggctaaagttgagggtgcctgtcaagtctcgcgataactaaggctctccgtgtggatcgctttgcaacagatcgcttcttcaaatgctggcacaacgcccagagctcgatgaggtgtgggcaagtagctgtctaaaggtggatgatgccctccatgcactttcagcctgcctggtggctgggcagtcgaaaacgtcgccgtctattaagctcctttgattgggagcaggtgacgggtagagacggaagttctgggaatcaccggagaagggagggaagggctccttccggccgcctgctcccggagtcttcgtggggaacgtgaggtgagagcaggcggtgaagagtagacacgactgatgacttcagggatgctacacctttctctcctgcctgggcaagcctcggtagtaagatttccgtagtccgttttgtatgtggttttgcagaaacataccccctctctgctccagcttcagtcgtcagtatccagctacttccaagagtcttgcccatgtcttgtgggatgttcagcaaatgtataaacacttaatatcccgacaaagcttggcctcttccctcccaaattacttcccaggctatgcacccgtttttgttaatacaaccaacttggaaactttgatgtcagatttgatgccctttcttgcctttccatgctccaatcacttgccaagtcctgtcgattgtacccctacagtaattcttgcatcttcttacccactgcccccacctaatcaacgttctcattaccatcccctgcacggtgtcagtgcagtacctttctcattgatgtcctgcctctagcatcactctgctactagcctatcttacatatacctgctataggtgtagccatcttcaagcaccaccgtgatccaaaatagctgatccaatggctctctgttgcctgtagattaaaggtcaagtttattaacttggattcaaaactttttttattttctgctgttccccttccattctccctcagtcagtggtaaaccagaccctgtgaagtacgtcatgcataaattattacatttttatagattgctcatgtcccttgcatgaaatacctgtctctccccctcatctccaaatgttgaaattctttccattatttaaagctttagaaagtgacatctctacctagaaataatttttctttctattgagagtccatcatatttctggaatttcatgtatttagttattaccactttctaacttcgaactaaaattatttacttgcaagtctttccccctattaaactgtaaacaggcctttatctaatgcatttctacattctggagtgtataacattgtgctttttttgtttgtttgtttgtttgtttctttgacacagggtctcattctgttgcccaggctggagtgcagtgacgtggtcatggcatactgcagcctcgacttcctgggctcaggcgatcctctcagctcagcctccggagagctgggactacaggtgcacaccaccaccctgctaattttttgtattttttgtagagatggaattttgcagtattgcccagtctggtctcgaactctgggctcaagcagtccacccacctcagcctcccaaagggctgggattacaggcctgagccgtggagcccagccccacattgtgctttttccatgacgttagcactgaataaatgtttgtggaatgaatgatagaactatgaatattccaagtaatgttttagaaacattaacctagcaaaagtatataggatagtatggatgagggaataggatagtcttggtgttgggtagtaaaggtaagaggtgtaacaaccaaggttacaataattgaataaaaggccgggtgcggtggctcacgcctgtaatcccagcactttgggaggtcgaggcgggtggatcatgaggtcaggagatcaagaccatcctggctaacacggtgaaaccctgtctctactaagtatacata

SEQ ID NO: 1242015 - DNA, 4001 bp, Homo sapiens
ggcggcatcttgatttgcaagctggtttcctaacttggcagcttcttgaccttggaagagacgagtgattctggagtctacagctctgttgcaattttctgattatggcagaggcagtggctcccttgtcagtcctggtctgtggtaaaatttttgtggaagcttattttgaaaatgatttcttaagttcttccaagtgaactatatatatactccttaataaattcctttttgcctagactaaccagaggagattacgttatccacaactaagaaccttgaccaatatatcatataagctaatagtatacagttatttaagagaatgagggtggtctttatgcatgatcattggaagttggtgagattgtaaatagtaaaaaaccggattgtagaatagtatgctcagaatattctctttttttgttaaaaaaaaaaaaaaatcaatgcaggccaggcgcagtggctcacgcctgtaatcccagcactttgggaagccgaggcaggcagatcatgaggtcaggagatggaggccaacatggtgaaaccccgtctctactaaaaatacaaaaattagctgggtgtggtcgcacgagcctgtaatcccagctactcagagaggctgaggcaggagaattgcttgaacccgggaggcggagattgcagtgagccgagattgcgccactgcactccagcctggcaagagagccagactctgtctcaaaaaaaaaaaaaaaaaaaaatcaatgcatatgtaaaacaagtcttaaagaacatttgttatctgtggaagatagaattatgaaggcgttttacaatattatagatatttttgcttagatttttatgatacttcttgtgtatttattgcattgtcaaaaaataaaaataaacccttaaaaagacaaaactaacaaccacagcccaaaacaaacaaacaagaagtaaaatcacgccattccaatggtggccctcaacataatgaagactgaatttccttacagttgaatgagaaaggaacttgcgttgaatataaattaggagaaaagtaaaaattttctcctgcacaccagtctgaggattcatacacccaaagttaatttgttgatattttaatctatatataattatgaactgtgtttattatgagactattaaaaaaactgctttccatcaacatgtaggtgttttctttgaatgggattacaaatacaccagggattgacaacgttcatatttacttagcaaataatgatctaatccctgggtcaatagtgaagctgaggaaggagaggactgtgtttacaggtgatggaaggttgttaggcaggactcacagttggattctagatttcagggtagggactacttactgacttttcagtcaggcggatcccaaagaactgctgcctggacgggaatgggaatatggtctggctgggaggacagaaagctacagatgaaagaaaatgtgatatgggttgcagactcagggccttgagcactgttctttctcatcttcgtggtgggggattatggggtggaaatgcactctcccagtcggatcacatcccactactcaccagcgttatatcccgtcgcggcttcacatatattacttacctggcccgggtggcattttactttgcatccttgattgggagtctcaggggctacgaacaaacgttttacccccgggtagcaggcgggtgaggagcgagtattcgcggagcgggataagtggggatgtcgctgcgccctcgtcccttcatctccgggggacggccactctcagggttcccgaggagccggctccgtgcacctaggccctaggtcggctcccaagcccgggcccgccgctacaccagccgtttcttacccgcagctacaaatctgacacagacaccagctcctcatactcttggctcccatgctttcctccaccgcgcctcagcacttgcagcttctccactcccacagcgcccgccgtagtcaaggcaacagagggatgcccggtgacagactcggcgccggcttccggcggcgtcagagacgtgcgggtgaaaggtcgagcgacagccggccccgccccctggcgcgcgggcgtgtcggacccgcagagctctcggactttcggaagctctcggtgtgggtgcgacccgagagaaggagcggggctggtggggctgctgcagccggtgagtgtgggctggcgctgggggctggaacctcctaggccagcctttgggcggtgccggaggaacccgctcgctgcggctctgaggcgggaacaggggctggggccgagcgcgggctgggagcttcggtccccggagtgccgcttcccgtctggggccggggcggtcgcctgtctgtgtggacccaggatcctcaaagagaacgaatctgggaccctgcagaaatgaagggcatgtagtgtagaggtttttcctttttatttagaaaggaatgaaagaccggcagtgcacctgcttggataataagcacgtgacccaaaactttgttcgggctccatgggcaggaataaagctgggtatttgacctcgcgcgaggacgagcgagaatgtcagaatgagggacttgggggaagactgaagagagaaagggagcatcttcttcagcattttctctccctcctggatgcaacccttcctgtacgtggtcattggcctggagatgtttactggagtactcctccaccggcagggttactggtgtcactgtgcacccagtcccctcgagctgcgtgattcatcgcagcctttggatccggaaggatgagcaaactccttaagtgtaatcgtggtaggatactgactttagtgctcgaactggacttaggccttggtggtctatctcatcaataaacattcactgggttcttggtttaaggggtttgagaagcttgccacctcccagcgtttattattatttttttcttttgccccgacctttagcctctgggccatttgtaatacatatttaatttttagtcacaggaaataagtaatcatggtgctcaacagtttggataagatgattcaactccagaaaaacactgccaacatcaggaatatttgtgttttggctcatgttgaccatggtaagaatactttttaaatggcttattttgataaataagggagatgtgtctctgtatgtctcagtggagtgaagctgtggacagctgagagtgatgtttgctaagaagcaagtcttctttctttaaaagttttgtgtgatgttagggaagcctgctttgctataaagcatttgaaatgaacacggttacctagtgagtagcattcttctatatattatgtcatgttgttttttaaagcagaacttgaattttttgtttttgaaatggctttacatataaaatgtctgtagtcttgacataatgtccttagagtctgtggtatgtgatcctatttaattcatcagatatttatcaaacgtctgttaagttcaagatattttgcttagtatgtctgaaggtggagatttatgagtagggcactagcccaggggaggttttaacggggagcagagcaaaatgagacaaacaagagaaaaaagtagactctaaggttgggagaactagaggattaggaagtgaggggttaggaaaagacctcacaacataattagtattagagatgacacttgaagggggctcaagatgacaaatggagataatcattacaggtgggaatgtgtcatcaaggggagagggaaatatatgtggtcaaagcccagtatatgggaaaggcagagatagctaacccatggtatgttcttctgacagatactgctgtaactccatagcgctccttcatgctaagcctcctcttgatttcaaacctcttggtagtttaggtaaccacagcaaagtgattgggatgggcatatgaaataaaacatatttaccatcctgaagatgaaggaccagttggcgaggtgaagaagcaggctga

SEQ ID NO: 1242016 - DNA, 4001 bp, Homo sapiens
ctgtcctcttattagccctgccataaatgaggcatcatttgctataattataaaaataccttacaaagacaaaacatagcattctagctaagggtactcagctgggaggcctactctcttttttcaaaaataaaaaaggtgattaaaaagtgttagtcaagcactaaaggcatattggcaggaagcaaaaacgttttcctcaaaatattgaaaattaaaacccaaaagattatccttttcctccgtctgaaattcagccgcacctccttaaaatcatcttggaaaacactggacctaatgacctcaacaccctttcaaaccatgagtttctagacccctgcattccttctctaaagtgaaatagccctagtttcttcaagcgttgctcaaaaggttccaagtcctctcatccatcatccccattactctccatggataagtgctgtttgcttccgtcacagcctgagcagcaccaaagaaaactgagctataactgagctggacctatccttccattagtgccacatcgcgcctgccttaaggctcacctgatgagagccacagcctcttgacccaaggggcatcgagacacatccgctccagcccatccctgatcagtcggggcttttggatggactgcatgacatttatacaaggaggcagtttggatcagtataaggaacaactttctgacaattaataagaatccaagaagaggccgggcgcagtggctcaggcctgtaatcccagtactttgggaggctgaggcgagtggatcacttgaggtcagaagttcgagaccagcctggccaacacggtgaaaccccatctctactaaaaattagctgggtgtggtggcacacgcctgtaatcccaggtacttgggaggctggggcaggagaatcgcttgaacccagtaggcggaggttgcagtgagccgagatcgtgccactgcactccagcctgtgtaacagagcaagactccatctcaaaaaaaaaaaaaaaaaaatccaagaacagtagctcaaaaacagactcagattgtccctggggaagtccccaagcagaatctgccagggtggtgattccaactgccaaactttcaccagaagctacagaacaggccccccactctgaaatccatacttttctagcacaacacgcaaagacagaggaggaacaagccagggtgcacttcctggaggagcccgggagtcctgcagatttcatgcctaggctctgccctgggatggtccaatgcatcagatttcctgccataaataatttcattctcacgactgtcttgtgaagtaggtaagctgtttccattttgcaaatgatgaaaccgactctcaaagaggttaaataacttaccccctctgccagtcagctggcagagccaggattccaagtcagctccatctgacgtcaaagtccatattcatcctattatgctgcacaggacacaggaagaaatgagaaaagctgaacgtcatcatctgatgtcaatcttgaaggctaggatgagtggttttgattttacacggaagatcagaaaaaggccccaacttttttgatgagagaagtttttttaatatgtataaacatttgagatccattaataattaacaaatgagaataacaaaaggaaataaatgaagtaacaaataaggagacataagtggaagctgaagtccttgcaaaggcacgggagcaacctaggaaagggggttcctggcagccttcagccatgtcccctcaaagaatataaaccagcctctgtccagagaagcatccagaaagagcccgccaggagccacggggacaagggcacctgctctcacccctgctccatggaaagtgcagtcacagtttcttaaaggggaaaggtggaaagcttcattacttacctcgtaacagcagactgccaccacgaacgataaccacttgccacaggggaattcacaattccaggatgtttttcatttgcttgcggagttatcggaagtgactgtgatgggttcaaccaccttatcaataattaactcatacccagggcttatcaaacagcttctgactcctttagcttccatttaaacacacaaacacacaaacacgcacggccttcacaaatagaacttctccaagaaagtggcaaaggaactagtgatagcattctccacggtcacagctaagcatagaggggaggtgacacatttgtcaaagctgtgaagagggtccctgatagcatcggctgctgcacagtccacatgcttcaagccacaagacatgctctggaaatgtgcgatgtgtttgggaaagaactcgtgtctgcttccaaataccggattaaagagcgagagcgtggggctccaggaacacctgagtgctttttttgaaaccatgcaaaatcacagccaacacaattgagcccacagcagtaggaaaacattttgaaacgttatttaaagtgctattatatataacgaatggtccatagtgagatgtcttggagcttatgaatatttattatagtacattcttgaaaacaacaaaaaaaattaagtccaatacaaatgagaaacagatttataagagtcagtcatatgtttacattatgcaaattgtagttaaagacctataaccagaatattgttaaatgcctaaaagggggtggtggggcagctgatatgtgagcattttcttaaaatgggcaaacaatattcttagagtttttgacaatctgtgcactgaagggttcatgtgggtacatcttggtactttcagcgacttggtggtggagtcacaaatccaaggcaatatcaaaggcctgaggttctcataggtcccctgttcacaacagccaaagctccaccggacagaggtaggaagcaccctgaacctcgacagaaagctctcacacacatctcagccacctccagccctgaagcaatgaggaggctttgcctgcatgctgaaaactcccacacagctggctaagcacacttgagtttcacgtttagcaaacacagaggccttgaggacgtgcagaatagcttgccccaaagatgtcaccttgggctttgtgacacgcactatgcggggcatcctctgagtacaggtcccagacagacatgcaggtgacaggcaaaggtctatgtctaaggaagctggaagctgaaggaggcccccatttgcagatatagtaaaagatccataaccccaaactttcaccagataccacatcatcgaaggagggcggaccaatagcattagtccgttttcatgctgctgataaagacatacccaagactgactaatttataaagaaaaagaggtttaatggactcacagttccacatggcttgggaggcctcacaatcatggtaaaaggcaaaaggcctgtcttatatggcagcaggcaagagagaatgagagccaaccaaaagcggaaaccccttacaaaaccatcagatcagccaggcagagtggctcacgcctgtaatcccagcactttgggaggccaaggcagtcaggatcatttgagatcaggagttcaagaccagcctgaccaacatggtgaaaccccatctctactaaaaatacaaaaaaaattagccaggcgtagtggcacacccatagtcccagctactcgggaggctgaggcaggagagtcgcttgggcctgggaggcagaggttgcagtgagctgagatcacaccattgcactccagcctgggtgacagagcaagactatgtcaaaaaaaaaaaaaaaaaaaaaaaaaggctgggcgcgcggtggctcacgcctgtaatcccaggacttcaggagtcaaggcagttggatcatttgaggtcaggagttcaagaccaggttggtcaacatagtgaaaccccatctctactacaaacacaaaaattagccaggcggttgtgccacatgcctgtaatcccagctacttgggaggctaaggcaggagaatcgcttgagaccagaaggtg

SEQ ID NO: 1242017 - DNA, 4001 bp, Homo sapiens
taaggagcaagtgacaaggtactaggctcagaagcgctggttgatgtctgcgttgcagacgggggccagcttgcaagggccccaaatgccacacccaggtattgccatgcctaggtagtggccacagagagctgctagagtttgtaaacagaggattgaggccagtgggtagagtgggaagaagacaggagcatttcaacccagagaacatcaaggagaccagcagagtgaggaacgatgtggcctgagacaaggcagggaatggtgaggtgagcgtgggaccatacttcccctttctccattttctcagaccactggcatctaatcctacagacacagaagaaaacacctggactcaaagtcacacacaactgacagcaaagctcaatacatagatggctcctaactctgccttttcctggtctggtttctgctgttgcactgaaaatgctaccaggagagcaagccctgaagcccaacctgccacagctgatcaaacaccaaagcactgtgtgtacgcttggaagcagagggaggcagcagtgaacagctgacacacacacccagacttccaggcgggcctcagtaacaggacaggtttggttcatttcctgcaaaaacaggatttcccaggcattaaaggaaatgtccttgcattcctcttagccctgtccaccaggatggacagggatcaaggacctgggacatccttcctaatttaccagacactttatccctgaacgtgagcaacctacaaaaggctctccaagatccctcatgcccctgtgaatgttcatctagcgcaacttaggcaggagcctaggaaagccgtctgtgtcccccaccaacagaaaataagggaggccaccaagggtcgcctagaatcctgaagctcagctccaacccctggtgcaaagcacccctccagcgtaattctggaggcaattctactaccccccacactagaaactgcttctttcagtagcaaaaaaaaaaaaaagaagaagaagaagaagaagaaaaagtaggcggggcgtgagggagctgcagatggtagaagggagagggagtagcgagattaaagttagacaggcctgggttcaagtcctacctccaccactgagtttaccttagatgagccattttgcctctctgaaaatgttttcctcatctgtgaaatgattataaaaataaattatgggaaacgctgtcagaattcagagcgctattgttagtgttcagcattagcagaaagccaacaaatgggaaccacatatttattttatatatatagttaaagagaggaaagaaaattcctaaaacatgtaccaggaaaatccagacgagcacaccccggccccccacccactctcccgggcagggcaggaggcacacggctggctggggcgcaccagggcacctgtgcgtgcaggtggggcgggcgcgcggcgacagcaggttggcgatgccgccctgtcggccggcgggggaaggaagagggcgggagggcccacctgaagacgcgcagcagcaggcaggcgatgaggagggtggtaaaggcgaacgccacgatcacggctgccttgagggtgggtaggtcgcggaggaggatggaaatgcgggtcaccaaggcgtcgccactgctgttggagctggagctgccgctgccgcccgccgccccagacccaaaccgggtggtgttcccgggccccgggccgggcggtggccgcgactcgcgctcgggttcgggccacggcgcggagacggactcggctctgctggcgcgggcggcgggagcggccaggagcgcgagcagcagcagcggcaggagcggggcgggcagcggcacggcgcgcatagtgcggtgggtcggcacaggatcgggcagggcgcgcgcggctgagctccaggatccgcaccagcacggaggcctgcaccgggggatcctgcggcggaggcggctgcgcggtgcttggcaggaagctgcggcgcccggaagagcccgcgccaccgccgccgccaccaccaacacgttgcaaggagtcattcgacgggccgcggccccacgtgggcggggcaggccacccggcctgggtcccggctgcgctccgctcgcccgcgaccccaattcctcgggacttgagaccccgtggtgaagcagcaactgccacgatgacacttgggctggccctgtgttacacgtttcacgtgttttatttatttcatttaattctacaaccccctttgaagacaggtattctgttacccacatttgatagctgacttggcacccaaagagccagctcacagcaacccacattgtgtcagactaagaatcaaaaactatgggacctagaagtagactcccatcttgcagatcaaaaactgaagccgacagtgaagtggttgcctgatgtcctatgcaacgcataatttcagtatctcccctaatttccctctttctcaaaaggggtttcttatttcatgcgcctctgcttacgaaccggactgggatgtgaatctctgcctctcatacctttgttgtggaacaccagttggtgtggttaatgcccccctgcctggctgaagtttctccggggaataattggcttgctgcctctggtttgtaagctaaatgatgcttaggtggagaaagacaattaaggaagttctagtgggaggcccaaaggtggaaactgatggggacacagagcccctacctgaagtactaggagccattcccagggcttcagggttccccttttacactgcagatgggtcctggcaggaagcttttcggtggtgggtaaacagttaaatacacatgacatgacaaggtcccagggaccttaaacagcccatttctggtcctgctggaaaaagagacaaatatagtacagtgtattagttgtctactgcagcataacaaattgccctaaaacctagctgcttaaaacaacatgcatttagtatctcacagtctgtgggtcaggaaactgaccataggttacctgggttctctgcttcagagcctctcccaaaggtgcaatcaaggtgtcagctggggctggggtctcctctgaaggctcaactggggaaggatctgcttccaagctcaatcagcattttttggccagattcagccctgcactggctgttggactggagcctcagtttccttggggcagttggccagaggttgccctcagttccttggcatggggcccttccaacatagcaacttgcttcatcaaagtatgcaagtcaagatagcaatagaaagagtcacctaccaagacagaagtcactgtcttatgaaacctcatcacagaagtgacattctcacacctttgtcatattctatcagttagaagcaagtcacaggttttatccacactcaaggagaaggaattacacaacagtatgaatatcaggaagcagggatcattggggccatcctagaagctgcctgccacctacagtgtaattcattttgatctggggggatggacaacaatcagattatcagaagtcatcatccagaaggtacttctgaaatgcatgttaaatatgcattccatgttaaatatgccccagtgataagagatatggatagatcacatgatttaggtctcttctaactctgaaatatcaccttctggtatgttaaaaatgttgcattagtagagagtcaacatcatcatatcagtatgatagaatatataaaagtaagtttttaaagaaacacctctgattccatgattttggagaactgttctccaaggcataaacctcagctatcacagcctcttatttttgtacttatcagaaattcctgcacgatacagcaaagaggtcctgggctttgagcctcttagccaggatgaaaggtttgaccactgaatggccttggccaagtatttaaccactgaataccaggtttttaatatctgaaataggctgggcgtggtggctacgcctgtaatcccagcactttggga

SEQ ID NO: 1242018 - DNA, 4001 bp, Homo sapiens
aaaaaaaaaaaagaataggttagagctgttgaagagaataacactgcaaaagcaaactgaattaactgttttacacatttatttaactctttaaactaaaatgtaggggatgatgtgcatttttcacataaataagcttttctactgtgtccaattaatgttttcccctttaggtttattattaaaaggcagttctctctccacacccttgggaacccaaggctaaaccaggaagggcgggctcagggaggagccaggaagtggagctaattcaccagtctgccacctgtaggctggttccagcagacttaaacctcagtgcccgctagacagacatgaaaacaatgcatattaaataatggtaaaaactgagcaatagatgtgtgaaaactatatagagaggggcatttaaatcatggctcccgtgtgcttgcctccaacctcctctcttttctttgaatactcccagctatgaccacacagtctgttgttcctattcagctctccaaggctcacccttgatctaaaatacgcttcgaaaattaatactcccattaggatgaacaaccacacctgtatcgatcgaggtgttccagaggcaattttgctcagatcttatggtaaaagccatgcaatgaacttaaaaaacaaagaccattatgaaataaacaaataagcaaagctggacgaatttttcaaattttaaaactcaagaacaaatagcaaacattagttttaaaggattggtttggatttctgtagatggaagtaaaacatactgagtttacaagcctatgcgatgtatttcagcacgatccaccaaatgcagttacagatgtcaagagttctcagaacaagtgcctctcttcataaatatctgctctgcatatatatctctcccattcccataacgtccattctttgttaatataggaaaaaaaccgactttcatcaaaatgctacaaaacgccaaaaattaactcttggggacagtcactttaatcgagacgtctttcttctatggagatttgttcaccactggcttctctgatttggtggttaagagtctgaaaatcggtcatccttaaggtctggagctcagaaagcacgccgcccccccttgcctgccccctgccccaggacgccggatgcgggtcgcctgcccagtcccgtcgcccacaaaccacgccgttctgggcggacgcgggaaaccagaagtccccgaagccaagtcagcgagcgaccacaggggccgcccggccgatccccgatatccgggctgacccaaaacccgacgggaggcgcccctcccccgcccccccaccccaccccccacccccaccgcccccggtcagggccgccgcgagggtgagaggcgcgcccacatgctgctccgctccgggttcggctcccacctcctcgcctcggccgcggccgctcggatggcgaggtcgtgtccccggcgcgcgcggtccccggcgctccctccggccgctgcgggctcggaggacggcgggcgcctggctgctgtttcctccaagaaaagtaactccgggaatcagcgcaataggagcgggaacgcgatgctccgagagcggcgagccgggccctggagttattctgctcggagtttcgaactgcgccccgcgctgcagctactcggccccggcgttggccgccggaacttgccgcccgcggtggcgtcccggcggccgcagcgcctagcccccccggcccgcgcagtccccggagcccgtccccgcctggtcgcggacactcaccgagaagcctgcccagaaggggcaggagtggcggacgcgggccgaggtggtgagcgccagcgcggcgaagctgactgccacgatgaggcatccgagcgccatctgcgtggccccgagcgccagcacgatgcgggagcggcccgggcactcgcgcaggcgggacaggctgcggggcagcgcggcgggacgcggcgctcgggggccgccggccggaggcatcgcgccgggcgcccgcacgcctcgcccgctcccgcccggcccggcgcgcgccgccgcctctcctcacagagggtccgaggcaagttgcgccgggtgcagggacggcctcccagccggctgccagggctgcggcggccgcgcgccgggagcgggccgggccgggcggggagccgggcgcccgcagcccccgccggtgcccgcgcccatgccgccgccgccgcgccgcccgcccgccggccgcgccgcgctgcgccctcccccgcccgccccgcgcgctccccggcccgagcgcgggcgcgagccgccgccgctgctgccgtaccgggcgcgagccgctgccgtccccgggcgcgagccccgccgccgtgcgctgggccccagctggggcgggagcgggagccgggacccgggagccgggagaggggcggggaaggcgcaggtgcggtcctggcgtcccagcctccgcgctcacgcctcgcgccctggcggctgcaggtctgcggaaggagagcgggggcggcagcgcatcaagggcaacggcatcagcctccgcggcggagccctgggtcggctgcgcggaggggcccgatagcggcagcgggccagccgagccttcagagcctggggacggctcgggatgggcgcgcggggcgctgaggacggggagacgggctgggagcagacaggagggaaattccgagcgctgggccgcaggtgtggcgaacaggagcctcttgaatgcaaaaatccaagatccaagatgctgcttttctgcagttcgagaatctcccaagccatccgctgagagaactcagctctggaggacattccgagaacattgccaggacacacacgatgtcccttacccacctttggtttgcatgcttttgatacaagttaaaagtttgggctttaaaaaaaaattgcacaaaacgaatttaaatgcgcaatatcattaataaccgattaaaccatctccactccctcttgccaacatagagtttaaaatatctaagtactggctcccttggaataccgggaaatcctgcaagttttgattgccataattcctttgtggccctgttgatgagccaactttaagactctgcttgtgttgaaaagggctgcattgacagattaagagatcaccagcgttagggagtctgaagggaccagacgtgaaaaggcaaagttcagagtaataaagggaaacggccggtcatttcctgagaccattcttccgtgtctttctagcagaccttactgttggatgagaaacgctagagagtgtagtcccaaaatatctcggttgctggtgcttgaaatttcaccgttagagatattgattcctttggggcttgacgatcctctattaaaatgcaaattccccttgaaggggctatagctcaagcctttatcagccaacactttagcagggatgggatttattttccaatttaacgagatggccaagggatgaacagggggtagggaattccacagatagagtgactgatctcaaaatgctggcccgtggccaaacgctgccttctcccccagttcttatctttaacaggactaagcctctggccggcattgtttaaagcactccagtacaaattccaatttcctggagacattttctgcctagaagttcgcagtgcagcactttttaagagcttgaaacaatacaaggcatgaccctggactggcaggaagttatgttcgcatttgatcatctcccccattcattcattcattcattcatccgttcattcattcctccaacaaaagttcataaagagctctctaatcataaggctttttttttttttacgttcttagggtacatcagtgaacaaaacagacaaaaatccctgcctttaagggattcagagagaaacacacaatagcctaacaaattagtgaattacagtttattgacattgtatactattcaaaaaatagtatacacccactatgtgccaggcactgaagatc

SEQ ID NO: 1242019 - DNA, 4001 bp, Homo sapiens
atcaatttaaacaaaactttggtttttatggttctataattagaaaataaaattagtaattcataagagttacagctaaaaaatgaaaattgctagattgactttcatgtggttagtcatatttaacaaacttgagtcctctctgcctgtgtctgcctctcactccaaactccctttcatacccctaccccttctacacacagctgctcttcttgaagtgagtgctttatattgtggaggccaccaagtccaaataatataactttattttgctataatttttataacttctatcaaattcaagtttttggctgcaccttacaaacttgaaaatctaagaaatgccagtcttttaaacttcagccacatgtaggtctacgtaaaacatttttttaatctttaaggactattttgtaaattttcaccaattattagacatctttttaatacaaatgttatatacatagtattgttacaaagatcagcaaagggcacaaaagcatgggataatattttgagttctctttaaagaaaagaaatatctctccttaccagaaatgctaacactgttaagactttctaatgacaggtattttttgaaaagaacaacaacaaaacccatcctattccaaactatatagtttgtagagataacaaagccctaatattaactctgagcttatactgactttactcatcagacatacatcactgagtgaactaaaggccacttagccatgtaaaacgaaaaagcaaaggaaaagccggttattagctcaatacggatccttcgtaaaatgggcaatatgctaattagtctgctctgctttaattaaaagaaccattagctaaatcacatatgtaaactttaatttcacagtatttgagaaagatacaaaaagaccttttgtttattaaaacactttaaaactttcctataatctgttgaacagaccaatttttccagatcctatataaacaaatggtaacctacactctgttcaattatcacatatattatattagtacagtttaataagatttgactatatttgaagtattaactaagtcagatatgcaattattacatttaggaggcctacttcaattttaaaatactagtttaaccttgtatgttgtcttcaaaatcccttatccttcagttttctatatggatgtttaatagaacactacactgactttgcggttgaattatgatgctttatctgaactgcacagaactagtcaatggattaaataattaagagattgcacaatttgaggtaggattttcagaaatgctttataaaaagattttggcacaccaattccttaaactatgtcaaaaatctcacttagttaaattctgacaatctttgtcaaattcagaaacatgaattcaattaaaaatatgcagcttatttaaaatacatttgtcttaacagctttaatttaaaaaatacctcctgcccccacatacagttaatgcttctggctaatgcacattctcttccctgtattctcatttctatcacattttttccccattaaagtgagcacattgtacttggtttcttttcttcctactcattgttcagttcagcattttaataatcttttcagtactgctgttcaaagaaaacaggctatatgaagctaaagaaaattctctaagttcaatggttttcaaagtgagataattttcctagacctatttattaaaaatccatgcaaagcaagcaccacagccaactggtaaacagctacagaaaattggaagcttaaaaataaagccgttaaaaaacacttcactacacaccttctctgtgaagccctttgtttccactgaaaaccatactggaatccttgtataaaggaagttgccttctggctatcaatagctatactatcagtaactgagggatccagatgtctgcagcggttaaaacaaatgttcagcgttgggtgctgatcccgcttccctccgtgtaaggtttttcacaaaggcagcagagtaagagcgcacatagcaacagcactcacagctgattggacagagggtgtgctcaacctcccctgctcgctaggtccactacagcttcctgtctacttggcagcactgtcatgttttctttgctcgtcttacaaactcagctgtgtttaggcaacttgaaaggaaagaacagtagactgataatggcaaagtattctagcgtttgcccctgaaatgtgtttcttcagttgcttttaaaacagagaaattcgtaagacaaaaatttatttcagttagtgatgcacataaactgaagacaaagaagggttgtggaaggaatcagttacttcacatctaaattaaatcaggttctaccaagtgaaaccctctgaaaatgtataaatacaaaaatttacaacaatcagaataaagcattgtcaaccttcatatacctggaactttatataaagtattttacaacaaacttcacaaattcctagaaaagcacaacctgttacatatttaaaatgggataggtcctgaaatggtctctcctcaaatgcatgcagtaccttttaagaggactaaagaaacaggttaccagactgactagaaaaagattcagaaaggaaaaattatcagttacttagtaatctctgacaatacaagatttaactaggtatttgtggtaaaatgtctctggatacatagaacaatgacgtttagcttaaattcatttactttttgctatcataaaattacccagagatatagaagtatagactttttttcaggtttcaagtactgggcttcagtttaccagttcatactgtctccacaaactttaacagcaaaaatccctccccagcttacaaagctgtttgggagaatcaatgaaggtagtaggggatgaacagatgtgatgaattataaaaatttctcattttagaaatatttcccctgaacgtcgcatcaactaggatggtggttcaaacgtttaaagcaatggaactctttatttgcattcttcctataaaatgcattatcagtggtggctctaggatttccatacaggaaaggtttgtgggagtaggctgaggccgcagcagaagcatgccgtttattactcagatctttgtttatcttgagtgtcttggggttagggagtggagtctgatggaagtgttggagttactaaagtgccccatgagcactatgaggctatttttaagtgagaagccacaaatagcatgcaatttcatatcagacccagaatccacaagatttctacccctgaagaagcttctaggattcctggagttctatagtacagaagaaatacaacccggaagaggcttattgctttaaagaaatctcattaaagaatctgatcaccggttccatacttagccagagggagagctgctaagccccctgagaaataacaagacgtgcttggaaacacaataagcctgaggtaggtgactcagagaaagaatggcatggtagagacagtaaggaatttggaggtaggccaagctgtgttcaaaacatgaatctgccatttactaacagcgagaccacatataagattattataccattatgagcttcagtttcctcatctgtacaacttcctaatccaagactagtcacaggcccactgtactttttcgttaacacttactgcacagaatgtagaaagactgtttacaaaatgactggtttaatgacagtctcctccaacacactgtaagtgcttaaaacgtaggtactatgtctacttaattgtttacctagcaccatgccccatttatatttttatacaatatttgatttgatttcacaatcatgggaggtgactagtgcaagtagaacatcttatttgaccatcttcattgtttaaataaggaagttagatctaaaatttacaagtcacaactagaagttaaaggaaatcaaatttaaaaattttttggattaataaatttatatttcaaaattaacc

SEQ ID NO: 1242020 - DNA, 4001 bp, Homo sapiens
ggtgaaaacttctttggaaatcttgatgaataaatttgtttcccctaaaaatctatatcagtacgtaactaaacattttattgtgtttaacactagttttggctgcaaatactatttttaaaactgcttatgactgtaaagcaacttttcacaacaattcaaaataaatagtgactttgattttatttgcttgtttattctgagaatcaattactaaccttggtgccatttttccaaagtgattgatgtaatctaaaaatctaaacttggcattctacacaaggaacctgctcaggagcaatacacttactaatacttgatacatacatagctgctgcctgattgtatgtaatagccaacacctaaaactaatttaaatcactaaattaagtatggttttctccaattccttctggtgcatttcaatagacctattttacccagaaaatttgtctaatcactttgaaaaaatatatggaaaaacaaccagtttaatatatataaattttaaaataagcatctaattcgtaggataaattaacatttccaatcctaaagacttggatttggaaggaaatctgtcatctagtccagccccctaccaaataaaataatccccacttcacaatgttccttggaatcaaactcatatctgactgaaaagctctcactactaaccactactatattaacatcttctaaaattggttcttgccattaatcagaagactgataaagaattaccttgaagtccttgaaaagcagtgtatatattattcttataaatcctgaaaatacaggtttagaaaagaagtgacatttacttatcaccagggatttcagtggcccaaactgtccatatgctggtatattgaatactggagtactctgcaaacttttggagtttgcttaaagcacaaaaatcaactaatcaaagtagtaataaaataacagttgtcaactcaagcttaagttttctcttcattttatcaagttcacattcaagtttaaaaagcttatgaacttcttgaaagttgaagttagattgactacctaaaaacgagcaagtacaactctaaaatgatacctgtattgtggcaacagatacaaataccattctttactttcattttgagatacactagaatctctcttgaagctagtgcttcagaagcacttttgtaaaaacgcttaaccttctcttccatatgcctttctctacctcaccagctggaatctgtcacaaaaacagataatcacatatgatacagaaatagttgatcctactgcagaattaggttaacacttctaaattgaggcatagaaaagaagggggtgggggaacaagccctacttaaacaaatcatttacctcggtctggcttcattttcacatccaattttcgcccagagtgctgtgaaatgcacctgtgggttctttcaacaggctcgccgctgattctacggcttctgcttcgctttcaaaatgctgaaagagacaaaaataaaattaatctggccctattctaatacccggaccttgcaagtaaactactgttaagttaggcctcttcctggcaccaactgcggtgacagcaccctcggctggtctgaaaaaagcaaaactctctgcaccgcctcccccatctcctccggatcgagcacccccttccctgcctctgtgctctccaggccaatgtgtccttctgacacagtctctgaaccaaaacaggatctatttataacctggaggtacaggcaagaagaagaaaaagatttgagcaacacaaactaaccccttcgtacaaaaacgcctctggaaacagaggcacctccgcagggctggtatggaaattcttccacctggtgcctgggcgcagccaactcttccagtcccctgcgcctcccgagccctccgcccgccccgccgggcctcacctgtgtaattaccctctggctagccttcctgcggcaaccgcggccaagtttacacagaaacccgagtcacctcctcccgcccagcccccagccccaaacgaactcttccgggctgtcccggggcgaccctaccaactcccaaccagtcctccgcggccggctccgggggaggtgtttacagcctgtgctcgccccctgctctgcacaaccccttccgtcccgccgcggccccggatttccttcagccccgccgcaccgagcgccgcgtctgcccctctccccgctggagagttgttttcatggcgctctcgagctggccggctcctccgctccctcggccgacctctgctgactaactcgctctcctctcccgtcccaatcccgcctcctcttggcacttctctccaccgctcgcccagcagctcacatcacactcccacctcagaccccaggctccgagaggcgcagggccagcgggagcggagtatggagcgcagcggcccccgcggctgcctcaggtgaccgtggggacccgagacgaccagcccgaagcggctccccggcgcccctgtggccatccacccgcgcctcagccaccgcctcgctccgctccctgcgctcagcccctccgccctgcctgactggcacccgagccccgcgacccccgggcttcccccgcccgtagccccggccggccctcttgcccagcgcctctgccagctccttgcccgcccgctgtctctagctctggcgccccggctccccgtccccctcgctcggccagttctttctctgctgtttgccctgtcaaaacactgcctaggtcacgtgtcccaacaacagccaacccaccccggtcgtcacttcctccccggcggcctccgcggccctggcgcccggttactatggcaatgccgccgctcgccccggggcgctagtttggggccgggttttcggtgcaggtgcccggcgggtgcgagggcgctggagatggcggctgggagacaccagcagagtcccggaagcccgagacgtcccaggcacttcggttgcgctcccagccggcagaggcgcgcctggattctgagaccaggaatcggagctgcgctattagagcgcagggtaactggggagatgtcatccaaaggcctgccccagacgtggaggataattatagtcgtcgtctcctcctcctcctcctcctcctcctcctcctcctcctcccccctccccctccttccccccctcctcctcctcctcctcctcctcccgggatgctggcacagagttgtgatcgagccccaagtggattgcagcgcataatggaacccgggtttaatgtgaccgggacggggggtgggcagctatgcgggtcagggagtgggagaatttaagaacaggaagcccacccccaccctagattttcccaaatcactaaggattttagtaggattcagaacccaagcttccaagacactcgctgtgctaaaaataatcttcataacttctaaaacactgactcatgggcaggaggacactttgacagcatgttattgttggggagctgtaattttgttgttgtgctatagcaatgtgacatgatggcatttcatgttgtgatgttgtcgtcatttaaacacaaacagatgacaggaatctgctgtacttaaaaaaaaacccaatcctaacaagcgctgcagctattagctactcagtctatagacaaagtacatatggggcatgagcccaaatggagacaagtaaaaatttgcaaggctctttggtttcattagaaaaagttttttttttagatataattttgcataaaaggatcacaggaaagtattaggacaagtctaaggggattttttttatttgtgcccttctgttttaaaattttttttacaatgagtctattattttcacatcagaagagttttataaactgcaagattggcagttccatttttttggcctcaggtaaagttcttatgaaaaaggcatgaaatatttaaaaagtaacattttctagtgcttagatatgtacagtaaaataacatgtac

SEQ ID NO: 1242021 - DNA, 4001 bp, Homo sapiens
cccaagggggtatttccaaggggagcactcacctgtcagagtcgagggacaccaggttttcatctggactctggctaagagcagtatagcccttgttaaacttcactgacctgaggggagacgggggagaagagaccaaacatagatgaaagcataggcatttcacagggataggcagagtcctcgccctgaaggagaaagaattgactgcactactgacttgccttctccctggtcacagccaccactgcctgcagctccatgtacctggctacagtgcctcagaatgtgtatgttctcattctttttttctttttttggagacagagtctggccctgtcacccaggctgcagtgcagtggcgcgatctcggctcactgcaatctccgcctaccatgctcaagtgattttcctgcctcagcctcttgagtagctgggactacaggcgtgcccagctaattttgtatttttaatagagacgggctttcaccatgttggccaggctggtctcgaactcctgacttcaagtgatccacccgcctcggcttcccaaagtgctggaattacagtcgtgagccaccacgcccggcctgtattctactcctcccataggtcttggaaaaaagcacacctccccttgcctgatctaggaaaagcaccctctccccacttatttaatcagaggacacaaaaactgcaagtctttgggtaaaaggttagggttaaccttcacttctccgagtttcaaccctcatctgtaaaaggaggcactgaataaggttctatgcagctccgagtttactattctgttaaaaacaaacaaacaaaaacaggtctagccattcccacactgctcttcgtcctcattgctggggactccagccaccattctcctccctaacagaggaggagaatgatagtgaatgagcctgtgcactcacagaactcccttattccgaagccctttatctgatcctatcacatccttaaaggaaaagagagattgttcctcttcccattttaaagatagtgaacctgacaggttgcatcaggggaatcgctagctcggccttaaaccagagcaccctgcctccgtcctggggattaaagccttctctaaagctgctggcacagaggaggtggcgcctgctgagaccttttccctgaagagtctgggcggttcggcgaggcccccagcatgccttttctccgcagaacggccttggccaggtcccggtgcttctctggaagttaaaggacccgggtcagccgggtcttccccactccgccgcgtctcccgaaggctgggaggccgctctttccgaacggattttgaggggcgagagcaggctgcagctaaccccttccctccggggccgaggcccagcggagctccggaacccgccctggggacgcggccgcccgcccagggagaaacctcccccgaccatcgggccacactcacgcagcttggcttgaatggagggtgcgcgcgtcaccatgtatggcccccgcttttccacggccgcgggggtgcgctcccccagacggagggctctattaccgatctgcccggagggtggccccgcagctcccggcgcgcggtcccgagccccgctgggccggggtcccggggtagacaaccgcaacgcgcgcccgctgggctccgcggtcgccatggccgggccccgccctgccggatggtgcaaccccgcccgtggcgaaagagtgaccggccgagggagaggcgggctcttttaacaagatggcggtgcgcaggcgcaggtagtcccctttcggagctctccggttcggtagtctgaggacttggccgaaatgttccgcccttcttttcggggggaccgggcagttccgttctcggttttggggtaggcggcttgagcctggtgatggttaggcttagttctgtctctagtggaaattaaatactgatactgtcgtggggctgcgcgtgtgcgtcggtcgggtgcccacggtttgagtcctggcgcgccgcactctgtgcttctcgcagtgtctccttgggggtctccccacatgtggggctgccagagagcagacttgggttgaagagtcatatgaggacaagcgttatcagcgaccttttctagcaaaagaaacaggccccagaagttaaagaaccttgtgaaggtgacacatctagaggcagtgcttgcgctgatccatctgacgccaaaccccaccttctttccaacaccaattggtgcctgtgacattggacaggacctgaccctctctaggcctcagtttccacatttaaaaatagagccaatgtcactactcattgtacagtgaggcaaataggcgttgaaaaggagggtgaaagtgcactctgagtctgtgtgtggtaggctatgtgtcagggctcttgacttctctagcccccaagggatgtgcttgtgactggctggaaagaaactccagatccttgtagaactcccaaatctcatgaggctgtcccttgactaacttactggcttcaatagggtaggtcaacagtgtgcaacctccgagctcccagggccacgcagaccgttgggtggcactatgccttgggcaagagaggtgaaaaggaagaatttagggctgaagttttcaaaaatcaaaagcacaaaggaatccttaccattttggtagattccccccactccccatgatgttagactgtttttgcctccagaaacagcaggttcatatagctcaacttagtatttaatggttataacctcccaatgaagccaatagttattcttgttaaacaaatgaagcttagacttggtcaagtttaccagttaagtgataaacctggaatttgtacccagttgcctgtggactccaaagaagtagttttctggccgggcacagtggctcacatctgtaatcccagcactttgggaggctgaggcaggcggatcacccgaggtagggagttcaagaccagcttggccaacatggtgaaaccccatctctactgaaaatacaaaattagccgggcgtggtggcgggtgcctataatcctagctattcaggggctgaggcaggagaatcgcttgaacccaggaggcggaggttgcagtgagccgagatcaggccactgcactccagcctaggcaacagagcaagacgctgtctcaaaaacaaccaaccaaccaccccccagccaaaaaaaaaaaaaaaaaaaaccaacaaaaaaacaacgaagtggttttctcctggttatgctgatgtggacatcaccaagggccaaagaaaatgtgatttaaaccagcagtctccagcctttttggcactaggggttggttttgtggaagacagtttttccacggggtggaaatgcgggggctggttttgggatgattcaagcacatttattgtgcactttattattacattacaatatataatgaaataattatacaactcaacttagaatcagtaggagccccaagcttgttttcctgcaactagacggtcccatctgggtgtgatgggagacaatgacagatcatcaggcattagattctcataaggagcccacaacctagatcccttgcatgtgtggttcacaatagggttcatgctgctatatgactctaatgccacggcttatctgacaggaggcggacggagctcaggtggtaatgtgagcaatggggagccactgtaaatacagatgaagctttgctcactcatggaccagtatccatccatggcctggggcttgggaaccccgacctaaacccacttaatgtcacaagatcactaggaacttgtagcaaaagtgtgacagccttcatgcacactcctcccaatcttccatcaataatgctgttaactgctgactgattgaacatagaccctgaagccaaattatttgctctgttacctactggcaaattattaaacctctttatgtctcagtttctttagctaagtggagataagaaaacccatctaat

SEQ ID NO: 1242022 - DNA, 4001 bp, Homo sapiens
ttctctacatttctcaggatccccggcagttaaagtgggggccttgggactaaattctggccaacagaatgtggccaaattgatacatgtcatttttagagttaaccttgggtaatttgccatactttctttcttgtcaaacaagctagtcctagaaggcagcagaaccattaaaaataaaaacatctggccttgaatttaacatttcgtctgcctagaaatagccacaatggatcttttgtgaggaaaaaaaaaagtgtattaaaccaccgatattttggggttttctgttacagaagtaaattcactatgctggttttaaaacatggacaagaaatctttgccaatcctttgagaagagggatctatgtctcctttcctaaaatggaacaggactttgacacatttgtaagcaaaagaaagtgggggaagtagcaccgcgttactttttgaggcaaggtcagaaaaggtcaggcaatttttgccttgttcattgcaacactccctttggagctctgagtttaagctaagaagtctgactaccttgctgccatactgtgaggaaaccccggccatatagttacagaagctctgctagcatgcccactctagtctttctaattgagttaccaaagaaaagctgatgactatgccctattgacaacaccacctgtgaacataataaaatggttgttttaagccaccatattttggagtaatttattacatacgatagcaacccaatgctcaatctaacaagtagtattatttgctttttaatctgtgcaatttaactactttgataaaatttagagttaaactaaaaaggaaaatggttgtgaattcttcttggcttatagactttgctattctactttccctacccagaaaattcacctttctccctaaatcactggctttcaaactttttaaggtttgaaatacagtaagaaatacattttacaaacaagccctagtgcacacatacacgcatatatacaattaaaagctccataaagcagtactttactaactaacactaaatttacttacatgcgctgatatttccaatctatattgtttcttttttttaagtttaaagagatttccttgcttacaaatgggtcaagacctccactaatgggtcccacacaatcccctttccagttgaaaaacactgtcctaaacctaaatcattcttcaaggccttacccaagtccgaaaaagaagcctttattgaccactccattctcagctttcttgaaattcctgtaatttattaaattccattttttatctcagtagtaagaatattgcattttctgtacttgaatttaacatgctttacttgatatcgtgagcacttctagggcattgtaatgtcctttatctaccacttgataaattcagagtagtcaataaaacattgctcaacatttgaccattgtgttttaaaatcttagttgttagagtgcacttccgtttgcgcattgtttggggagaggcacggacaaatgttctaataacttatccacatattatacttcaaagtggaaaaacacaaagtactcttaactctatatgcgtgtttttatgcaaactaaatcattaagatacaaatgatttttctaatagctttcattaccacacagcacacgaaataatgatattgatatagccacgaaagactaatgtaaccaagttctcacaatcaaaatatctttgaggtgggcaaaatgcaaacttttctctgggatcaacatttcttcacaactcactgcaactacgccttgacagtatgtttcgagaaccgcttcccaattttgttgtcccagcaagaatcgggaggaaactgggtgaaaggctgcgaggcttgaggcgggtcccggacgaacgcggccctgcccctcgccggagcctctcgggagaagtgcgacaccgccgctgattgagaggctgaggcggaacttcccgtctaaccccccccccgctgtcgtcccagcctgttgcttaagccgcgcggtgtgcggtgtgcgcggcccctgccttagcaacgacgctagtaactgcctggctcctccctctggtgtctcccggaaagcgctccgtctggtccgtgcgcgatcacggcccggcgcgtggctcgggctcgggcggagctggagacgtgtggagctgttcgaggactcgcgggtgtgcaggtctgagtaccactccgatccctggtggaggtccccgcgcctctctggagaccagtggtctggccccagaggtgcggccgcgggaagtggacattctttgtcaggaccctagcggaggtcgcgctgggtgtcgcctgtgagggggatcctcggtttctgcgcggtctcttgctttttttaggatcttgcgggccctttgggaaaaaggtttccaaatttttcctcaaaaaaaaaattatttttcctaccaatgattttcggtgcattccgccccaacgaaaagtatgtcctggcaaagtcagttccctaggaaccccatactttattttattttatttttagtatttggagtggtttgtgggggtttggttatcacggaaggggaagcgtagtacagacgtagaattagtgatgccatgcagtgtatttaaaatattgaggttgtggttacataataagcaaaagagcctgtttcttacgtctaaattatttattgggaatgtaggacaaataaggaagtatattaacattttcagtcgccaggcccacaaagttggatggtaaaatcaatactgtagatcgcagcatgtaaggactaacccagtgcaccatgaaaacgaaggcaagacagtttgttaccatatggcgggtggtgtgggagaggccattgatcctatatgaaaaagggtactactaccttggattatgaaaaatgaatgttggacctgtaggtcctatgtgaccaagttcttaaaaacactctaaagaaaattggaagtggtttttttctaatactgaattggtccacaatataggacaggggagtctgtatagtgttccattgggaggtgagtcagcttacaataatggaagaggtagaagctttttgttattattttggagaaaaaaaaattgccagcctgccacttgtgctaggctgcagacggcccataaaggtagtttgtcagatacttcagtagtgagatgcttactggatgtgttttgcagaatggttttgatttagttaacaagtgtttgttgagttcctgctgttgcataagaatcaggaataggtgagatcagggaaggaatctgctcttacagagttgaatgctggaggggatagattcactaaagtacctccacaataaatgcatttttccatgtcaaatatgtggaactaataataagtactcaaagaggtttaagacattgctgtggcccatctatgagttaataaggaactgaattagaatcctgactttgagagtgaagatagaggattatatacaaggtagatgcaacttggtgagtataattaatttggggtggaaattgggtagaaggaggaataaaaaattaatgtatttttagccttaagttccagaatgatggacgcaccatcaaggtgttaaaattgttagttccttaggaacagtctttatgttttctaagtctttttagcccccatgactcaaattgtacttccttgcacatatttgatgttaacaagtatgttttaaaaattttaaataaccccatttgcaataaaatcatttgcaatgattttctcacagtcgaggcaggctgttggctcggttaggacagatgccctgatcatgtagtttcagagaccactggagggagctgcccatgatttacaattgctggcctcttctacgtggccacctcagccataagtgagagtatataggtgaactaagaggtggagccataaacatttctcttttactgtcttacaggtatttgtggtggttgatttttctagaggaaggttat

SEQ ID NO: 1242023 - DNA, 4001 bp, Homo sapiens
acggagtagctgggattacaggcgcacaccaccacacccagtttgttttgtttttttttcctaggaaacattgcatctacagatataattatcaatttgaaaataaaataggtgctgtgagatgcatcttctcagcaccctaacactgcaagcttaaatgagacacttcatttgacaggtaactcgctctgagtcctcaacatacctatttttaagggtctttcccttttttgctccttcaccttagacataccttttcttattttagttctttagagttttagctcccttaacacattcggatgcatggttactggtaataatgccaaaccatttaaggagagccaaagaaatgaggcaagtaaaaatcatgcataaaatgaaaacaatctttgaaaaccaagaagttacggtaattgggtctcagaccaatgcttttccttaaatggaatttgtctaaagagccacatcttccccatcaccattctcttaagtatctacacacaaatggggcattagttggaaatcaaactaaatataaccatgaaaacttagtccatgatatcacggattgatggtaacttctgaagattactttctccaattcttcacttttttgcatatgtgataaggtcagtaagaaaatgtaggaaattatagtttaaaataatcataagatttaagatgctctaagtccttcttgtttctaagtgtatcaaccacaattgaatgttgaactcttaaacactacaagagaagactgaggttaggggcaattcttttcgatatatgtataaaggaatattccttcaacatggaagtcttggaatgaatttcatgtaagaaggggactgatgaatgaggaaagaaaggaagccatcacctgacatgcagcagctccctcaccccgttttcctccaccccaaaagctgtaggaagtagaaagctgcagaatgtaccttccaggccaggagcaaaacattgaggatggccagcaaggggcagggtccgttctcattctgggtgatgatgggtgtgttctcttccttccactggatccacttgatgtgatacacagattgtcccgggaagcgttccttggaggccgccagcacctgagcggtctcctccccctcctcctccttgcacagaggaacagccccgggcaacaccgccgcgccctcctcctcctcagggaccctgttctccgctccctcctcactattgaactcgcagctactgggaaaagaatgcaggttagagaacgactccagagagtccaggctcggagattccccaggagggctcgggtcgctgcaactgctgctgaggccgccggcgctgctgggctcttcggagccggcggcggtcagttctgcttggcaggtgccggcgagatccgggcgggctcccgcgtctccggcggtacccaactcatgacccactccggccacggctgtctccggggaggcggtcaccttgtactgccctctcagaggcgcctcggcggcagcaggactctccaaaccactgtccttcaagtccaaacccgcggaggagctgcagggtccgggaacctcaggagagcccgcgggagaagccgagtccgggaggctcctcctggcggccgccgcccccagcccattcccgccgctggtctccgccgcccataccccaggaccatcaccagcggcgagcctggtctcctgtagcccttcctgcgaagaacctgtccctgacgctggcccggccgccaccccgtgttctagcggctgcaggctctcggggctgctctccataccgggccgcccgcccccagctctatggagaccgcggccacttctccgcagccagcgccttggacgccatgacagctgtattggcagcaacagcgccctggcgcggcctcggtcaggcacgtcaccggggagagtactaagaacgcgcgcgggcgcgcgctaccgctctgtccgtgcgctctgagcttgcctccgcctgactgcgcgctgagaggcgaaggcgaaccactcagcagccgcccacgtggcccagccctttccgtgcgtccgaccgagctcgctctcggaaggccgggcgtggagggcgtggctaggagggcgcggccggggggcgcgcccccgcggctcagctccagtaggaaaacatcctctcactatgtggccggaagttgaactcccgggcagctcccttgtgtgcggcttctttaaagggaaggcaggaggcggacagcttggctgtgaccctttagcgctgggtcgcgtgtggcccaccctcggcctgaggcattgttgggtggttggaggtggttgtagtatttggaaaagaacttgtccctgaagggctcaggggacttggtttctcagctcctaatatggaaaattaaggcatttcttacgagatgcagattttaaagcaggcatatctactcgacggctttggattactgcactgcacaaattccagtctctgtcggttttggctgagaagagctgtgcttctcaccagctactggtgagacattcgccctacaggaaagggtcggtatgattgtggacattgacatgcgtagcaaaagaaagtggctaatttgcgccaataataataaattagcttgtatttgaattagccaagtctttgcggttttgctaacttggcttcactttgcatggagtgggaagcgcctgcttctgaaaaggtgacttttttcctaattagaatggactcctcttaaggccatgcagttttcaaagaagaaagacaagctggacgttttgttagtaacaaaatgtatgtgggtcctattctaacttgttacagaaaagggctttttcccccatcttttttctttcaacattttctaggctgttggggataaaaaattaacgagacaggtcttccttcgcagacatataaatacctgatacataattagaatgtgatatttttgcacctctgttggttagagaaggcagacaagattgcaaagtagtatttcattcattcctttaatacattttagtaccaagtaagttgctggatgctgtctgtcactggagatgccatagtggatcacggagcttatatcttcatggagcttactgtctttttttttcttattgctattttttaatacatacttatatgtttttttgtttttgtttttgcttttgtttttttttttttttgaaacggagtctctctctgtcgcccaggctggagtgcagtggcacgatcttggctcactgcaacctccgcctcccgggttcaagcgattctcctgcctcagcctcccgagtagctgggactataggcgcccgccaccatgcctggctaatttgttgttgttgttgtttttgagacggagtcttgctctgtcgcccaggctggcgtgcagtggcgcgatctcggctcactgcaagctccgcctcccgggttcacgccattctcctgcctcagcctcctgagtagctgggactacaggcgcccgccaccacgcccagctaactttttgtatttttagtagagacggggtttcaccgtgttagccaggatggtcttgatctcctgacctcgtgatctgcccacctcggcccccaaagtgctaggattacaggcgtgagccaccatgcccggccacacataatatgtattacatataatacatgaatgttggatacttatattcttgtttacctgagaatgcagaagactgtgcccctttttttttttttttttttttttttcccacttgagacgcagtctcgctttgtcacccaggctatagtacagtggcgccatctcagctcattgcaacctccacctcccgggttcaagtgattctcctgcctcagcctcccaagtagctgggactacaggcgcacgccaccaggtccagctaattttttttgtatttttagtaaagacgaggtttcactaccttggccaggctggtctctaacttctgaccttgtgatccgcat

SEQ ID NO: 1242024 - DNA, 4001 bp, Homo sapiens
ctggaccagaagataagaaggagggtaggggcacaagcagatagcactaccttccgagaggagacttggttggtgatggtgcattggtttggaggcagcactaaggagaagcggaagagcatccctactctggtgagacggtggaggacactagagaaggctcttctgcggcaagttgttcactcaggctctggtgctcgggagagaaggtgggttcagctacataaaaaatgaaaatgcaagagtgtggctgcaggatacaagaaacaagacatttaaagccaggtcggagtgacacagcctagtggcctgcagagagaggaggctgaataatgcgctaataacgtttccaagcaccatgtagtgtggctcattaaatggttggtagggcttcatggttgaattcctggacactaagtatttttctatccgtatgctatcagatttctaacatgtaacacattaaaggttattaagccctcaggtaaacaagcttgcagaagcttattcattagcattggaaactgtgtcttcccaacccacgttcttatacagatgaaatcagattcgaatgaaaatcaagggtagctttaagtagaaagtcagaaggggcaaccaggggtacctgtgagagggtacgtcctccattcccctccgtggaagagggaagtttatagacagtggatatggaagggggcctaagtgtcctttttagtaccagtcaacgctaaaaatattataagtgccaaggaacccgccccccccaacacacacacacacacatacacacacgcgcattcagtgacagggcccagaaggcagatacaatgtgcaaatctggggatggttctcaataaagaatatatttactctacaaacctcttattttaaaagcaagttgcaaatgtttgcccttgcttctgagagagctgcacttttgtggattcgaatcattctagcattatttctggttactcctatgaaataatttccaacactgccgtacgcagactttgagctgaggacgagagcgcacgcgcacacacgcacacacacacacgcgcgcacacacacacataaacctcgtgcacattgaagaaatgactcacttaatttgctgctgcctgccacgattgggttttgattttacctgttcaaatacaaagtttcctattagattaactacaggaaagaagaacttaggagcattaatcctgattttgttcatgtctttagggcaccaaagaggttttaacctgtgcatcttaagaagccattctccggaccaccgactgcttgctccataatcttccagacaacgataacatttcttaccactttaggagccaattaatggaaacccctcctagaataaacatggttaagctttgcatctccggtacctgcagaaccgtactttagggctctttctcagctcgcagtaggatggcacaacagcattctggaactgcaaagaccccctagcctctcgtttgaaagatgagaaaaagcgaaggggcggaagagcagatggttaacctacccaaggtcactcactctgagtagtgggtcggctgactcgcctttacccctggcaatccgtgcaccaccccagctcccccaaacagtccctccgggcgtcggttggttcgctagcatgcagcccccgcgaaaatgcaacgccagttgcgctctgtgcccaacttcagcccttcgcgtcacatgcagttaaccctctcgcccgcggcatgtcacatgggccacgcgcagctctctctaccccacgcctatctcctgagaggctgccccaaggtcaccggccgtcccagagagctcccgccgcccagccccagaggccgcccggccggggttcccagagcgcggcactcaccggcgcggggggtgggcgcgccgcggctgcccatgtcctcgccggcgcggctgggtgcggcggccgctggcgctggctgagcagggcgcccggctgcgggcccgcgccgcggggagcgccgtccaatcagcgcgcgcctgccgcctggcccggcgcgcggcccggccgggttcgcggctcccggggggcgcgagccgccgcgcgccgccggagccgcttccgggcgcgttgcctggacgcggttgccgtggcagcccgagctggaggctttccccgcgcacccgcgcccagcctggcggcgccgcccctcctccctcctcgttcccacacccaaaatagcctctgctcgtcgctgctgtttcccacagagctcgcatccaagcgccttggagttggcgggcggggatttcgctcattggaaaataaatcctgttgtagggatggttgatttggagaggtgttgaaatggtgcctgacggagatcatagccatggtggtggcactgcaattctctctagagccccaatataccttatttactaaaccgctttcccacaaaaatagttctctcccccgccccacctcaaattggggagaagttatttgattaggccacggtgacgccccacctgtgcaggtgaacgaaccctccggggctgccatgtgtcatttactgaatcgccttgacacctgcagttgggacccaggatcgtgtctcatcgcagcagacacgacgagaagaagaaccccgaacacccctcctcttcccagccctttcttctcccgtcagcttcatcccctcccagcgcgtcctggctctttccaccttcctctcgattttggattctcatcaggacgcacaagcccattcactcataattgtgcttcctctcggtgggcaggatttcagcggagttgcgggggacacgacctttgcctcatctggttcgtgcctccttcgcagatactggtacttacccagcacaggggctcctgtctgtctcccccaccccgccccagcctgagcccttccaacccaggggaaggagcccgacatggtagaagagcccgaactgtggattcggctgagcggttttggaattctctctccggcagcattattatttaggggctattagtattaaggactgttatttgtgtgtgatctttgaaatatttgtgggtattctgcgactgtttcctcaccagtaaaacgggctaataacttccacaaagcgctaacgcatctgtaacattcattcagccaacagtatctattggatggctgccaagtgctagaaactatgcttagccctgagacacaatggtgaagatgaaaaagagacacatcactttctgatcccacagagcttagagcctgacgagcattcatcaaataatcacagacacatgttaacactgccgttgtgaccaggagagtaatggccttgagtcttgtgatgtgtagatctggtataacagcatctctttagtgctgcaaaagctcaatgattattctttcctttctcggttagattcccactgcctggtgcatggtatgtactaggtaaatacatattgaattggatcctatgtcatggtgatgacactgtcactctgcttcccagtgaccttctggctgtaactggccacaacatctggaaaggtgtgcatgtgttagcagaaagtacccattcaaacctagagtccatcaccaagagtctagaaaaaggttcaaaatatttcttgcctgtctccatcggggtgcctttcagtgcatatggagagcatctcagatggacacataacgtcccctctgtcttgtttcttcctcttcttattactctaccctttccccgcccaccccaatactgaccctactccctctactacttgaggtgccagagcctcaaggcaccccttcctggcttcctaggagagtgatagtagatcctaatattcctcagaatggaacacctataaaacagaggaagtgccttcttacttctggccatcaaaactgaactttgatttttcatttgctgcaagactccctcactctcaaaggtagggaaggagaggacctggaaggtgaggggctcttgccata

SEQ ID NO: 1242025 - DNA, 4001 bp, Homo sapiens
agcagtgattgcaccactgcactccagcctgattaccagagtgagaccctgtctcaaaaaaaaaaaaaaaaaaaaaaaaatttaaaagaaagttctcctcatattactccccacactaacattcttccacagcactgcactattaaaattcttcatttatatttaaaaccttcagtatccaactgcatcccactacctagaacaatgttcaaccacatcttcacatttaaccacaaaccctatcctatagccccatctatctgtcatttcctatcttcttacctccatgcttttaagtttcctcttagtatgccctctgaccctctacatatctagatcctaattattctttgaggcccaactcaagtggctccttctctttatttcaaagtctttctagatcccctcagtcagagactagtatctccctttctctgaatttctgtatctcttattcagtctacagccttctattacatactctatttttgcatatatgggtttccttcaatatcagtttgaagactagagtcactctcttccaaagttgtatctccagtgccctaccatccctagattatgtggacagagatctggcaggacagggatgtggtctgctttgtggagatcattttactcacaattatcatctgcctggaggctgattaggtaagtcctgcctctagtaagagaggtcaaccaaattagctcccagagtatttcctaaccctggcttccttctactggcctataatccttacttgaattatatttgtattctatggttagatctctcaatattatatccagtcttttcggttttcaaaaacaatacaacataattaaaaaaacaaacaaacaaaaagttgtaaggcaattgtgaagtggtggaaagtgcattacggttagaaccagtaggcacagcctttgctttttggctctgttccttactggcagtgtgacctccaggtagttctttaacctttgtttcctcatttgtacaataaagatggccccaagggttaaacagaaaatatttaatatgcaacatggaagagtgtgtatgtgtgtgtgtgcgttatgtgtgtgtacacaaggccttgctacaagaagccaatctcgttctcttctttcggggacctctgcttactgactttgccggatagagtggctgtgaccttgggccagtccccaactcgactgtcacccacaagcgccctcagcggtagcaagagtgcgtgtccaggagctagagaacgaggctctagtagtgcaatcaggccagctttgcttcctaaccaggcaccctagacttgtggtctccccacaagtcttggaatggttactaagacgtaggccacacgtggagaatgaagcttttaagacctctgggttcggcttgccccaggtttacgaagagcccagttcccagaaagacccacaccccccacgtgacttaggaccccgaagaaagcgcctgctacgccccggacaagatctggccaaaaacaaacaaacaaacaaacaaaaaaaaaggtctcccctcccagccctcaggtgaggccatcatccccgcacccctcagctccggcctgcacctataacgccaaatgctgtgctgggtaaaattaattaccataaacttctagcgctttctcttccatgatccggggctgccgggcagctcccggctcagagaggccggagagccacaggactctgctcagcgtccaggagagcagcccggacacccgctgcatcttcacgctcagccatccctggcgactgtcccaatcgcgccaccgtctctcagcagcctcgggattgatcaacttcctggtcttcaaatgggccgagacaagcctaaaggttcaggagagcagagaaaaggcggggccagacggagtagctcgaaggacctagggaaggggcctcaaggactacaagttccagcgtgctttgctcgatttcggcgggacaaaaacaatcttcgcggctcgtcagcacattgcatgctgggatgcgtgagctattttcttcggaaggcagcgaattgtattctgggacttgtagtgtccgcctggtagaagtggatgtaacggtctgttaaccgcgactgactcactcagtatccgtgataagttaaagatgaatcctgaaggggtaggggaaaggagatcttgagttctccagcacggagactctttacaattatttctccgcgggatccgctgacagccaacgtctttcttacttcctgatcggacaggaagtaggtttcagttgctgtgaaaagggatgtcatgggaagccagtgaggtagtcaggtatggcatggggagggctttttggctttctcgtctcctaagggactcagtccagcacagcttcccacctttgaacgaatatttctgctaatggcctccaaagacaacttagaacataagttttcccgtgtctaatgtgtacagtggtgacataatggagatcgccatccttaaaagtgtatcttggccgggcgcgatggctcacgcctataatcccagcactttgggaggccgaggcgggcggatcacctgaggtcaggagttcgagaccagcctggccaacatgggcaaaccccgtctctactaaaaaatacaaaaattagctgggcgtggtggcaggggccttaatcccagctacttgggaggcagaggcaggagaatcgtttgaactcaggaggcagaggttgcagtgaaccaagatcgagccattgcactcaagcctgggggagaagagcgagacttccctcaaaaaaaaaaaaaaaaaaaaaagtgtatcttaagccctctggtgttcgtgggtgtgatggatgccagtaacaaaatcgattttattttatccatccatccctccgatcaaatttgtaggtactaatttgccataggtgatccataggcatggaagatacaaagataaaacgctgcccccgccttcaaacagctcacatgacctgtgagggagtccatccctgaatttgcagttacaaccaaactaactaaacctcttgtcaaagttggtgacaaatgccatttctattgagaagataggattatcttgcagaattgtcccatgctaacatgcccatttatctttaaactccagtcttgtttgtctagttaatgtaggccttaggatcaccagacaatgaattgcttaggtcccaaggaaattttggtcagggttcaataatttccctgccgtctattccactccacttactccacagcaattgagaggataatcctaacatttttccagccaaatctaggacactgaggcctcacttcatctgtgaggcctccctacttctccaagcagaattgattatctctttccctgtgctcccacagggcaccatagcattgaacatgtcgaactgtcgattaaatacctgatttctgtatctgaaactcacagcaaggtgccaggcatacagtagatgctcagtatctgtatttcttaatgaattaactgaatgttgctcaaggaataagtggtgaagctttcttctagtcttgttcagatacctcaatcgaaatatttattgactctctgtgagggcattgtgcttggcatgggtagatggcatgtagaggttttcaaacattttagtgacactccttcattcagacgaactcttagaagcctgttggataaagctatccagagcacaaagggccctagaaacctgagcagcccctaactcctacttttctgcccctttggccccactcgttaatatctcagcatcgcgaaccaggcctcggatttgctgcgcagcctcagctggccgggtgccgccccgcccccagcgcctaagccccgcccctaggtctccgcccctcggatcccacggggtcccttgcggccctcccactcctcgcaccgttggatcgctttgctcacggcgctatctctcgataaagttgttgttgcggcttccgccgcgggtggaa

SEQ ID NO: 1242026 - DNA, 4001 bp, Homo sapiens
tcccttcaaatgcctcccattaatttattttacatgacaaactgaagtacctttgctgatatcctcaataccttacaacagaaaatgcattattcactatctacatggatatttgaaaacacagtgttccattacaacacatattgtaaataactacttttttcacatcgtattatcataggagaattcaaacttcaaaatgttgccctcatagttattccaggaaaaactaattttggagtgtgtaaactgttttactttccatgttgaataatctgactaattttccttgataaaaatcaagattatagcaatgaattttctaaaacacttataatatgaacaataagttcaagaaatgaagaaagaagaaaagcactgccttttcctttttcataaaccatttatgagttcccaatattcttacctgaagtacttgggagctcaaactgtttggagcctaaataattctactaagtattttcagttcttgttttggttccttcttaaccaagttaagtgagaacttccaagggacttcacagaagtaaaaatgccccctaaataatcaatggcactgttctttcgtttgacaaatatgtattcacgatctactaagtgcaagactccgtaaccctgggtcactgcaaagtaggtattatcagggttcaactaaagaaacaattgatagaggggcaaatgcagttttagagaagataaagtggggtgtgggattggttcaagcttcataataacgctgcaaaggcacagcttcccctatcaagaaacagcagcacgtagcagggcaaacaaatgtgcagatggctccaagctctttatttaatgtgcactgtatgactcaactatctggtcctatgcttactgctgtggactcttctctaagcttttcttcattcatttactcattcattcaaccactatttactgtaaaagactccgttctagtgtgttgctgggaaaacatcggtgaataaaatatgcaaagcatcagttttccaggagctgacttggggaggaggaggaataaaacgagggagaagcagagttcaagagacaaatgaatgggcaggacatgataatttgggatggggacaagagctgtgtggaaaaaaacaggatgaggttgagggggagattacgaaccaccacacttgttaagtattaacattactcccacctccaccctgagttctcacagcacttaccattctgcactgtaaataccagccggcagcagacttgcagcctgcgcgactatgtaagccaagagtaatctgaaaaactatccttttcccttgcctaggggaaatttacaaacgtaaatatgtgtaaattaatatacaagctaatatacacgttgacgaacggacgaaatggttgaaagaacgaactcgcaatgaactacaacactttctccggtcaaagtaaaagccattcgctccagagccccaagtaagccacaagttgtacattgtaggagacaacagtcctcaacagcagctcaggttccagcacctccctccgggcgccagaactacgtcaacacaaatatcacctgcgggcgcgagctagcccagaaaaccggtgctagaagggccgctccgcgccacccggcggattcctgcaacagagtttcgaggcaagaagtttcgaagagggggccacgaaccccagctctccggccctgctccaccccccaaatagatttctctcccgcctcccgcttaactccgtcggcgccggagggatcgaggcagggaaggaggcctacacatggccgcccaggcccacagaggcccaagggaagtaggctaagcagccaggccaaggagaggttgcgttttcagggaaaaggcgtctccaaaagcactcaccccagcgcctccagtgtgtccagcacgtctccctccatcgtcggttggggacccggctccggccctctcatggtcctttggcccagagctgttcggcgctctaagtagcccgccggaaactagcgtcaccgcgccaaggttccggtccgggtctggccggtaactgcctgagagcacagctgaagaagggcgcaaaggttcccagccccgaggcaataaacacttcatagtgcctaaaaccgctgcgtgtaacgataataattttttaaaagaatagtagaaataataaataatagtaataaagagttctctgtgttgggacttttctgtgtgttcaaataaattttagcaaatatcgtggtatcgggttgatctcaacctatccgattccagacctttttaataacagaaatctgaaataaaattataattatcttcagctaaaattagtaactaatatcacatgcctacacatataatttttaaatcaatatacacgacgatgcttcaacttgaaggaaaaaatgaagtaatttataacaaggtaatatttttctccttatgaaatgcggaagaccaatgaagtgatcagatgcttgcatctatctatgtagaatcccctcaactgcatattcagatgatgtgcttcattgctgacaaagcattagttgtataagcaacaaacataccgccagcaaagtaaggtagttgatgtggttttccaaaattgtggcgaattctctgtaaagttccaaacaaacaaaacataatataccctctgtgtactatccatgaagaattcaatctcttatctaaaggatttaaaaaatgtattttagggttcatatgtaaaaggtactaagagtataaggttagatcattattagcaggcatgtcacctacatgaatactctagcagaactgttggaaatcctgcatgaagtataactattgatcccttgtatggacctgtcccttccattgcagactacatagcattcgtagccccagtccaataaagaccagtaatgctctcgccttcctaattatggttacaaacaaaaagcatacccataaatgtgtaaaacactcaaaggtaagctgtagtagtccactctcatattgctataaagatatacctgagactgggtaatttataaagaaaaggggtttaattggctcatggttccacaggctgtacacgaagcatgatgctggcatctgctccactcctggggaggcctcaggaaatggacagttgtggcagaaggggaagggggagtgcagctatcacgtggccggagtaagaggaagagagagggtgcagggaggcagggaggtgccacacactttttttttttttttcagtctcgcactgtcgcccaggctagagtgcagtggcatgatctcagctcactgcaaactccgcctcccgggttcacgcgattctcctgcctcagcctcccgagtagctgggattacaggcgcccaccaccacacccggctaatttttgtatttttagtagagacggggtttcaccaggttggtcaggctggtctcgaactcctgacctcgtgatctgccacacacttttaaaaaaccagatctcatgataaactcactcactatacagtgccaaggcaggaatggtgtcaaaccattcaagagaactctgccctcatgatccaatcacctcccaccaggtccctcctccaacattggggattataatttaacatgagatttgggcacagacacagatcctaaccatatcataaactcaaccatacatttgtataatgactattattactgtatattttagtgttgtacaaggcttaagcgtaaaattacttgcagtttaatgtatctgaattcatctccaaataagggagaggagaatgtatattagtggttactgcctcttgtcagagttggggtgtcatagaaggtactagtcttagtactcttggcaaaaagtctctgtaaaaatcaaatagaaatgaggtaactgttctttattattattgatcttaagtgttctgctgctggttttcctaaaaaatctaaataaatgaataacaaaagttatgcacagaaaaaga

SEQ ID NO: 1242027 - DNA, 4001 bp, Homo sapiens
caattcccttctcctgctcatcaaagagcaacatatcatcttcattctcaagtacggttttcagcaccacaaggaaactccgaaggtagtaaggatgaccggttgtttgaccaggaccattgcagcttgacccctgctccaaaggaatgctgtgagggatatcattgtttaagcaactgtcatcctgcagaggagcctcttggatgttactccatgcagaagcatcatctgcagaactatgagattttgcctctgaatctgacagctgtattttagcttctgaagcaacagtcatttttacttcttcacaatgacatgcctcacgtttttcaaccacttctttgatacactcttgctttacaagactgtcttctgaagtagactttaatgtattcctaagagtgaaatctggtgagaataacatgatcgcattatctgagaatccaggggtgagggctgatttctcacattcccgggtagccttttggctttcggcttccattattttacttcctcttaccatatgttcaggaatgcactcttcctttagagaatcacatttaaacacgttttctttttgagaactgttctccaaaatttgatcctcgtcctcaatttctgaagagttatcaatcaggctcttaacaactgtggatttggaactctgtggactagaaccggcaaattcttcatccttatctattgattttttagcctttacgtattttctggacaatttagatgctaggcttcccaaacaaatgactttcacactacgatttctcagctcatcttgatttttgcacaccacatcattacttttaaagtagggactgatcttctgctttacttccctttttgctgaatcactttggccaggggttaaatttgtctttggtggtggtgacttcttaggtgttacatcttctaaggtaacactggttaaatctaccatagacacatttgaatttattaagccaacctgccctggatccacttgaacgaagtcattgttagcacacatttcatcaaggtgccggtttaagtcatatctaggcaccattttactgcaaacggggcaggcaagtttagcaggtggtgcattgttaaaacacgaaataatagaattagatgcttttttcttattcttgctgattgataagcttctacgaggcctttttttgtcaggaggtttcccttctgacatcatgagtattagaaaaactggatgttctgagcaataaaacacaggatatttaaggtgaaagatagcaatggtttacttttactttcttgacttgaaatcaccaaaagtgggattctatatgacctcatgttattcgtctcgacaatttcttcttcctacaagaagaaacacatataaattaaaaacatttttatgaattcagcaaggggaaaagcgaactctgaaacgtttaagagcaaggtctcctgtaacgaggagacaaccctgagcgtgagacagaagaccaagcccctccgacaagctctgtacgcgatcttagtgtcccttactataaaatgacagagctgggcttgtaagggtaatttctaggacatctttaagacctaaaactatccgtttctaaaaagggacaatttgaccacttcagaccctttacaagaccactgtatgagtaactttttctgagtgagatggagacgatcagcgcgtggcccagggcgatgcccgcaccataggccggcgcagatgaaacgccccagccgcgggcagctgcgcccgcgccggctgccaccaccgcggcttctgctgcggagccgaggccccggccagcacggcggacgctgctgggtcaaggccgcgcacctgggacgcgcacctggggccacgcgactgagcccgagccactctccctgctccctagggcctggctgccctcgcgtcctccttccctcggtgccctgtcacccaagatccccgcgcggccacctcgcacctcccacctggctccgcgcgccggcgcttccaggcattcccagccgatccccgcgtctcgcttccacaggcttggcaagtggaggctcgagtgatcgatctcctttcctttccacgttaaaggctcccataccgtaggtgcccaaggcaggctgagccctgggagcggaaacccgggcacctccttcctttcccacccgcagaggcaggcgcctgtgcgcccctgcacgcccccgcacgccttctctgcgactgtgcactctgagactcctctccgcagtcggtgagaagggcaagcaagctaaacgtgtttgttgggggagcattcagtgtcaaagcgagcaaacagcctcctgcggggaagacaggcgacttctgcaaccaacacgcggagctctacttaagctgactcctgcgaataagcgagagggagtttcagttggaaaaccactgagctgggttttccaaaagatagtactaatcaccggttatctgatacccttgaaataataacatcaagaaccaagaaataaaatgtggcgactaggaagtgatgcgtcttgagtatttatgacttctgtttttaatgtaatttatttgtaaagctatatgatttatttaactttcaataatggctgtgtttaacagctgaatttttttttttttttttttttttttttgagatggagtctcgctctgtcacccaggctggagtgcaggggcgcgatctcagcttactccaagctccacctccagggttcactccattctcctgcctcagcctcctgagtagctgggactacaggcacccgccaccacacccagctaattttttgtatttttcgtagagatgggttttcgccgtgttagccaggatgatctcgatctcctgacctcgtgatccgcccgcctcagcctcccaaagtgctgggattataggcgtgagccaccatgcccagcctaacacctgaaagtttaacaatcagccctgaagcactgacaccagcgtgttccagcccaccatgaatgacctagaatgcaagcttcttaacatcaggcggttgtgcttgttgcctttactataaaatcgctgctgcctgcagcagtggctagcgttgtgtaattattgataaatatacactgaatgagtgcataaatgagcaaactaaagagaataaggacataaatagggagttcattaacaagaatgtattgactgcctacctcattccaggtaacattttagatgctgaaaatatgtggcagtgaacaatgaggaatgggaggaaattcttcatgggagggaggggaactcctcatgaaggatacattctggtggaaggagatagagaaatataaaaagtaaactatgtggtgaaattgaagacaagtaaagccagaaacatcttagggttgaggttacaatttgaaagagtggtaagggaagtcctcactgaaaagatgacatttgaagattgacattggcctgaaggaggtaacagtgtggactgagagaaggccatggtaggccaggaaacagcaacagcacatgtaaaagccgtcaggcagaagattatctagcaggctctaagaaccccaaggaggcagaagaaaacaaagccagggaggcagcagagagccagaccatggagggcaagtgttagcaaatttgttccgtaaagggccagggagtaaatgtttgaggcttttgggaccatgtggcctccatcataactaggcaacacagctattttagtgtgaaagcagctatagacaatatgtaacatatgagtgtggttttgttccaataaaactttatttacaaaaatagctggctaacttgccatccagctactgtttgccagcacctgatgtatgaccctgcaggtcattgtatggatttgagcattgactttgagtgagatgggaggaggggagacaaagattttgagcataagctctaaaaggacccctttccctgttgcattcagaatagagcttggggctggtcgtggtggctcac

SEQ ID NO: 1242028 - DNA, 4001 bp, Homo sapiens
caaagagcaacatatcatcttcattctcaagtacggttttcagcaccacaaggaaactccgaaggtagtaaggatgaccggttgtttgaccaggaccattgcagcttgacccctgctccaaaggaatgctgtgagggatatcattgtttaagcaactgtcatcctgcagaggagcctcttggatgttactccatgcagaagcatcatctgcagaactatgagattttgcctctgaatctgacagctgtattttagcttctgaagcaacagtcatttttacttcttcacaatgacatgcctcacgtttttcaaccacttctttgatacactcttgctttacaagactgtcttctgaagtagactttaatgtattcctaagagtgaaatctggtgagaataacatgatcgcattatctgagaatccaggggtgagggctgatttctcacattcccgggtagccttttggctttcggcttccattattttacttcctcttaccatatgttcaggaatgcactcttcctttagagaatcacatttaaacacgttttctttttgagaactgttctccaaaatttgatcctcgtcctcaatttctgaagagttatcaatcaggctcttaacaactgtggatttggaactctgtggactagaaccggcaaattcttcatccttatctattgattttttagcctttacgtattttctggacaatttagatgctaggcttcccaaacaaatgactttcacactacgatttctcagctcatcttgatttttgcacaccacatcattacttttaaagtagggactgatcttctgctttacttccctttttgctgaatcactttggccaggggttaaatttgtctttggtggtggtgacttcttaggtgttacatcttctaaggtaacactggttaaatctaccatagacacatttgaatttattaagccaacctgccctggatccacttgaacgaagtcattgttagcacacatttcatcaaggtgccggtttaagtcatatctaggcaccattttactgcaaacggggcaggcaagtttagcaggtggtgcattgttaaaacacgaaataatagaattagatgcttttttcttattcttgctgattgataagcttctacgaggcctttttttgtcaggaggtttcccttctgacatcatgagtattagaaaaactggatgttctgagcaataaaacacaggatatttaaggtgaaagatagcaatggtttacttttactttcttgacttgaaatcaccaaaagtgggattctatatgacctcatgttattcgtctcgacaatttcttcttcctacaagaagaaacacatataaattaaaaacatttttatgaattcagcaaggggaaaagcgaactctgaaacgtttaagagcaaggtctcctgtaacgaggagacaaccctgagcgtgagacagaagaccaagcccctccgacaagctctgtacgcgatcttagtgtcccttactataaaatgacagagctgggcttgtaagggtaatttctaggacatctttaagacctaaaactatccgtttctaaaaagggacaatttgaccacttcagaccctttacaagaccactgtatgagtaactttttctgagtgagatggagacgatcagcgcgtggcccagggcgatgcccgcaccataggccggcgcagatgaaacgccccagccgcgggcagctgcgcccgcgccggctgccaccaccgcggcttctgctgcggagccgaggccccggccagcacggcggacgctgctgggtcaaggccgcgcacctgggacgcgcacctggggccacgcgactgagcccgagccactctccctgctccctagggcctggctgccctcgcgtcctccttccctcggtgccctgtcacccaagatccccgcgcggccacctcgcacctcccacctggctccgcgcgccggcgcttccaggcattcccagccgatccccgcgtctcgcttccacaggcttggcaagtggaggctcgagtgatcgatctcctttcctttccacgttaaaggctcccataccgtaggtgcccaaggcaggctgagccctgggagcggaaacccgggcacctccttcctttcccacccgcagaggcaggcgcctgtgcgcccctgcacgcccccgcacgccttctctgcgactgtgcactctgagactcctctccgcagtcggtgagaagggcaagcaagctaaacgtgtttgttgggggagcattcagtgtcaaagcgagcaaacagcctcctgcggggaagacaggcgacttctgcaaccaacacgcggagctctacttaagctgactcctgcgaataagcgagagggagtttcagttggaaaaccactgagctgggttttccaaaagatagtactaatcaccggttatctgatacccttgaaataataacatcaagaaccaagaaataaaatgtggcgactaggaagtgatgcgtcttgagtatttatgacttctgtttttaatgtaatttatttgtaaagctatatgatttatttaactttcaataatggctgtgtttaacagctgaatttttttttttttttttttttttttttgagatggagtctcgctctgtcacccaggctggagtgcaggggcgcgatctcagcttactccaagctccacctccagggttcactccattctcctgcctcagcctcctgagtagctgggactacaggcacccgccaccacacccagctaattttttgtatttttcgtagagatgggttttcgccgtgttagccaggatgatctcgatctcctgacctcgtgatccgcccgcctcagcctcccaaagtgctgggattataggcgtgagccaccatgcccagcctaacacctgaaagtttaacaatcagccctgaagcactgacaccagcgtgttccagcccaccatgaatgacctagaatgcaagcttcttaacatcaggcggttgtgcttgttgcctttactataaaatcgctgctgcctgcagcagtggctagcgttgtgtaattattgataaatatacactgaatgagtgcataaatgagcaaactaaagagaataaggacataaatagggagttcattaacaagaatgtattgactgcctacctcattccaggtaacattttagatgctgaaaatatgtggcagtgaacaatgaggaatgggaggaaattcttcatgggagggaggggaactcctcatgaaggatacattctggtggaaggagatagagaaatataaaaagtaaactatgtggtgaaattgaagacaagtaaagccagaaacatcttagggttgaggttacaatttgaaagagtggtaagggaagtcctcactgaaaagatgacatttgaagattgacattggcctgaaggaggtaacagtgtggactgagagaaggccatggtaggccaggaaacagcaacagcacatgtaaaagccgtcaggcagaagattatctagcaggctctaagaaccccaaggaggcagaagaaaacaaagccagggaggcagcagagagccagaccatggagggcaagtgttagcaaatttgttccgtaaagggccagggagtaaatgtttgaggcttttgggaccatgtggcctccatcataactaggcaacacagctattttagtgtgaaagcagctatagacaatatgtaacatatgagtgtggttttgttccaataaaactttatttacaaaaatagctggctaacttgccatccagctactgtttgccagcacctgatgtatgaccctgcaggtcattgtatggatttgagcattgactttgagtgagatgggaggaggggagacaaagattttgagcataagctctaaaaggacccctttccctgttgcattcagaatagagcttggggctggtcgtggtggctcacgcctgtaataccagcactctg

SEQ ID NO: 1242029 - DNA, 4001 bp, Homo sapiens
tctccatctccactactgacacattaccccaagccaccaccatctctcacctgaactactgcaatcgtttcctaacttgttcccttctacgcagcaactaaagtgatgtttttgaaacacaaacctgattatgtgacttatcttccctccatgccatcctcatcttaaagctcttcagtggcttccattgctttatcagtccaaaacccttaagtaaggataaaataagtcctgcaagttctgacccatgcctacctccctttcatcactctgctccagccatgcagaattgcttccagtccttcaaatctccaagttctttctgccacaggcccttccacatgtttccatctggaacttaaataaatattcctgcttccatccactgccccccaatcttttattactaattcctacaaatccttcagatcttagctcaatccacatctcctcaaaagctcagtctaggccaggcgcagtagctcacgcctgtaatctcagcactttgggaggccaaggcgggcggatcactaggtcaagacatccagaccttcctggccaagatggtgaaaccccgtctctactaaaaatacaaaaaaaaaaaaaaaaaaaaaaaaaaaaaaaaaaaatagctgggcgtgacggcacgcacctgtagtcccagctacttgtgaggctgaggcaggagaatcacttgaactcaggaggcggaggttgcagtgagccgagatcgcgccactgcactccagcctggcaacagagggagactctgtctcaaaaaaaaaagaaaagaaaagaaaagaaaagctcagtataggttgttaaacgttcccctagtacatcctctcatggcaccagtaaactctcttacatactgtcaccaatttttaatattacatgtgtaattatcagattaacaaatgttatctcccactagactataagtcccctaaggacacgggccgtagctggttttgtttatcattgtatctccagcacttagcacagtacctagctcaaactaggtaacaaatgtttgttgaacaaattattgaacccctataatagggaaaacactgaacccagcactttacattcattaacatgactcccacaacaccacctactaggtaggtgtaatattagccccattttagatgaacaacttttgggattcagagattagggaatttcccccaagattagaaggctaccaagtggcagagagagaagtgaaacccgagtctgtccagctccggactccaagatcccatgctttgaactaccggatgcaaacaggacacaccaacctaaaaaggtgtccagccagaaggggcaggcggcttcggagggggatacgtttaaatcaacctaggcacatttgctaaaatcatcctaaaaccagaggtaagaccagaggcgggtggctgtgaattccctgaacgcgaagtagattccttgccaagagacgctggggagcatcagagatctgaagccaagatccgagaatggcagagccccgccggcgggaaacgccgcggccttcccttccgggttcttcagttaacaagccgtgagcgcaaatacaaaaactataacacgaagcagctggtgatggagaccgcgaccggacaacaaatgcaaagcaaggttaagggaaatttctcagaagtaagagctcaccctcggccaagggggaagaatttaacagaaggggctccgactgaggcacacccctaggagggaaccgcgaaagctgaggcaggcggcgggagacagcggagcgcgcctactttccacgccagagaaaataccagaacgccaagtcaggacaggagcctcctttcccccacagaaccgctccctcccaggggcccagtcccacagcccgagcacctcgcgagccgctctgcagtcacctcggcctcacctccgccacaaacttccaaaaagcccgctcaacccaacgccgccacacttccgttacccgtaacaacaagatccgcccccgcggctcacttccgccgtccgggtacctgcgggcggggtgtaccatgaagactgaaggggtgccgggaagcgtgcgggagcgtcccagctcacagtcggaggggggcgctgcctgtccgaactcgcgctagggaccgccgatgagcacgcgcggtgggacctgagcgtgcccagcgcggtgtcccgacaggttcagcttccctcctgtcctgttgagggagtagtcagtgcgggaggggactcacaattggtggccccgcaggtcttggcactggaaaagcctggaaggcagaggcggatttcatactccaccttgtgccaagggacggtaacccctcagatgtaagccccctgtggctaggggtcttaatggacttttgggagttgtggtttttgtttgttctctgttttgttttgttttgcgctccccttgcgtaaccccagcgtttattgcatagcctggcaaaagcagcgaatatttgttaaatgaacaactgacagtggggcgaagaccgacagagggtgggccgagattctattttgggttgagggagcaccttgcgcaaagggtctgagagcaacgagcaagcaacagagcccctggccagttcagaaggcgaaggtgctcggtgggagtgggaaggcaggggtttctaactccttttcatattgggggcagtggggaaccgctgaaggggaaggacatgactgtgttcgcattgtagactgctgtctcgggcaggtgaggaccgcagaaactgttgaaaagagatgagccaggtggggcggaccgaaggcaggaccccccttagaagactgtaagttgtcccaaagataggtggtggtggcccaaccttggcaatggggacagaaaggagtggaccgcatgtgaaagagattaggaggtagagatttaggaagcccaaatatccggatttgagggggtgtgggcgttgttgaggaatgttcaggcttgagcgactggggttggggggcggggagttaatcctgcagttgactaacacagggagcacaggaaaaggatgatggggtgatgatgagcccttcagagttggacgcaccaaatttgaggtgcctgtgggatggcaagtgaaggaatgctaagatcagggagcatttcagtctggaacctgactcgactcccagccctcgggggtagaacgggtctacatggccagttattgaagaaacagagctattggaggagaatggttcctctcagctgtctagacctgctccttgcttgtgacccttcagcatttttttccttctacatttctgtcccaatactgagctgtgatgtttaactaaaacacggcagcttgaggtagaagatgattcctgaaaggaatcctttaccttgccaaggaagtagatgactttgcctcatctccccacaaaatctcccaggctgcttctgggattcagccatgaatctgtgggtctgggtagctagaacaagctcattagcctctccgagcctccactggcgcatcccagacgtacttactgaattgcctgtgtgtctacccactggcattgatgcctcagggttcttgtctcctcttgttgcacgaatgcatcatctgtgttttccatttgcattaataagtgttacatatgcaaaagaagagaagaacagattcattcagattaacaacaacggtttttcaccctggtgcaggcttccttaactaaggagcaaatcttatccgtctggttcactgactagacactatacactgagaagctagtgatacactgattctagaaaatacatccagttaaaaacaggtttacagtaatggaactaaatgttcttcagaccttgtcaatagtacttgtttatcttaacaacattatagctactaatatttacaggagtccagagaaaaagtacaaatggaagccccttaccattcccaactcagtcctacagtgtgaggtctcaggcttcctatgcctgcatg

SEQ ID NO: 1242030 - DNA, 4001 bp, Homo sapiens
tgcagacaaatttctcttaaaggaaatgtattcccactgtccttcaatacaggaaaatgacaacccttagtcaagtctaattaaaatttttccggctgaaacatctgtaacagcggcatgggaagccagtgaaatggtcagttgcatgtacacaacacaaacaccactagttaaaaatactcccttaaggccggccacagcagccttactgctgcagtgaaacggagagccccacacaactcaaaaaaccagttctcagaaccacttgccctgttctgcttccaatgtagacatctaaaggaagcattgcccagaaaacccaatccgtaattttaataagcataatttacggaagagtcaactactgtgtgatttctcctctgactgtcatgggaatcccttcctttccttgccccctttcaaatacagcatctaccaagatgaccccaaggaaagtactttcctctagaaacaaccagaattgatattgcagggaaaggaacgggcttctcctcttatcccactcgcaactcctccccttcttccccaaggaactcttctcgcctcccaaaatctgcctcaacaatggcccaagattccatttaaccacgtcctctcctttggggcagaaatctctgggagtaggggcaaggtagtttaaccacgaacggggtggggactaaacaaccctagcacctctaaggtgcccccaggaggtcttgccaaggagtcttccacagggagagtcatcctgcccgttgttctggatcttgaaacttgggagacccacaccaaaggagggaaccggttcctttaccctttaagcgcgtcgtgtcctccaccgcctcttctcttggcccgactggctctggtttccttcacgttcccagcctccaaattggcgtccgccccatggctcgtgtaggacgctaaaagcacggtaaatcccagggcgatctccagcagacgccctcgacgcatgatgccgagccgccaccggctcccgccgcctcttgccgcgcccggggctcggtctgcggccgccgctgcgccctgaagcgcaccgcgccgccggggtcccgctatcccgccgcccgtcccccgggccgggctcctcccgccttctccaggcgctgctcccacttcaggcggcccctgccagctgcaacacagagacaaatccccgaggcggggagactttcagggcatcgggatgctgaagcctcgcggtccccattcccaagcccaacccgtgcgccgcctgcgcgtggcgcagttaatttgggtaagggaagaccgtttggtccacagctggctggaaagcccaggcccccggcggcagcagccccggccgatccctcggcctcccgggccccgccagaagagcgcggcgcaaagtacccatatccccagcggtcctaagccccgggcgagctctctgggtttattttttttagcggcacgaattgcgcgcgatgcgcgctctgaacgccccactcctcagcctgccctctccgccaggctggaagccagccgcgccgtccccgccgactccgggcgatgccaccgccccccgaacatctgacgcggagcccggcaccaagagccccgggccaggaagctgtcaggcaggggagggccagcgccagctgtggacgttccgggacagcccctcaccccagtccctgtccctgccctcggcgcggcgcaaacgcaaaagcctccgtggccgcagctccagccccggtggccgcccgacccccgtcgggaccccggctgcacccactggagaagcggcggctccgactcccgaggaggcggcggcggctgctcccagtcgtggccgctacagccactgctcggctccgctcgcagctgtcccagctgtggctcctgtccgcttgtggcacccacagtctctgccgcggctcccgcagccccctcctttccccacctcttcaagtatcgtccgcgcagcggtttctcgcgagagaaatactttttttaaaaaaagaaagaaaaagaaaatgacaccccctccttcgtcgccctcatcaccaccccaccccccggccccatccatcctccctttccactcccctttgccagcctccgcctcggtgcggggcctctcgctcgcaggattagcgcagtgggaggaggcagaggtgatcaggtcctgcccggcctgggactttttgtcttgaggtggggaggggagaaatgggaagaggtggagtagcggttttagcccgctctgcggctgcgaggtttagatccgagattaacctctcccgcgataggtgaagccctaccggagcagaaagctgttccacctgcaccaagaatgcgcgctggagacggttgccccggaggccctggcccgagagaaaaccagtccccgctgcccgcgcctcccggtagcgcgctccctgcgcctctcccgccggacactcagcagacgccggaggccgggaggctaagactgggcgcgtcgcaggccgggaccgcggcagaggctgctgtgccgaccgaggagagggctctgccgcccccacttgccctgggtgtcgagagcccactccagacgcggctcttctgaggctcaattcaagccacccaggcctgaatccagggtgctctctctaagtcggtgtccaacccaggggcctgtaaatgttggaacctaggatgtaggatgggagcggtgaagggatggtcctcttgcccagcccagattaagactggggttcatctggaggactctacttacaccctcccggtcccctcgccctcccccacacacagctgcctctccccaggatatgcgcggcacagtgaatttagtggctttgaaaggtatagtatttgtggcatccttatatggataatgcccaatgatgcctgcaccctgtaacagtttaggaaggcctgaagtcgcacactgggtcctggctgctgtaactggagacccccagaagatcccctgcaagcagccaccagcctgctgtcaagccaataataaaagctcagcacaaacaggtaccctgggaatgtatcttgttgaaagggattttccttatttgtaaccgtttgtaaaggggcccagacagtagggtagagagacctgggcaagttattcaacttctttccaaatacaagatgggacttgtagtgtccaccacacagggttgtaatggtgatgatggacatgctgaactgctgtgatacatgaagatgaaacagaaaaactgtgggaactatgagctgatctaaagccatagtcctgtaagtatgtatgtggtgtactttaaggtctcacctgcaaaaggtctcttagcagattcatgaatgagagccttggtcacacactcctggctgagtaaaggagatcattcattcaagatgtttttactgagcacgaactgtgtactacttagtgcattgttgaactagacttcaacaattttaacaaggcaggttcaacaatttgaacacgactgacttcaacaatttagtgaaaagggcagaaatgtgtctcccctcacacagcaggtagtcaacaaggaaaggcagacttgaaacaaataatggaccaattgttaagcgccaaacaggataagtactgggtgcttgcttggaggatatataacaaggggacttgacctaggctagggctgatcaggaaagggatccctgaggaagtgatatttaacttaagtctaaaacataactagactctacttaggatagcagttctcaaccctggctatgcagtaaaataataagaggctttaaaaaaattctgacaccaggatgggcatggtggctcatgcctgggcctgtaatcccagcactttgggagaccaaggcgggtggatcactttagaccagtagttcaatagcagcccgaccaacattgtgaaaccctgtctctactaaaaatacaaaaattagccaggtgtggtggtgcatgcctgtaaatcttgctactcaggagg

SEQ ID NO: 1242031 - DNA, 4001 bp, Homo sapiens
gtgttgggtgatcttttcttctaagaatctttggaataattctgatacagggaaaaaacaaagagcggactgtccccctgcccagccatcctcagccattcctcccgacctgagctgagtgccagaagaaccagattcagtagacgttcatcagtacctactatgtgccaggtgccactgtgtcatttaatcctcttaccctgttggataagaaaaatttagcacattttatagaagaagaaatgaggttgcaagagtttgaagtatttgagctggggtcacatggttggacgagctgagcggctcagcagagtgctgacagcaaagccctttgctctttatgtgacagcagggccccttgcttgatcagtacagtggcctgggaggtccacttcacaccttgcaggtttggggcattaagctcggttctcttacagtaagaatggaacaacttcaggacatgttgtgccattcgcctccccccaacccccacccatgtcactctagtctaattcctgggccttgttaagcccatcaaaatagccttgtccagtcggggcccaaccccaagtccatcttctgttttcttcctaccagctcaaaagaaaggtggggtcactacgctgtttccttccactcctgtcgtgctgccagcaaatagcagctatgaacttgggtggcagtaaactggctgagtctagttttccatgaacagccagggccagtttgttatatgatcaagggggtgtttttcctcaaaggcagcacgggactggcagaagctcagtgagaggctggttgaatagctctgtgttcttgcctgggccgctctgcccatgaggctgggaccatggagggagcctggcctggtggttcagtgtctatgtctgtgtctggggtgggggttagcagataaacacaagatgtatttgggacatacttacactaaaatattattcactgtttatctgaaattcatatttaactgggcagcctatatatttgctaaaatctggcaaccctagactgggcaaatcataccacctcgtggagcatcagtttgctaatttgaaaaattaggctaagccaccctccttaggaatactgtgtaaatcagtaattcatctactcctggagtctggtttggctcagctgacctgagcaccctggcttctccacctctggctccccaccctctctttcctccgtagtttcccaggccttgagggctgcttgctaggcctaatggaggggtgagctgattgctgcatctggaagccttttcccagagcctgaccttgaaaatccaggcccagctggacccacccagcacttaatgactaccagtacggaggccccacttcttggtgtttgcatgaagcagcccaggacctgtgaggctaagaggaggattagcaattgtttccctcatgattttattgtctcctggggaccctgctttgggcggtctggatgtctgccttgggcctagtttgaggcgccccgaaggtggagccatcttggtctcgtaatttgctcttccctgccccccaagagggaagccagagctagcggggccagcactgctcaggaggcaaggtggcctacctgtcgcacacccggaggaggaaatcattgaccaggctctcgtgccggctgcagatgcttctctggaaggcactcttgagccagtcctcaatgctgcacacctgcacgcggctggagtgccagcagatggagaggctgcggagtgccgggcccaggaggaagttgtccttctggagttcagtgagggaacggaagtgcagcagggaccagagtgcggggtcctcaaacacgtcgtggagctgggagcaggtcctggcaaggctcttcctgctgtccttgtctaggaaggagaagaggtgcagcaggcactcccggttgagctgggttatgtgcatggtgagcagtggccacatgtgagtgcagctgcagccgggggacggctgacctgcctcctctcctcctccccgactctgggccggtggacatatatggttgaggaatggtgtttatttttggctaacaactggtgctgaagctctgcggaggggtgagggaagaaaagccaggacccagacacatgtgcggcagtctgtggttcggcttatgttcagagggattggaggtcctggcagaaaaggagcctattgaagttactttccttaaaagggattttttttttccctttagctgacaatggtgtttagcagtgagcacttttggcttttcccaaggcgttttcattggcagtggtggcggccaggccagctctgtctggctttgcagtctgtacttagggggaaggagtgtaattgtaaatgttaactgttttgattttctagtacatcagtgtgaatcttttgctccacccttactaggaagaaacctgttgcgtgtggagagctaagggtgacggttgtgagttgtgagcagagtccatggctgctgcctcattcctgttatttttgtgccatagagtaattgtctccaggctaggctggttggccttcaagccctgctgcctgccactaggcagggggattttcctgggcctccccaacagctagatttttaccctgagttgtttcataaaagaattttactgaagtagctgctttccaaagttgtgtgtctgtgttttatgttttattggtgctttgttgttgttgttgttgtttttgtagttttggtcaagcagtactttctgtgttttaaatttaaatttacttggctttacattttctcactgataaggccttgtactatgtataacctgtacttcccaaaatgtcaggatggatgaggtagctcttaatgtgaaactgcttgaaacaattttaagttcagtattttagtccatctttgcctttaagttgaccacacaccatccattctatgagtgccctccgttccctcttggagaagccagtgggccacccctgccctctctgactcaactctaggcaaggtgcctggaggtactatccgtgaagctcccccttcctgagtacccgaggcttcacgatatggcagacccgtttcctcatgctgcttcactcccaaacccaggacccaaccttaactctcctgctttgaatcccagtcgttgttttttggtttgcttgggggatgctgatatggtgcagctgtataggccacgttctgcctaggcaatagtgagaagagaatggtttttcctctgccagcccagggaccaccacctcagtggttacttctgtttgttctcccatttggaataagagggaatgggaatccttgtgttttcccatagacacaaatgaagcagcctatgctgaacccacttctggaactaaggtttggtcagggctggtgcagctttgcctttaaagcagaaggcagtcaagcaaagaaggaagtagccattgtcagtggctttcctgagaagccagcctcagctggtgcccctgtgcctccattactccaccatgccaagatgaagtacagtagggggttctcttaaaaacaaaccaaggaggtcgaaaggaagcatttcccaaggaaggggagcaagatactgctgctatttcaagctcatcaatgtagttctgaattatagctgacaccctaatttaggctctgtctaggtgtacttctccacttaaaatggatgctgcaaaaccacaggtggtgttattagaaagccacattatctccactttccctccccaatcctcctcaaaccaatgcttttcagagggtttgacccttaggaataggtggttctttccacttcttgcaaggccagagtggtacttgtgccttccactgagtaagtgtcactgtgcttcagcatggcttccaagttgcactactgcagcccagctggaatggcaaaagattggcagggagaacatttagagcattgcccctctgctgttcctccaggtaggctgcaggaagcatcctagactacc

SEQ ID NO: 1242032 - DNA, 4001 bp, Homo sapiens
gacgaatggaaatcacatgccacctaaagtatgccgtgaaaaaagcacagcatcacttctgtgattatttcctgccaaagacacaattgatggatgttctacaaaatagcctgtgattttcctaagtgtcaagattgggaaaaatcaagcaaagcttgagaaactgttccagatcaaaggagattaaagaaacaggacttactcagagcaaattgcaattgggaacagatctttttgccatgaagaaccttactgggacaactggcaaaatctgaaccgagtctgaggataaaatggtagaaatgtatcagtgataatttcctgattgtgacggctgcaccgtagttatgtctgtctgtaagccgtactaaagtaaacagagtgacagagcagcaggttggcactttactgtcaaatggttcccttccactccccagagatggtacaccctgcagcccctctgactccacagttcgagtcttcatctctcctggtgttggctccccttttgaagttgggggccagagaagcaaaagagtacaggatcagaagttgaaatatttggctttaagttttggttcttggctttctaggtgtgctcactgagcaagacacacccagttgtcttcccggtaaaacagacaacaaaaagttgcttcaagggaagcaggtgaagggaaggttctgcacagcgttgttgttaatagtgaaaatgtggatacttaaaaggcccaacatgccgggcgcggtggctcacgcctgtaatcccagcactttgggaggccgaggcgggcggatcacgaggtcaggagatcgagaccattctggctaacacggtgaaaccccatctctactaaaaatacaaaaaattagctgggcatggtggcgggcgcctgtagtcccagctactcgggaggctgaggcaggagaatggcgtgaacccgggaggcggagcttgcggtgagccgagatcgcgccactgcactccagcctgggccacagagcgagactacgtctcaaaaaaaaaaaaaaaggcccaacatttgatgaacggtcaaataaatcatgacacatccttaccgtgtagtcactaaaactgatgtttacaaaatcttttcacggaacgagatgttcctttaattaacaaaactgggatttaaaaaaaaatagttctcaaagactgaaccaccaacctgcaaatgactgtgcatgacaccccttgctacttgcctcaagctcctctgctaccacgcgaaccaagcaatgcccctccaggtggccggcctccgccaggcctgcggagatccaggttacgctccgatgggtccgcaatactctgcgcacacactccctccataagcggcacacgctgaggacgcaaacgcacaaaggattgcgaacggacgttcattttcgtctctcccacagctcacaaacccccacccgctggcgcagcagcaggagatccctgcgggatccaaagtccccggggtaggtaggtgtcagtcagggcgctagttcggaagaagagccagatatggagaaaaccttaaggggaacttcgcccctcagggaagtccccccggggcaccacggctgggagatacctcgcgggtagggggtcacctcaggtagggcgagcgagccggggacggccctggtgggtcccaagggtctctccccccaccccgccagcctgggacatgcccacggcgtgtccccaggcaagcttcccgcctccgcctcctctcctcaccaggccacccgcagcaacgccttggcgggcaggaaggtgagcacacgctccaccacctccgccaggttactcaacacgaaggtgctccgcgggtctacggaggagccgcggcactcgccgcagcagcctaccggctccattcctcaccagcccgccggaaccagtcctacggcggctcggaggaacccgattacgccagcatagggttgcccggccggcgcgcactgagcaggcgtccgcgccacttccggctggacggggaaggtgggcgtggcaacgccggtgcgttccctcgtctggagcccgtactccgaggtgtactccgttccgtaatacgctcggaactgttttcttcatttttgagattgggtctaatgctgtggccaggcgggagtggagtggcgcggcctctgctcactgcagcttctacctcccaggctcaagcgatcctcccgcctcagcctccctcgtagctttaactacaagctcccgccaccacgcccagctaatttttgtattttttgtagagacgggtttccaggctggtctgaaactccagggctcaagcgatactcccgcctgggcctcccaaggtgctggaattacagacataagccaccgctcctggcaactttctaggaggcctcctgcagtgaaaataaattcttcttctgtgcctgtgcctctcactgccctggcaccgccatatttctgagtttacatctttctctaattcacaaattccttgcagggactaggtagtacttattgctcttcgtagtcccaatgcctgtttaaatagcataagctcgatttataaacggacgtttgcttttaaaaaattgtcttagtgtgtgaaaatcactgcctttattccttgtaaacttagttaactcgttgtaatcttcaggtttaaagtttcgaatgagtaaaatggcataaatagcacctgccattctaaggtagctgagtgagatgattgctgtgaagcacgccccaagctgtgcaccagttccccgccagggacatcagattcacctggaaactactaagttttagcacattcccggtccttatcccagacctcctgaatcagacactgggggtgaggcccagcaatctgttttaacacactttatgacgattctgatgcatgctcaaactgagaaccaccaagaaatggaagcacagcagacacaggtttgtccccacctaacatccattcctcccgccaattccttcctaagggagccctgatttgatcgccagatcttgggcagaaacttggtctaaattagcagttctcattatggcctcaggaccctttacaccctaaaatattgacacgaccaatagtttatgtgtgttatgactatcaatatttaccatattaaaaattaaatcagaacatcttaatgcttaactctttttaaaaaaccgatgttatacattaacgaaatatttttatggaaaacaattatttcccaaatcctccttcccccactggtggatagtatgacattgtcagtggcataagcctcctgagtagctgtggtttttttcttttttttggtagacccagggtctatgttgcccaggctggtctcaaactcctggcctcaagacatccctctgcctccgcctcccaaagcgttgagattacaggtatgagccaccaagcccagccagttttttcccatagtctatttataggcgcagctgcttaaggaagccagatggcccagatgtcaccagagcttcctgaccccttgcggaataccagaggaagataaacaggcgccctccagttacctttagataattaacataatgctaaaatcctctccctaaagaaagctcactggcatcttacgaacatggatgtatgaagcagcatgttcagggactatgcctgcttgtctggaactccagtctgtgcatgccgttcatacctcccccgcccctcagctaactctttaaactccccagcctcccatccctctgggagaaggtgcctttagagtatgagctccccttctccattctctggctactgaatgaaacctgactgcctttcaaagtgggcgttctttctttgtggctgatataaagtagggaaagaggacagtttaccagtgacggcatcactacatttttgcaaatatttaatttgtcttaatagaagacaaatagattctcatatttgcttctgaattcaatctgttgcaaaatcacatcatgtagc

SEQ ID NO: 1242033 - DNA, 4001 bp, Homo sapiens
agatgtaatgctatgaatattttccactcatctaaaatagaagaaaaagcttttattgtttaaacctaaaaaagaatcaaccgaaacagaacatttccctagtcatcttaaagaagaaatgtttttttcagtcgagttttagccaggcagtttctaatcaccaaaaactaaagatatatatttttatgctcagaccctactgacttcaaaagaaaaaaaaaatgctaaaatagcttatgtactaccacaagtcaaccaaaacatatgtagcaaaatcgttatacagttgtaatctgtaaaacgtgttataatcctccagcatagaaaagaggataatgtcaaacctgacaattctggtcaaatacccaaaaattcgtacaattaaactcaaagggcaaatcttaggcataacaatgtgcatttttaaacttcccacctcaactaacagtaaatgatcaagcttccccacaacatcacgggataagatgtaatttaagaatggcatcatctcccacatcaggtccaatgccatcttagtagccaatatatctacaccgagcaacgtggaggaatcagaatcatgtcttgagatgtctggctgcgtgacaatccctcatgatgctgcagctgctgctggttctaggtgcttattttgacattaaagcccagcagcccactgaaggttttacggaaccactcacttgaagggagtaaaaatggatgcccaaataactctttcggagttcttcaatgttaaccgctgacctccttaatttctgatcagttacatcaccagttccactaaaagtaaaacctggaaaggcagccacctcctccaaatggcttgttcacagactatctagtagagaagacgactattagatttcaaggccgagggtgtggttatcttcccacagagggaatgaggggtaggggctgatgaggacgggcagcaaaacatgggatggattattagccctggaagatgaagtgggcattagtggggcaggaggtggtacaaaaaggggagaagtgagtacctacatgaagagagggtaagagagggtgagggaggggagggcccgtgaattaacgagtccgcgcgcgtcggagagaggctggcttgggatgtacctacccgtcgaagcggacggtgccagtctgctgagtctgcacccggtaatgttctaagagcaagcgtaccacctttgcgtgtccattgcgggctgcgatgatgaggggcgtggagcgctgccctccctgctggctgacatagccaagcagatagcggatgtcgctttcagaccggttgagaagcaaggcggccagagtcagcaccttgccctcgctggccgccttgtatacatagccagccaggccctccatggccgccgccaactccaacacccgtttggtcgccaccgctgcagctgccgtgcgcccccggaggccgcgttcgccagcgctttaaacctgggccctcacagcccattcaacagggcgccgtcgccgccgccgcgcccaggcagcagtgcggcccagggaaggcggagacgcagaggaggccgagtgccgcgaagggcacgtccgcgacccagcccgcgcagggaggaaggcggtcagggccgcccgccaggtcccaggcgccggccctggaccgaggggatctccatggcggacgccgccccgggcctcaggccggacccctccttcctgcgggatgcgacaggcgcgtgcccgagctacgggtcgccggccgggtcccgagaggacctcgcgcaccccggatggcgaaagatgggcgcgtctctcctgacccggcccacccggcctaaggcctaacactgcctcctcctgcgctttccgcccttcgccgtccctgactggaggaaacctgcaggctctcgtccgccgagctcagaagtgccaggcgctgccaacggccccggagatcctcgcgtaggggcccccggggcgatgcggaacgctcccgcaagagcggcgccggaacttgggcggggaggaagacgagctttcgcagacagggccgggaggagagggcgggagcgggagggacgctaagtggggtgtctccgcctaagccgaccggcgggcacacgcgggcccggtagagaaaggttctgctgcgcgtagttggcccatcccgtttgggcctggatgtcctcaatgtccttgactcctggaacctcctcctggcccctaaacggccctgagggtctccagccagggagtgggggcggagtgagggcgctaagctgatgggctaaggagaccaccctattttactatagacggtgcgggtcctgcttctgcccctgagccggggttagggaaggggttgcgcgtactcggagggtccatttcaggaaaagggcggcgtttctgagttcccgaaatgtgggagggcttgagagccacaacaccaggctctgagaagggactggaagtacggcctgactttcccggagaaaggggttaagtgtgagagaaagatgggagcgaaggggagctgcgctcgcggtggaaggagcgaggtatcctgggaaggaaagcgagtcccgcgttcagacagagcaggaatctcatcctgagccggcagaacctccgttttctcacagacatcacaagattgttgttaggatttgaaacgatcgtttatccaatgaatattagaggtcgactacgtgccaggctctgcttagcactagggattcagtaatggaacaaataagtcaacaaatgatagacaagatcagttgaactggtatcattaccatttgctctgaagcaaatgaaatagaatgatgggggcactcatttagtttgggtgatcagacaagacctctatgacaagtgacaagaacagacggtattctaggcaaaggggacagctaatataaaagtcctgaggagggaacagtctggtgagctcggaaacagaaaggtcagtgtggctgcagcagagtgggccacagtaagaatgatagatgaagtcagaggatgcaacacacgttagggcctaataacccatagcaaagggtttaagtctactctgtgatgggggcatttgaagggttttaaagagggaagtgacaagatgctatttgtgttttttaaaaagatcactctggctgctgtatggagaataaactctggaaggcaagagtagatagggggacaggccttggattaggatggtaggagtgaatggtaggtgatgaagcttctgggacagtctcaaaaaactcaatatgaaagtgacttcctccctcttcctcccttccccaaaggacaaaatttaccatagagaaagaacaaatgcatttatgtggctccaagggactgggctcggctcaacaagttcacatacattattttatttgaaccccaccattccaattctaggaggtaaaggcctcacttccattgcagctattggtggaggtgtgggtcacttctcaaattctctccattctacagctcagctttacccacttattgcagatccctacagaaacacgagttatttttctccttaccataaacaaaaacagcattggcaataagggctgaaggtaagattctactggtagcgtctctgaaatagctgatagagaagtgggggaagctggctggtttatttggggacttcagggtcatgaaaaaacccagtgtttgacagggacccaggctttttggtctcggattcacacattcagatgtgtgatgacttccttttctggctccatacggcaagcatgcacctcatctaccatctgtctcctctctgcctttctatctctctctgtctctccatatctctaactccgtctccctaccaccctccctctcctctgccaacacactttgattacctgggcacaagctgacctggaggagtgcctggctctttagaaaaaccatctcctcatagccttttaccctattatgttcctgaatcattctacattctattccga

SEQ ID NO: 1242034 - DNA, 4001 bp, Homo sapiens
tcctggtacttgcgcttggcttgggcactgtcccgtgccagagctcggtactggctcttcagcttctcaatgtcctggctgtgggtctagggagagaggagaggccagtgtggggcagcaggtccccagttgtggaagattcttgcctggggtgaagccctggaaaggtcctgtcgtcaggcaaggagcacctggagacttctgggaaagctggctgctgacgtgagagtcaaagatcagagagcctgttaaagacagaccccttggggaggcaaagaggtagactacaggctacaatggtccctccttggactgacagtggtagcctggtggcaggcagggccagttgcaggtgtgcacggcctgtgcagtcacacggggctccacatgtagaagggccctgtgcttggtttcattctccattattgccacctggaaattcctagcaatcttttaacaaagacccccacaatttcactttgcactgggtcctgcaaattatgttcttggcagtaggaatagatgacagcccgagatcagtgttctcgtcccagttctcctgtttatgtgctgggatatgttgggcaagcgcccaacctcagtttccccatctgtaactgagctagattcctcgactagatcagtctttttcttaaagggccagatagtaaataaatattttacgcttgtaggccatagagcctctgtcacaattactcaactctgtcattgtagtcacagacaatatgaaaacaaaagggcatagctgtgttccagcaaaactttataaaaatgggcccacccttgaatcagatgatcttttggggcgaggaatggggccagggtggccaccaggggccgctgtgggtccatggcaaggctgggctctgcacttgaggaaggggtgtggtgcagggagggtgaccagcacactgaatgggggcactaggctcccagataaatagttccaaatcacacagcctctagactgaggagctgggtgggattcaaacctaggcaggctgacttcacggcccgaatcctcgaccttcggggggccatgctgctgcccagtctctggggccctgagaggaggctgcctaggtcgaaggcaaacagactgaccctcattcctctccctgactctcagaacccagagccagatggcacagtgtggaggcgagtaccgattctgagcttctcccaggcacgtgaccggtcactcatccttacactcccagcactttgcccaggcacagaaaaagcacagagaggccttgctgcaagccagctcaacgtaggggaaggaagagaggaagctgcatcaaggttagagcaagccaggcctgcggtcagggacttacacttccccagtgaatccagggcctcttgtgcaaaacaaccccttcgaggctcaaaatttagacagaaatgaccgaagccccagtgctgcccgctcaccttggtgagctcctgctgcagctgctgccactgctcgctgtaggtcttgcgaagctgctgccgttcccggatgagcaggctcagcttgctcaggggccctgagttcagatcctctgcgtgctgccgcagcaagcggctcaggccctcagtttggctggtgatctcagcccaggactatacagcacagatgggggaggcagggaggggggcacaatggctcccaagcattggcctgccagatctccagccactgccccagagggcccccaggagaggaaggagaaggcagatacagccagcacccaccagagtcccatagagacccacctgactgatggggctgtcagggctgatggcccggctctggcccccactgtcctgcagggacatgtggtgaagcagtcctgcatactccctgtcactcttgacccgctgggccatccactttctcatgccctccagtagacgaagctcggcctcctgcatttgctgcaggaccccgtggccctgggggctgcacagctcggaagagaagcccatagtgctgttctggggacagaaaaggggccatccctggaggcaaggcagcagctggagacggaggcatgggacgaggagactggggactgtagggtcaggatggactgcagacggggaggaggtggggtcctgcctcgctcacacgcagccatgggtacccagcagcagcctggcctggggactggccctcattgcttccttagcgtcagggtctcctccgcacgttcgggaacaggagccaacctggagcctccctccccaggcccttccacccaccaccccttacagggacacccttgcccaggtcctcgacaggccaagcctgccccagctgaagcctcaggcgcccacagcctgagccctgcccctgcggccatccccgcccttccgcggcccctacccccacctgggtgggtctctggccctcggaacgcctgctctgcccctgcctgccgcgcccccagctcccaccgctcctccaggccccggggctagaggtacccgcacgggcagctgctcctgggacggcctcggaccgactcaggcccggtgcggaccccggccagttcctgattccgcgcttcctcctcccgcggtttcagttggcccaggccccggggcgggcctgtggaggggaaggggcgggcgggaccggcccgaccgccccgacgcctgccagcccccctgctccgcgctgggccgcagcctctagccggccgcacggccacggaaacggaagggaggagggggccgggaaagaatggcccagccaagagccgcccgcgccccgcaggccccagggcccggcagcgccccgggaacaccgggaaggggcgcaaggtgggggtcaggagggggagcccagggcgaggccccaggcagatgctgggcccagggaagcccagggtgtccgcgggtactgaggggaggcgcgcagtcctagcaccaggccagggccaccgcagaagagaaagagggaaccctggtcccagccctccccacctcacggaattccctaaggagaggctcaggcgccagcttccatttgaataaaatttccaagtaaatatcccgaacagagactgcttctcggatacagatcctagtggttttgtccccatcctcctacccccaggcaggggcttcctgtcccaagggagacctggggaaatcaaggggcaggggttggggagcggacaggcgtggagttttccatttgggactcaggctccccacaagaagtcatcttgattcagtcaggcctccctccaccttaggcctcagccctatagcctgtggcgaccagatcacttcagcccaggaagacacaataggcccagttcttcacactgctggaaaccaggactttgggagtttagtgctcagctcctgaggaccaggggtcaccagccccaccccaggggcaccagctcctccactaggggctggcgcatcctcccgccccttggaggactttggccttctgacttgggcccacatccaggcaggcaggccactgtgtaggcctaactggccccctatcctcagctgcgatgcaggagcaacggtaccacactggagactgggcctggtttgcatagtctgcacgtttaatcactttaaaacctctaacattatctcatgtccattaaatagaaccagcaatgctgggcctgtttaaattacaagaaaaaaatcactgtgcaccaacccagcatcttacaaaaccagccgggctggccacgagggcagggggatgggagaggagggggcacccctgggcagatggctgggtaccaggaatggctagggtagaaaagaaaaggggactcccagatgggaggggactgattgtcctaatgggaggggtgcaaaaggcacgtcagaagaggaggtttgaggggggcatgacaggtcagtgctttctccaccagggcacagtgttgggggggctcagtgccaccacctgcccacctctggcacttggagagccagtgacc

SEQ ID NO: 1242035 - DNA, 4001 bp, Homo sapiens
ctgtaactgagctagattcctcgactagatcagtctttttcttaaagggccagatagtaaataaatattttacgcttgtaggccatagagcctctgtcacaattactcaactctgtcattgtagtcacagacaatatgaaaacaaaagggcatagctgtgttccagcaaaactttataaaaatgggcccacccttgaatcagatgatcttttggggcgaggaatggggccagggtggccaccaggggccgctgtgggtccatggcaaggctgggctctgcacttgaggaaggggtgtggtgcagggagggtgaccagcacactgaatgggggcactaggctcccagataaatagttccaaatcacacagcctctagactgaggagctgggtgggattcaaacctaggcaggctgacttcacggcccgaatcctcgaccttcggggggccatgctgctgcccagtctctggggccctgagaggaggctgcctaggtcgaaggcaaacagactgaccctcattcctctccctgactctcagaacccagagccagatggcacagtgtggaggcgagtaccgattctgagcttctcccaggcacgtgaccggtcactcatccttacactcccagcactttgcccaggcacagaaaaagcacagagaggccttgctgcaagccagctcaacgtaggggaaggaagagaggaagctgcatcaaggttagagcaagccaggcctgcggtcagggacttacacttccccagtgaatccagggcctcttgtgcaaaacaaccccttcgaggctcaaaatttagacagaaatgaccgaagccccagtgctgcccgctcaccttggtgagctcctgctgcagctgctgccactgctcgctgtaggtcttgcgaagctgctgccgttcccggatgagcaggctcagcttgctcaggggccctgagttcagatcctctgcgtgctgccgcagcaagcggctcaggccctcagtttggctggtgatctcagcccaggactatacagcacagatgggggaggcagggaggggggcacaatggctcccaagcattggcctgccagatctccagccactgccccagagggcccccaggagaggaaggagaaggcagatacagccagcacccaccagagtcccatagagacccacctgactgatggggctgtcagggctgatggcccggctctggcccccactgtcctgcagggacatgtggtgaagcagtcctgcatactccctgtcactcttgacccgctgggccatccactttctcatgccctccagtagacgaagctcggcctcctgcatttgctgcaggaccccgtggccctgggggctgcacagctcggaagagaagcccatagtgctgttctggggacagaaaaggggccatccctggaggcaaggcagcagctggagacggaggcatgggacgaggagactggggactgtagggtcaggatggactgcagacggggaggaggtggggtcctgcctcgctcacacgcagccatgggtacccagcagcagcctggcctggggactggccctcattgcttccttagcgtcagggtctcctccgcacgttcgggaacaggagccaacctggagcctccctccccaggcccttccacccaccaccccttacagggacacccttgcccaggtcctcgacaggccaagcctgccccagctgaagcctcaggcgcccacagcctgagccctgcccctgcggccatccccgcccttccgcggcccctacccccacctgggtgggtctctggccctcggaacgcctgctctgcccctgcctgccgcgcccccagctcccaccgctcctccaggccccggggctagaggtacccgcacgggcagctgctcctgggacggcctcggaccgactcaggcccggtgcggaccccggccagttcctgattccgcgcttcctcctcccgcggtttcagttggcccaggccccggggcgggcctgtggaggggaaggggcgggcgggaccggcccgaccgccccgacgcctgccagcccccctgctccgcgctgggccgcagcctctagccggccgcacggccacggaaacggaagggaggagggggccgggaaagaatggcccagccaagagccgcccgcgccccgcaggccccagggcccggcagcgccccgggaacaccgggaaggggcgcaaggtgggggtcaggagggggagcccagggcgaggccccaggcagatgctgggcccagggaagcccagggtgtccgcgggtactgaggggaggcgcgcagtcctagcaccaggccagggccaccgcagaagagaaagagggaaccctggtcccagccctccccacctcacggaattccctaaggagaggctcaggcgccagcttccatttgaataaaatttccaagtaaatatcccgaacagagactgcttctcggatacagatcctagtggttttgtccccatcctcctacccccaggcaggggcttcctgtcccaagggagacctggggaaatcaaggggcaggggttggggagcggacaggcgtggagttttccatttgggactcaggctccccacaagaagtcatcttgattcagtcaggcctccctccaccttaggcctcagccctatagcctgtggcgaccagatcacttcagcccaggaagacacaataggcccagttcttcacactgctggaaaccaggactttgggagtttagtgctcagctcctgaggaccaggggtcaccagccccaccccaggggcaccagctcctccactaggggctggcgcatcctcccgccccttggaggactttggccttctgacttgggcccacatccaggcaggcaggccactgtgtaggcctaactggccccctatcctcagctgcgatgcaggagcaacggtaccacactggagactgggcctggtttgcatagtctgcacgtttaatcactttaaaacctctaacattatctcatgtccattaaatagaaccagcaatgctgggcctgtttaaattacaagaaaaaaatcactgtgcaccaacccagcatcttacaaaaccagccgggctggccacgagggcagggggatgggagaggagggggcacccctgggcagatggctgggtaccaggaatggctagggtagaaaagaaaaggggactcccagatgggaggggactgattgtcctaatgggaggggtgcaaaaggcacgtcagaagaggaggtttgaggggggcatgacaggtcagtgctttctccaccagggcacagtgttgggggggctcagtgccaccacctgcccacctctggcacttggagagccagtgacctatgaacccccggcatggcgagccccacttgaaacacagatgtcagcctgcccctcccactgggaccccctttccttgagcccgcctggctggcccgcctcttcaggacttggggctcaactattcctcactcctcagcaacatgctgcagcccccacacctcagggccagggcagccagggaggagcagggcggacggtgggtgtgagaacgtgggtagtccagctgctacccccattaaaaatacaaaaacaaatcatcagcatctaaagtgaaataatcacaaagtgaaaatatatcctcaaacagcccctgagatccccacaggggaaagcagcatcgggtgggaggccagagaggccggctgggccagcgcccctccccaccacccacccaggggctccaggtctgtgagtgccaacagcccaggcagcccgggctcagaaaacagggacttgggccctgacgggagaggcgggtgcaagagaggggagggtggtcaggacaccagcacagggttcagccagagcttcggccttggctgcgccagcctggtggccagtggtggtggaggcacggagcacaggggtgggtcatgggacacaggccac

SEQ ID NO: 1242036 - DNA, 4001 bp, Homo sapiens
gcgcccaacctcagtttccccatctgtaactgagctagattcctcgactagatcagtctttttcttaaagggccagatagtaaataaatattttacgcttgtaggccatagagcctctgtcacaattactcaactctgtcattgtagtcacagacaatatgaaaacaaaagggcatagctgtgttccagcaaaactttataaaaatgggcccacccttgaatcagatgatcttttggggcgaggaatggggccagggtggccaccaggggccgctgtgggtccatggcaaggctgggctctgcacttgaggaaggggtgtggtgcagggagggtgaccagcacactgaatgggggcactaggctcccagataaatagttccaaatcacacagcctctagactgaggagctgggtgggattcaaacctaggcaggctgacttcacggcccgaatcctcgaccttcggggggccatgctgctgcccagtctctggggccctgagaggaggctgcctaggtcgaaggcaaacagactgaccctcattcctctccctgactctcagaacccagagccagatggcacagtgtggaggcgagtaccgattctgagcttctcccaggcacgtgaccggtcactcatccttacactcccagcactttgcccaggcacagaaaaagcacagagaggccttgctgcaagccagctcaacgtaggggaaggaagagaggaagctgcatcaaggttagagcaagccaggcctgcggtcagggacttacacttccccagtgaatccagggcctcttgtgcaaaacaaccccttcgaggctcaaaatttagacagaaatgaccgaagccccagtgctgcccgctcaccttggtgagctcctgctgcagctgctgccactgctcgctgtaggtcttgcgaagctgctgccgttcccggatgagcaggctcagcttgctcaggggccctgagttcagatcctctgcgtgctgccgcagcaagcggctcaggccctcagtttggctggtgatctcagcccaggactatacagcacagatgggggaggcagggaggggggcacaatggctcccaagcattggcctgccagatctccagccactgccccagagggcccccaggagaggaaggagaaggcagatacagccagcacccaccagagtcccatagagacccacctgactgatggggctgtcagggctgatggcccggctctggcccccactgtcctgcagggacatgtggtgaagcagtcctgcatactccctgtcactcttgacccgctgggccatccactttctcatgccctccagtagacgaagctcggcctcctgcatttgctgcaggaccccgtggccctgggggctgcacagctcggaagagaagcccatagtgctgttctggggacagaaaaggggccatccctggaggcaaggcagcagctggagacggaggcatgggacgaggagactggggactgtagggtcaggatggactgcagacggggaggaggtggggtcctgcctcgctcacacgcagccatgggtacccagcagcagcctggcctggggactggccctcattgcttccttagcgtcagggtctcctccgcacgttcgggaacaggagccaacctggagcctccctccccaggcccttccacccaccaccccttacagggacacccttgcccaggtcctcgacaggccaagcctgccccagctgaagcctcaggcgcccacagcctgagccctgcccctgcggccatccccgcccttccgcggcccctacccccacctgggtgggtctctggccctcggaacgcctgctctgcccctgcctgccgcgcccccagctcccaccgctcctccaggccccggggctagaggtacccgcacgggcagctgctcctgggacggcctcggaccgactcaggcccggtgcggaccccggccagttcctgattccgcgcttcctcctcccgcggtttcagttggcccaggccccggggcgggcctgtggaggggaaggggcgggcgggaccggcccgaccgccccgacgcctgccagcccccctgctccgcgctgggccgcagcctctagccggccgcacggccacggaaacggaagggaggagggggccgggaaagaatggcccagccaagagccgcccgcgccccgcaggccccagggcccggcagcgccccgggaacaccgggaaggggcgcaaggtgggggtcaggagggggagcccagggcgaggccccaggcagatgctgggcccagggaagcccagggtgtccgcgggtactgaggggaggcgcgcagtcctagcaccaggccagggccaccgcagaagagaaagagggaaccctggtcccagccctccccacctcacggaattccctaaggagaggctcaggcgccagcttccatttgaataaaatttccaagtaaatatcccgaacagagactgcttctcggatacagatcctagtggttttgtccccatcctcctacccccaggcaggggcttcctgtcccaagggagacctggggaaatcaaggggcaggggttggggagcggacaggcgtggagttttccatttgggactcaggctccccacaagaagtcatcttgattcagtcaggcctccctccaccttaggcctcagccctatagcctgtggcgaccagatcacttcagcccaggaagacacaataggcccagttcttcacactgctggaaaccaggactttgggagtttagtgctcagctcctgaggaccaggggtcaccagccccaccccaggggcaccagctcctccactaggggctggcgcatcctcccgccccttggaggactttggccttctgacttgggcccacatccaggcaggcaggccactgtgtaggcctaactggccccctatcctcagctgcgatgcaggagcaacggtaccacactggagactgggcctggtttgcatagtctgcacgtttaatcactttaaaacctctaacattatctcatgtccattaaatagaaccagcaatgctgggcctgtttaaattacaagaaaaaaatcactgtgcaccaacccagcatcttacaaaaccagccgggctggccacgagggcagggggatgggagaggagggggcacccctgggcagatggctgggtaccaggaatggctagggtagaaaagaaaaggggactcccagatgggaggggactgattgtcctaatgggaggggtgcaaaaggcacgtcagaagaggaggtttgaggggggcatgacaggtcagtgctttctccaccagggcacagtgttgggggggctcagtgccaccacctgcccacctctggcacttggagagccagtgacctatgaacccccggcatggcgagccccacttgaaacacagatgtcagcctgcccctcccactgggaccccctttccttgagcccgcctggctggcccgcctcttcaggacttggggctcaactattcctcactcctcagcaacatgctgcagcccccacacctcagggccagggcagccagggaggagcagggcggacggtgggtgtgagaacgtgggtagtccagctgctacccccattaaaaatacaaaaacaaatcatcagcatctaaagtgaaataatcacaaagtgaaaatatatcctcaaacagcccctgagatccccacaggggaaagcagcatcgggtgggaggccagagaggccggctgggccagcgcccctccccaccacccacccaggggctccaggtctgtgagtgccaacagcccaggcagcccgggctcagaaaacagggacttgggccctgacgggagaggcgggtgcaagagaggggagggtggtcaggacaccagcacagggttcagccagagcttcggccttggctgcgccagcctggtggccagtggtggtggaggcacggagcacaggg

SEQ ID NO: 1242037 - DNA, 4001 bp, Homo sapiens
tttctgcctaagttgataagtcatcaacttaatacaagctcattatgactcaaatgaataaggataccacagattcccttctattttatcattatacacaattgcaaaggaatgcatatcttagcacagattaagtattttaatttacatcatgaaaatattatttcaaagaaaatcaaattaataaaaataatttccctactctttaaactagtgataaatagcttttagtgataatttatgaagttctaaattagatatcttaatgagttttgcttagacaatattaagtcacattttggtgtgaataatattatttacattttgcttaacttatgagcattttcaggacaaggagtatatattttcaaattggcttggattatcaggtccaactataatgtaagtagatttgccctgttaaaagagatatttttaggggcatagttcaacatagttcaatttagagaaattaggtgacattttatttaattttttttccaagaagcaaaaggaagatgagaaaacatatcacctgaaaattgatccattaacagattgctaaggttcatgagcagtacttaaaattacttactgtaattattcttcatctcttgggtcccttttactttgcctcttttatcgatcctcaggtaccactgtgttcgacagaagagtcttctcactcttatatcccctccttccatgtaatcataacttcttgtgtgtcgctcagggctggaacagttcacatttgtagccatttgctctggagtcatgtcattgcaagctaaagatatagtacccactagacagataatgtgaaagcatgatctgtagagcaaagttggcaggatccatgtcagtatccatttgtgcattatagtgtagtgctccgggtgttcatgaataacataatgaaaatgaatcttgagttgattgttactcctaggtcattgacctcttcctatctgtgaattgtagattgatttaagaaagagtagttgctctttccaaattgttagccttatccttttagttcctgataacaacacaggattcctccttaaataactctgttgataaatcctcataaaaacagttcgtagtaagttcagttgctgtgacgctgtttgctatttgacttctgtttgcaatgagagattaagaatagggaggggaggagagaggaagataaaaaattgtatgtgtaaattttagtgggtaagtagtagcattagaatacagtataggttattctttgaagatacatttaaaacagccttcacagaggatgtcaaaatctttaccactttatgtgtagatttataaaatttatgcatgagtagagacaaaacagaatatgactgtaccattcattccaattgctattttgtgagaaccatactgcactcagaactattgatttaaattaagtttttacaattactgctaacaaagtgtaactgctttctccctagacttctttattatatgcttttacatttgtggttaatcaattattttctcctgaactgcccaggttttttaagttaaatgtcaggattgctctggagaacttcaaccttatctttatgttctacagcataattactatagttacatggctcaaaaatcttgtaactttactttcctgctcagtactaaaatcagaaaaagagataaacttttagaaaacattcagcattgttttaaaagacaaataacagtaacttacttgttttgttgctaacagctggatatataagaattccatgtctgttgtctgcctggtgcaacttgagcctttctactgtagctacaaactatttctcagctgaaaagttctccagcagaatcataattgtttccataaatcaacaggcagaaggattttctctctgtgtgtgagcgcgtgtgtgcttgtgtgtgtgtgtgagccttttattcagggcttttcgataaatacctttgctgacctcattggaagcaattaaaacttagccagtgagctgttagttgaatacaacagcgagaataaaaggaggcttgtatagtattcaatggtcatgagagggagctatgaacatgttttatgcttaaatctacaagtgggtacctactttgtagaaacagatctctggttctgaagcagttagaaggggaaagggaattttttaaaccttctttgcaatatagcagttgtattatacttggaaaattattcatttgaacatatatatagggttttttaatacttagaaaatcttttccatagctttatgatacatgcatttcttcaattacttctttgtgctcagaatgttagaacaaaactggtatgtgttaactaacatatgagtgccttaaagcactgtgtagataagttgaatattatcacatcatacagagacaattcattgaatatgaatataagtacaatttttatgtattatattcctaggctgaaagtgagaagatctagattcttatttgtgttggaccactaatgaccagtatgacttcgggcaagttacctgctgttccagagtctcagctgctacatttgtaaaattggtgtattggtctaatgcctctatggtgctttacaattctgtgatctgtgacttatactcactactaatataaggaacagggcacctacttttaaaagctgttattctttaaaaaggaggaaatggtttcacattgattatcagtgtttgatttttgcctcaataagaatattggaacaataaatgttaatttagagatggaattataatatgtattgctaaggtaaataagtgaaagctattttactttccagcatgagttctctcctttacttcctgttctgttatacatgaagtagtgctcaagtgttgtattagattcttggtgtagaataattgtgttgtctatctaaatcagtattaagaaagtatattaaaattatctttttcatgttatatactcctcaaaacacacacgcgtgcacgcgcgcgcgcgcgcacacacacacacacacactctctctctctctctctctctctctatgtgaaatgcactactttaccaccaggtggtgcatgtagaccaaataggaaaaggaaattaaatctactcaactggattatagtttatgtgatttctctttgtatctgtccctttagggaacagaatgaagagcacagaatagttcagatgtacccagttactcttcatatgccaaatgttgaatgttccacatttattaaagcagagggggacagactctttgatcattgcatctgttgaaagctagaaagctgaaaacatcctatcatgtattctctaaaaggaggaagagaaggaggaaagaaaatataatgttattgtgttctgaatcacactccgctagtttgggaggtaacaataatgagcaggctcagaattcctaggacttagatattgcttctaaagaaataaaagttatcaatagtaagtttacagtgtaaagatattcaagagctactaaatccatttgttccatactgaacctacagtttttaaaccaagaaatcagtaagtgagaagtccacatttgctaactaagtgctaaatacttaaatgaaagaaatggatagtttgttagcaaagagtgcttagtgcctccttaatatctgctacataggattaactgtaaaatgggaaacaaaagaataaaattgtgatctatgaaagtgcattagatgctattacactctgtaatttggaaatatgatccaagtaatattaatgaacagattaatatcaacaagggaactgtatcaatggtttaaattctttgattatcatttttattggagaattattaattcaggatgggcccacaattcattaggaccacagctataatggagaaccaaacttagatttcactgtgcccttattatgcttatgcttctaaatgaattctccaggaactaagaataactttaggcaactgtagatggggt

SEQ ID NO: 1242038 - DNA, 4001 bp, Homo sapiens
tgctctaaatctggaagccttccaaccaatgtggaacactctaatcacaccacaaacacatattttgtcaaatggcagactttcaaaggaacgatagactttctgcggaggtataattaaggggtgaggaaaccctgtaaacctgggctatactgccatcttgcatcatttcctcatgctacctagttttataagtgcgtttaccatcaacgtttaaattcacggtgacagttaccctttcctacctgcacatctttgtgtatatccctcttgcaatattccagataaaaatcaggacgcatgaaaagcacttctggttaactccatactccttacaggacaatataatttgactataatcctttttcaactaaaagaatcactaacaggcaactaggattcactttgggaggaaacctggaaagaaatacagcagcaccatattttatgttaaaatgcaaaacccaattctacatacacttttggaatcagaggggccatccgctggcttagaattggaccgttcaaacacagctcttagcgactccttctcatgtctcatcttgcgcttgagagcttccagctcagaggtgtcagctgtggtcccctttctggggggccggatgaatagggctttaaaagcctccagggctgtctctggcgactttggcttgacctcaccaccctgggtttgtggtactccagggccgctctggctctcttggtcagcattgcagcccatctcttctctcctgggcgactcagggtctgctcccttcggttcagttttgggcatgtcaatgttgagcagcagagagagctgctccaggagagtgggagtggccttcggatcagttgctttcttctcactcttcactgtctgcagccctgcctgcactaaggacttctgcacaggctgcgtcaatttgagcaaagctaagtccccatcctttggtttaatttccgtgatggtctctcctccctcagcggtagcccccttcttcagcacacgaagcccactgaaaaaagctggaagttggaatgacttctctccagagacttcttttttagaagaggcactctcagtgataccaacactcgaattctggtttgttactgcaggtaggtcttgggacccttcttctcccacctggtcctggctggggcgacgctctgtctgaagaccaccgttgccagcttccagtttgctgctcatctcaggtggaatcctttgaggatcttctgcacagagctctgcaccattcatttccccagtgacagtattttccctgaaacctcctgggttttctttggactcctgagatggctcagataaaacaccactaggggactttgggccattggtgctgcttccctcctctggctcctggccaccatcatcagagtcagaatcactggtggtgtgcaccagggtcccacgaacacaaatgacatcgtcttttgtccctttcaaagtagacagtggaagcagctcttgagcaaggagagatgtccctgcttcttttctctgacttccctctgattctgtctccacgcttgcaattttctcatcatttccgaggtcaggtgaaacccgagaccctgcttcctgtggatccaagccattgctggaatcatcctgctgagatgtgggattcacgtctaaactatggaatgctttcagcacagcatcttcctcttctggattcacagattctaatttactcgtaaacccaaatagggatttcatagagaacttactcaggatcgactgagccacttcaagtccggcttctggttttgctggttctgacacatcactgccatccagagaattatcaacgttctccatgtctcagtaatgcccttggtggaagttctgacttgtgttaccttctcctgcgctctcagtttatccactccatctgctcttaatttacaggacagagagcaacaggacccgggagtcaggctgtcagccgcacagcaaacacacttggtctctttcgggtcacagtgccctccttccggtttgtgcgatgatgtgttccagggcaactgtgaaaaatctgtggagtctatgcccagaagcagccgaggctgcgcaccttactacacacggaccagggaggctgctcttctgaaacttccgtatttattcccggggacaaaagcctttttgtcatagggaaagtcagcctgccctgtaatcccaacccaggacttcacgaggagctccgccccaggccggcggttctcctggtggcattcaacttcctcattggtgagcaagtgaaggcttctgaaagtgctgagccggcaagctgatactgagggcacttagccactgcccagagcagcctaagggaatcagaagtaaatcagcagaaaacaactgaaatacttctgacacaggccttctttttcatctggattatgatcagagaggcctggggcatccaggccaaaaaactagcagtacacccagatcagcagccacttacgaagccgcaatcaaggaaacaaattaaagaaagcaatagatcatctcaaaagtgcctagaactctcaaagcagttaatttactgcccttgaagctttttttaagtgctttcttccgcttccctgcaggtttcatctggaatgcagattttagctcctaaagcccgtgagggataacccacacgactggtttcagatgactgctgttttagctctgccctagctgtctcagtgctctacaaacaggtattaggcaagcacacccaccacacccagtgtccaccagcaacagggtggcagagtaaacagcccaggctccgcaggaatgattaccctctacactccctgtgccaaccgcaggcttctttctgctcagcagctgtgacttcctggctgccttagaaatcctggcagcagcaggacacgcctctccccctttggtgtcccagccaactaaatgaaacctggcatgacacagtgtaacacacaacctgccctattagacaaaacaatttgaagatccccaaggatccacgttctcctaaagggcaaaacatctgaaaagtctctatcagtcagatctctatcacagacccaatttgcctcaacaaaaacaggacagacaaaacaacctccaaacatcagcccagtgtagtttctaccactctatttatatgctgggaaactggcaacaaaggatgggggtaaaaattgcagccctgtttcctagctgcatagctgcctcttgggacagctccctatctacctgaaggcctcaagtgttttccaaatccagtcccactaagcaggcatgcagtgagtgcctgggatggacaggacactgttctggttggagaggcaagtcaaactggctgaacagtaattgccatctctgtttgagcaaaggtccaagaagattgtggtcaagtgttaaacacaaacagtaattccttctgcaaaatggaaatggtagccataaggaaaatgacagtcttgctttatctgcaggagtgggtggctgcatgtcacacattgataacttgagccatgttcttcagtactaaaaacaatctaagcatcaatactgagaaattctgattgcaaaaatacatttctagcaatgtattcaaaaggaacgctcacacaaataaaaacgcatcattgcatcccatcaaccactaagggtaagtaaaacactttctaaatcttgatttgatcttgtgttttaaacaggtacttctctgtttgctcctgatcatagtatttttgggaattattaactgaggcacttaatcaaaaagccaccaggacactgcagaaaaattcaatggtgtcttttaagtctaagaacaagattcttgtctagaggaaatacccattgattaaaatcagacatctgcttcttcaagattgtagaaagaagaaatgatcacaacagatcataagatcagtctttctctttttttttttttttttttttttttttttgagaccgagtt

SEQ ID NO: 1242039 - DNA, 4001 bp, Homo sapiens
tgcataatttttaggaacgagactggcctttattatccttcttgactagtattattaatagcagttactataaattccccacttatgtgccagaaactactgagtattttacctatattatctcgtttaatcctcacaccttctcctaagagacaggtagtattatccctattttacagacgagaaattaaaattaaagaggcaagcaacttgcaaaaatcactgagctagtcagtggctggtccaggatttgaacctatgtctgacaggtttatgagtttagccattacaatatactgtctcactactcttctccattgtttccctccattgaggccattgcttctttgttcctgcaatatgtctaactattcattggtcctgctcctggactgtaacacagttgagagaaaggagactagtgtttagatatctgatcaagaagacccgagacctcattgattcattgtggaagcaacatcttccacaacgacagttaatctggtatgcaattctcagctatactgttttccctcccaaaaaagggttaataagtctgtgatccaagagatttgcagtaagccctagaaacagctaagcaacggctgttgaatcccattggtgtgcctataagatgctacctggtgtagagaacagaatataattctctctcctaggaatttagatgcgcccctccgcccccctgccaatacacacgcaagggggcatagcagatgatggcacatgtcccatatgcaaacatgaatagtaaacatgctttagtacagctggagctactgtagcagaaagtcaggttgtctgctactccacctggtcttcttaaaggattgggtctggacattcacctctcagtgactgccactccccatatatatcacaggttcaggctctgcattcagcccattcggagtgtgtgagtgctaacatggaactctccaggagacagcaagcagaaatgtggatgattaaaataaagggttttctttggcaatctcaattgcaaatgaggataaggaaaatcctcccagctcacactctgctcccagctacttgttcttgagttaaatgagggcttggctctggcctcagggggcaagagcactgttcgttatttggtggtgggggagggggttgggggatccgtcagcacttacatgcctttagagaatctgcctttacagaacttgaagagctctgatggaggaacagagatgctgtggtggtagtggccttggaggtggtggtagtggcaatggtgatgatgatgatgatgaaagaagaagaaaacggtgatggtaaatgtcatctataaacacaagcaaaaagcagcaacagatacctttctagtcattgccaaccatagtcatgaagctgcttctgttcccaatgcaatcccattgtggtgctccccctctgcgctaaacacatccagcttcaaaaaaaaaaaaaaaaaaaaaaaaaagctctgcatctctccgtcccccgccctcccgccctcccgccctccacctttcctgtgccaagctgggaatgagactgcactggcgggtcaagggggctgggacctgagagtcaacgacaggagttctgtagtgaggagcgttgggatgacccggagggcccaccaacgtacttgggagcagcttggtgggggagctggaggaaccgacacagaaggggaggaagataagctggcggggtaaatagacttgatgcctcattccaagaaccctgaaagccacgggggaaggcggagcaggcagcctttggtcgggaagaagagacgggcagatggccagcagaacagacaagactctctttacctgaccaatactcgggaggctggtcccgagtcccagctactcgggaggctgaggcaggaggattgcttacggcaacagccgtggcggctgcagcctcgaaggatgctgcgctccagtccagagccaaagcccaaaggggcagctgcgccgacctccaccgaggctccgccccacaggccacaggccccgccttcctagcacgcgccggcctgacgagctgtttgggggaggtgagcagtaaactgatcggcagggctgaagaccagtggaaacgtgcagcggcgcccgaggtggcaggggaggcggggcgggaggcggcggtgcccaatcagcagccgagccgttgggccaggctgggaagcagtgctgtcttttggcaccgtctgatccgggctgagggattgaaggcggtggtcgctaagctaggtctaagacggacagccagggcgacaaccagtctctcgctacgtgtccccagcttccctgtttccgagcgcctctcaaggcgcacgctctggacttgttcagatgggggaagggaactggtctggaactccccactattcccgaggttcccacgcctccagatccggagaggccgtttcgctccagtggcctggcccccctgccccctcagcctagccgttcttgatcgtaagtgctaaaaggaacaaagaaggagaattcaagaatccacacataagcccaaaccctgacaggagccttttcctctcccatctcctgcctacgcttcctcctagtagctttttaactgctggcggttaagttactttgactggtttgaattaaacgcaaaataggtttaggctgagaaatgggccagacccttggcgatctgagaaagaaagactgagtccggatgtcaagaggcctgggcctcacgagggagtttgtctgcttatttgaacacctcagagttgaagatcttgttactgctatttctgtgctggtgaatcagtacagaccttgatgccaaggtactgttttgtccccaagtgtctaatcattactgaaatgaactaccttcaaacctttcctaagaggatttgaggccttaatgtcgttgagatttggaatgtgatttgagtgacactgagatcttttccaagtaggtaggcaagaaaaggcattgtctttaatctgcttttggataaatgcgaactgtatcacccatttggtacttgaagatagaattttgtcctgaatagattctgttttcaaataagtaaatgggaaaaaaatttggaaggtatttttaaggtgatttttttcactattttttttctagaaataatagtttattggaactctgatttattcttaatcacaatattagccaaacactgataggccctttatttatttgtttttttaacacacggtctcactctgtcacccaggctggggtgcagtggtgcgatcttggctcactgcagcctcaaccccgtgggctaaagccatcctcccaactcagcctccaaagtacctgggactacaggcgggcaccaccatgtccagctaattttttaattttttatttgtagggacagggtttcaccatattgcccaagctggtctcaaactcctaagctcaagcgatcttcccttctcagcctcccaaaatgccgagattacagttgtgaagtgctgtgcccggctccataggcacttcatatacattatctccttcaatcctcatatcttccccttgtaaattccacttatagataagaaaactgaggttcccaaagttcaagtaattgtccttgggtcatgttcgtagttaggagtagagtcaatacgaggtccgtatatctcctgtctaaaaatcatcatcatcagttagaagaataagaagccctcagtacgactcttaattccttgatgcttttttctttttacctgaaaattgtcatatagggatccagttttcacactactgacttcttgaaaccgcagcctcagaagcacctttaagagtgaagtgtcacctctgacatgtgttaggagcaattgcaagtcaactttgctcatagaagggagctgtgatttcctattgttgggaaggaagtaaaattttgcagggcttaagtcaaactaggttttaattgatgtagaaatcttttaaagtccacc

SEQ ID NO: 1242040 - DNA, 4001 bp, Homo sapiens
ggtttcggggcctcagggaggggatggttcggctcaggtggccccggccttccttgatgtgggggcgaggacaactcccacgcgcctctcggcccatctgcaagtttgtgtttggtctcctgggtccaaaacaaagttctcttggggcaaggcgggttggccgaaggtgaaatgaacaagttagggtggcggtcccaggtgggggccggcaggactgggagccagggaaggcgagtgaggtggtggggaggagaacgagagggggcgtgggctcctgcgggtcagtgcaccgccaccgagtgcaaggcggaggccgggctggtgagcgtttcgctgggggtggcggggctgctttggctggtggctgtttgcgaggacgtggggctgagcgagggcggcgagttcgagagcaaggtggggatgggcgctggcagcgcaggcagcgcgggcacggcggccggcgtgggcttaatgggcacggggatggcgggcagcgtttggcccgccgcgtggcacagcggcttcaacggcacgccgtaggcgctgtagtcgccactcgccatggagatgggggtggccgagtcgatcatgccggcggagccatacacgtgtggccagccggtgcccagcgagctgcccatggtagtcaactggttggggagcgggtaggcagcgggcaccggctgcatggcggagaaggccagccccccaggcatcttgtattcccgcgcgatgatgttctcgatggcgaaggggtgcttgaagcccgagggctgcgccacgccgcccaagttgtaggcggcggcgggcatctgtggcaggtgcgtgcccgaggccgccagcgcgctgagccgcagcttggcctgctgctgcaggtactgcgccgcgtcggctggcttgctgggcgccaggtggtcggacttaagcaccttgaagcgcttgcggcgccgcaggaagctgccgttctcgaacatgtccccgcagcttgggtgcagcgcccagaagctgcccttgcctggctggtccggccgccgcgggatcttgatgaagcagtcgttgaaggagaggttgtggcgcagactgttctgccagcgctgcgtgttctccctgtagtaggggaagcggtccatgatgaacttgtagatctcgctcagcggcagcatcttctcgggagagctctggatggccatagcggtcagcgagatgtacgagtagggcggcttctggtcgctgtacgtgttgcggccgggccgaggcatcttcttcctcgccctcttcttgctctgggtccgcgcgggccggcggactgctcggatctgggaagggggtgggtaatagggaaaggtagcatggatgcacagagacaccggcggggtcagccagaccgagtaacagacttcgggggtcgggggtggggcctgcggcgctcgatcagccagcgcccggactctttcgccagcaactttgcgggcttagtgggcgcgggaggggaagccggcgaacggcgcgaggatagccgggaagtaagtcggtactggggccagaatagggggcagggacggaacagagagctgctcaccttaaagttgcttcaagttgcgcgtccgcatccgggaggacgccgctgcgcgccgcttctctctcggcgcgcactcgacgcgcactccgcgcgcagcgtccgggtccggttggactcggcgcgaacctgggctcttgagctcagccccgcagcgtcccgtgccgcccggtccgcgacgctcctggagcgtcctgcgggcggccgagctcggctgcggagtcccggcgcggatggtggcagcgacgtgttagggctccggagggcgctgctgtgggctccgcgtctccgctgagctaggtggctgcctccatgtcctccctcgaaccatctgatagttttaagcggtgacaggagcagaaaagacccctgtagcggcgcttcattaatgtgccacttcttagctatcatatgacaatcgccttgggaggaggaggaagaggagggggagcgggggctgcagagggaggggactgagcgagaagggagagcccggccagctctggtttctttcacacctatttacatggacaccttggccaataggaatcacttccagctcaagactgggcgagggggaagagcctcggccactgggcaggcagctggacgcgccggccggtgtgcgccgtgtgaaggtatgaggaagcggccgccgcggaagagggagccaggcgaccactcacgttcacagatggagcagccgcgcggatgatgtttgacatggaaattgcttggctggggtattctgtttcctctgcgttgtatccggtttgtatcgttaggtaactttaggcacggctttcccctgaagccgacccttttcctgcgcttagcactacccggggttggttgcatgggttataataatgaaaacacacccttgccccccagtccccggagagttaggtcgaaatttgacttgactttcctatgcagctgcttcagctttgtatagttagtgtgtagctttgaaaaagtgatggggtttacaaatactttcaaaatgtgattggacatccccatgtaagaacccattttgaatgtaactgtattgaccaaatttttaaaaattaaaatagtgtatctgggcgaagagtccaggtatttgctttaaaagtcctccgggaatttggttggacacaggatggaggctcaggagctgttggggcaaatgttgtgcggacctggggagggcctgagtttgtttgacacagtttatcaccaggtaagcctcaggggctctcgcttttcccaggtggtttgaaactttaggactcaggcacatcctggaagttttcattttacacccggaactccccttcccagccctcccacccccccaacctcccaccccccatcccccaactgccgctttttttggtatggagaacttatttaggatttagagtgtagcaaaagccgcctgcgatcccactaagacagcagtatcttctacaacttggggaaagaaccatagagttttccttcttggggagcggggaatgtgccttgggtcactccgcctggtgcgagcagcaggctcccttcggttcggattcgccttggaagggttaaatgaatcattattattattatcattatcctcatcgtcgtcgctgccgtcatcatcatcatcatcaaattgctatgaaataaatagtgagtcgaccccgcctgcatgcacgcactctataagtacacaccaggagttcccacgggtttctgcacattctccgacctttaaggtttttaaaagacattcattttactgcgttgttaaaaactcaatacttacagcccacacagaatcatcttcaaagtccagaaatgggagaactttttttttccctagacgtggtgatcgtagagaattctgggtgttaagtttcaacactttaagtgatattagagcattattagtggagctgtttggggttagcataaaaaagatctttcagcgcgcgaatgcacacacacacaaacacacacacacacaacttcattaactacagtttcggaggcggtcaataactcaccaaaacgtaacttaaacacgatgaatttaggagattaaacaatttcattaatattgaaatggctctggctctgggctgcctcggttgagatgcaagcgcacgtttttcaatattaacagaagtgcttgaagaaaagaataatgtcaccttcttaattcggaaaaaataactgggaggaggagatgggtgcgaggggctgggggagggatgttgacctgtctctgggggtatggctcgagaagggcagataaatgtattgcccttctcagcagataaaccacttggactcgggtggaacctctgccaagctttggccggaggcagccgtactcatcccagctactcgcgcttcaggtcataacgaggtgcggcgtttggggggttac

SEQ ID NO: 1242041 - DNA, 4001 bp, Homo sapiens
tcaaattatcaccataaaatatacagtgctacaatgcctaaaatgttgggaatattgcttaacctaataagaagttcacagatcctttccatactgatttaaaagatcctatgcccagtatttaacaaataagcacatgcacatatacacacacactcactacagaaatgcatgaagggaaaagctgataagaaaagctcaatttctaaatgttcaaaaaagctacatgcagaaaatgttaatttcatataagatactgtctttttgctacatttcctcacatgggtaaaaacaaaagcaattcgccaaagtgatgccaaagaatgacaacattacatatacttaacaatccctgtgttctttagattccatgcaaaaatcacaatgcacaatcattaacatgtctagacagtggacacttactacagtgtggccatattacaccaagcttaattttttaggtggcctagatattttataaaattaaattgtaataatgtaaaatgagagcagtaggaaaataagtacagctatagtgggatatagcaagcacaaatccaataagtcctatttaactcaaaaatattttttttctaaatggtaataaaaactacccacaattataataccaatcaagcaacctcaaaggttccactaactgggaaaaaaataactatttgcctcactgcaatactttaaaaccacaaggttaacaatcatttctagcgaaatggtgatgtgaattgtgttttatttgtattctacaccttggcaaaagttaatgacctgcctcggaaattatttcacataccccaaaagtattcttaggacttataaagtctaaatctcacactccccttgatatgctattggataaatgctttaaattttaaaacaaaaggataaagacttttaaaaagctctagacaatatactcaaatggtgaagatatcaactcaatgtattctcataccccagcaaaacaaaaaaagcaaaaaaaaactggacatggcacaatgatacaataggaacaaaaagtagtattccactcattcagcaaggaaataatacagagcatctctctatcatattcaactacaaaaatcctttcacttgatggctagcatctttatgactgcttagtctgtatttaagtagccttaaaaagagattttgtgctctttctctaccctcatggatctttggcagcagtcagcacttatgcccagagctggtttcgaggggagggagaaaagggaaagtgaggagaaggctgaactgagcacggagtcagcagagaccagctgctctcatacactacccagtgtctttctcacacaccgctattttccgcgattgagcactgtcagcaaaaataaataaataaggaggcggggggcaagaagacactgagggtaggacccaggccgacagtttttgtctgtcacatctgagccagaagcctcctcctgttttcctgctgcaaaggcaaaggatcaggtgagacccctctgggtccagctcaattagcttctccacaaagagcagcttccggcgatgagcgcaggatcctcctggctgatgaactaaacacgggagcattgtcaatgttttcaatctctgactttttcataagggaggagagagggctgtgactgcattcccgggaaagactactactcctgacgtgcacacagcagtagcgaaggaacatgagcaagaggttgtaaaaatcccttcaaaaataccaggttctgaaagaaatgctgttgagcattaccgtattgttggcgtttttcctaagtcgccgattcttcctggccacttccaagccccaaatcgctgggacttgttgctaaatctttacctcacgtcccctagaaccgcccaacacaataaaatttggggatcaaaaggcgggagggggcctaaatctctaaaacccagaggactgggcttccttcaataggccactccgcatgggctgcgcgttcagttctaccttctgaaagctctgactcacaaatggtggggggaggaattatgacataaaccattatccttccaacccaagaaagataagaaaagccagccatacgtccttgcccgggcagagagccaaagcctgcgcccccgacggggcggccgggctaggagcctaccgccctacccgcctccctccgggcgccccggaaaggtgcaccttactcgggcgggctcgaggaaccaggacggggcgccctcacccagggagagcagggtaggacttaggggtgtgggacgcggagactcgccccgcggcggcggtgacacaccgggtgccagggctccggcaggggctccggtgaagacgccctgcactagggcggtccgccgcaaccaggaacggacaaagcacggcgctggggctggggcgacccctgggcggcggccgccgccggccaagttgaccagacttgggggacaagggggtcccgcgggcggggcggggcggcgcggcgctgacctggatggtgcaggtgtactcgctgtcgtccagcagccgcacggtgcagctgtactcgcgctccaggctcctgctgctgccgctcatcaacctgctcagcatcttcccgcccgcccgcccgggagcgacgcggcggcgctgcggaccctggaccaggcgtccctcagcccggcagctccgcaccgaccccaggcacctgcaccatcaccccggccccgtcgctgccgttgcctcctgctggcctcgttcctcctccttatcctcctccttccctcagccgccaccgcctccccccagcccagatcaagcgccgggctctgtctcctcggcgccccagtgcccgtgcccagctcgcggggcggggcctcaactggagggggccaatgggggtcagcgcggcggaaccgagtggcagaccgaaaagccaatcgagatagagtactgggatgatgggcgggataaagaagcaatcacagaaaagcagtcggacctagtcaagccggagcagccctctagcgtcccaaacgaggggttcctctccgccccgtggttcctatggatgctgtttcccctcccccgggccaggtgtgagcacccaactggattgatgtctgccgcctgaaatacacttgatctgcgtttccgaagccaagcctcgcaccctgcaacaccgcggttcccgccctcttgggagccggagcgaggaggcggcagggtgctggatcacagtccctgcacctgcagaatgcggatacctctcgctccagatagggcgactgcccccgacctgtgctgtaccctaagttggcccgtctggcctctgtgctccagccctcttattttgggaaacaggagctacttaaataaaagctaaagggacctcagaggttctgaagtacccaggtttaatcccctaaaaaaccctccactctaacaccctttgcctcctttttatttcagaagacaaaaggagactgctccttcagctggtagggagcagaggaagcaatgaatcttctccttgcacttttagaactggaaattatgtcttcagactttctcaatagaacaacatagtatgtcaggaggtatacatcacaaagaattgtctccttctctttgtcaccccaaatttacagacttcaaggttttttaccagaacttcaataagagatattctccctcaaagatttttgatgtgaggaaatgttataaaataattatgtcggccgggcgcagtggctcaagcctgtaatcccagcactttgggaggccgaggcgggcggatcacctgatgtcaggagttcgaaaccagcctgaccaacatggtgaatccccgtctctactaaaaatacaaaaaaattagccgtgcatggtagcacgcacctgtaatcccagctactcgggaggctgaggcaggagaatcgcttgaacccaggaggcagaggttgcagtgaaccaagatcacggccattgcactccagcctgggggaca

SEQ ID NO: 1242042 - DNA, 4001 bp, Homo sapiens
cacactccccttgatatgctattggataaatgctttaaattttaaaacaaaaggataaagacttttaaaaagctctagacaatatactcaaatggtgaagatatcaactcaatgtattctcataccccagcaaaacaaaaaaagcaaaaaaaaactggacatggcacaatgatacaataggaacaaaaagtagtattccactcattcagcaaggaaataatacagagcatctctctatcatattcaactacaaaaatcctttcacttgatggctagcatctttatgactgcttagtctgtatttaagtagccttaaaaagagattttgtgctctttctctaccctcatggatctttggcagcagtcagcacttatgcccagagctggtttcgaggggagggagaaaagggaaagtgaggagaaggctgaactgagcacggagtcagcagagaccagctgctctcatacactacccagtgtctttctcacacaccgctattttccgcgattgagcactgtcagcaaaaataaataaataaggaggcggggggcaagaagacactgagggtaggacccaggccgacagtttttgtctgtcacatctgagccagaagcctcctcctgttttcctgctgcaaaggcaaaggatcaggtgagacccctctgggtccagctcaattagcttctccacaaagagcagcttccggcgatgagcgcaggatcctcctggctgatgaactaaacacgggagcattgtcaatgttttcaatctctgactttttcataagggaggagagagggctgtgactgcattcccgggaaagactactactcctgacgtgcacacagcagtagcgaaggaacatgagcaagaggttgtaaaaatcccttcaaaaataccaggttctgaaagaaatgctgttgagcattaccgtattgttggcgtttttcctaagtcgccgattcttcctggccacttccaagccccaaatcgctgggacttgttgctaaatctttacctcacgtcccctagaaccgcccaacacaataaaatttggggatcaaaaggcgggagggggcctaaatctctaaaacccagaggactgggcttccttcaataggccactccgcatgggctgcgcgttcagttctaccttctgaaagctctgactcacaaatggtggggggaggaattatgacataaaccattatccttccaacccaagaaagataagaaaagccagccatacgtccttgcccgggcagagagccaaagcctgcgcccccgacggggcggccgggctaggagcctaccgccctacccgcctccctccgggcgccccggaaaggtgcaccttactcgggcgggctcgaggaaccaggacggggcgccctcacccagggagagcagggtaggacttaggggtgtgggacgcggagactcgccccgcggcggcggtgacacaccgggtgccagggctccggcaggggctccggtgaagacgccctgcactagggcggtccgccgcaaccaggaacggacaaagcacggcgctggggctggggcgacccctgggcggcggccgccgccggccaagttgaccagacttgggggacaagggggtcccgcgggcggggcggggcggcgcggcgctgacctggatggtgcaggtgtactcgctgtcgtccagcagccgcacggtgcagctgtactcgcgctccaggctcctgctgctgccgctcatcaacctgctcagcatcttcccgcccgcccgcccgggagcgacgcggcggcgctgcggaccctggaccaggcgtccctcagcccggcagctccgcaccgaccccaggcacctgcaccatcaccccggccccgtcgctgccgttgcctcctgctggcctcgttcctcctccttatcctcctccttccctcagccgccaccgcctccccccagcccagatcaagcgccgggctctgtctcctcggcgccccagtgcccgtgcccagctcgcggggcggggcctcaactggagggggccaatgggggtcagcgcggcggaaccgagtggcagaccgaaaagccaatcgagatagagtactgggatgatgggcgggataaagaagcaatcacagaaaagcagtcggacctagtcaagccggagcagccctctagcgtcccaaacgaggggttcctctccgccccgtggttcctatggatgctgtttcccctcccccgggccaggtgtgagcacccaactggattgatgtctgccgcctgaaatacacttgatctgcgtttccgaagccaagcctcgcaccctgcaacaccgcggttcccgccctcttgggagccggagcgaggaggcggcagggtgctggatcacagtccctgcacctgcagaatgcggatacctctcgctccagatagggcgactgcccccgacctgtgctgtaccctaagttggcccgtctggcctctgtgctccagccctcttattttgggaaacaggagctacttaaataaaagctaaagggacctcagaggttctgaagtacccaggtttaatcccctaaaaaaccctccactctaacaccctttgcctcctttttatttcagaagacaaaaggagactgctccttcagctggtagggagcagaggaagcaatgaatcttctccttgcacttttagaactggaaattatgtcttcagactttctcaatagaacaacatagtatgtcaggaggtatacatcacaaagaattgtctccttctctttgtcaccccaaatttacagacttcaaggttttttaccagaacttcaataagagatattctccctcaaagatttttgatgtgaggaaatgttataaaataattatgtcggccgggcgcagtggctcaagcctgtaatcccagcactttgggaggccgaggcgggcggatcacctgatgtcaggagttcgaaaccagcctgaccaacatggtgaatccccgtctctactaaaaatacaaaaaaattagccgtgcatggtagcacgcacctgtaatcccagctactcgggaggctgaggcaggagaatcgcttgaacccaggaggcagaggttgcagtgaaccaagatcacggccattgcactccagcctgggggacaagagcaagccaccgtctcaaaaaaaaaaaataatcgtgtcaacatagaacattaatgctgtaataaatatattaatttaaaataatgaaataggcataatttcctattactttcatttgcactgttcttgtttataggtataatgtgtaacaaaaatgaaactctacattagcctagaaaactatcccgcctttaaagtatgcttcttccctagtgtctttggattccaatattttccccaatttttttttttttttttgcatggggagattcattctctttcattctctctctctctctctctttctctctctctctctctctctcttcctccccctctccctccccctttttctttctatcaccttagtaacctggactgctcttaattggttgcattctcctttgtggcatttaatagccataggagcaggattctcttttcaatgcaatttggatggagttagttatgagtctagaactagtaagtcaagtgttccaggcataaaaccaggcatgcgctccactactttgtagcttcagcaggtagtctgatgcctgaaacataataggtattcaataagtgttgaactgaatacaaaaattagccgggtgtggtggcatgcgcccgtggtcccagctactggggaggctgaggcaggagaatcgctggaacccgggaggtagagattgcagtgagctgagattgtgccactgcactccagcctgggcaacagagcaagactcggtctaaaaaaaaaaaaattgatgaactgaagtaaatggaattgacaggtgttctacagcacttaaatcccagaggaagaagacctgtgaagaaactcaaa

SEQ ID NO: 1242043 - DNA, 4001 bp, Homo sapiens
attcctaccttagtatctcccacctgggctagaagccttctacctagtcactcatggagagtgaccacagcagtgtggaatcatccatggctactgtgggaatatttgtcccttgaaaacagccgatgatgaaagaaggcaccaagcagaacagcctcataaccacgcacagacatcagctatgagatcattcctctcccagggggcccaggcagagatatggtattctagggatggaggtcccttggagagcatctaattcaatttcctgattttattcagcaggtcatggatgtttaaaaaaaattcctgattttaggatggcaaaactgagatcttgtgaggataaaggacttgcttatagccaattttcttttacaaaaatgtatctgggctactctgtatttagccctgtgcttgaatccaagcttttcacctgacacacaaccagtcaggtgaagagcttggattcaaacccaggtttccattaaatcacaccatctacagacagaggagcagttcactaaaataatgcttacattcccatgtgctacccaaagggaaatagccaggattctgtatgaccaataaatcatcatgagaaattatttcaaccagaagctggaatgtgaaacaccaagttgaactgtcagaagactggaaaacacttagtgcaaatacagataagaacacatgctttcaagctggcacttgcccttcgaacacacaacacaaagtggtctcaacacaaactggctcagtgtcaaagtaggaattttgcaacacaccctacagttaacagtcacttttcccctcaacacctagactctttcttaacaaaatcaggatttggggagaaaggaaagttgacaataaactgtcattttataaatggtgaaactaaagcttagagaagtaaagcaattagtcatagtccattatgaatgtctttgctggataccctttcctctatgccaagggaagcagttaaaaaaaataaaaaagatgtttgtctaaggcttatatgggaggtgtatccctgtgcattacttagaaaagtcccccaataatttttttttttttttttttttagagacaggttcttgctatgttgcccagactggtcttgaactcctgggctcatgcaatctgccacctcacttggcttgtttattaaccttttatggatcatgggcatatctactgaatctactgaaacctgtgaattctcttcccagaagtgattccataagggcaggaacataactttgcctataattttagctcttccatgcagcccttggcaattcctgagccacagcagtgaaagaaagcttgccttaaagtgttacagtgatatgaaatgattcaaatcagctttgcagacactgcccgaacctgaaaactttctataggaggaggctgtatgcataacaagtgaaaaataattacgatgctgttttttagtatttgaatcaatgcatgaagttattatttttcagcatgtacacacagattaaataaaatgtatttacaacacaatagtatagccagatgatattcaacatctatatttccaaactgttctaccaaatggttctaactaatgggtcccagcactacagatatcctaaagacacattataagaatcaccagcccctgtctgccttcatcagagcctctcacatcctgtcccaacatcatgttcagttaatgcgaattcttgctttaagaaggcacagaaaacatttacactatttattgtaatttaaacatctgcaatttaccatgatatctcttcccacctacaggaaagatattgcattaatattgcagcattgagtttctaataatacaatttgcattggaagaatatgactaccccaaaacttgcctgctaagcgtccataaatgcttcctttaactcagaggacctggagttctgctagaaaattgaatctgtgttcagcaggctttccttcctagtgacctctgcatgccccacaggctacccctgcctattttacaccagagttctgcaagtggggcaccaaagctggatggtaacatgagctggctgcagccacaaatagcaacaggcctgccatgagtgaaggtccaaatatagacctgctgtggctgagttgccacttcttactactcaagtgtcaccaggagaggtcacatgccgtgctctgagttactttctgtgctgtgaggggttttagacttgtggctctaccatgggtctcagatggctggtcatgtggagagggctggggactgtcacggcaagaccaggaagaagattccttttttttttttttaagtgaatgagtttctaaaattatatgcaaaattatgtctgtgtccttatagaatcacttccgggaagagaactcacaggtttcaatagattctcagaggtgctcatgaaccatacaaggttaaaaaacattttgggggcacttttctaatcaaagcacaggacacacttcccatataagccttaagcaaacattattattttttttttttacttgccatggtatggcatagaaatgggactatccagccaatacattccttatggactatgattgactatttctctaagctttagtttaataatttataaaatgacaatttagtgttaatgttcttttcttccaaaattctgactctgttaagaagttgaaagagtctaggtgttgaggaaaaaagtgagtgttaactgtgggtgtgttgcaaaattcctactttgatgctgagcccacagaccagcataacagtataatctctctctcctctctctctctcacatgcacgcacgcacacacacacacacacacacacagtgtaatagtcagagttgtccagagaaacagaaccaatagaatgtatacatatatggaaacagatttatcataaggaattgactcatgtaattatgaagaccaaaaagtcccaagatctgcagttagtaagcggaagatccaggagagccaatggtgtggttctagtccaaaggccagcaggctcaagaccctggagagccaatgtttccatttgagttggaaggcaggaaaaaaacccatattcccacttgaaggcagttaggcaggaagaattccctcttattcaagcttttgttctattcagaccttcaatcgattggatgaggcccactcacatgagggagggcaaccagttttactcagtctactaactcaaaggttaatctcatccagaaacaccatcacacacacacacccagaataatgtctgactaaacacctggtgacccaatcaagttgacacattaaaattaaccatcatacatatatatacatatgctatagacagtttatattcccctaaaattcccatgttgaaaccaaatccccaatgtgatggtatttggaaatgtggcctttgggaggtgattaggtcatgaaggcaagccctcatgaataaaattagtgccattacattgggggtcccagagagctcttccatgtgaagatgcagtaagaatacaggtatctacgaaccaagaagcagcccttccttaccagacactgaatctgctggtgctttaatcttggactttccagcctccagaaccatgagaaataaatgtttgttgtttacaagccacccactcaatggtattctgttatagcagcctgaatggactaagacatatattaatatatagagagaggataattttattttttcttttcttttttttttgaggcagagtctcactgtttcgcccaggctggaatgctgtggtgcaatctcggctcactgtaacctctgcctcctggattcaagcaattctgatgcctcagcctcctgagtagttgggattatagggcatgcaccaccacgcccggctaacttttctttttctctctctttttttttttttttttggtatttttagtagagacggggtttggccattttggccaggctggtctcgaactcc

SEQ ID NO: 1242044 - DNA, 4001 bp, Homo sapiens
cagcctgtcaaagtgctgggattacaggggtgagccaccgtgcctggccaaaactataaaatttctaaaaaatacatgtgactgtgggttaggcaaaaatttcttagatacaacatcaaaggcatgattcataaaagaaaatatggataaattggaaggcatcaaaatttaaaacttgtagtcttcaaaagatgttaagacaaggaaaacaaaacccaaagactaggagcaaatatttgcaaaacacatatctgacaaaggactcatatccagaatatataaacaagtatcaagactcaataacaagaaaacaaaggatttggacacacacatcaccccagatgatgtacggatggcaaaagagcacatgaaaagatgttcaacatcattacccctcaaaaaaataaaataaaaatcacaatgagataccactacacacctattcaaatgacaaaaattaattttttagaaaactgacaataccaagtgctgacaaagttggagagcaactgtaacactcatattgccaatgacaatgcaaaatcatcacttttcaaaactgcttagcagtttcttataaagttaaacatatatttaccatatgactccacaatctcattcatatttacccaagaaatgaaaacatattcacacacacaaaaaaaaacctgtacatgaatatttataccagcttcatcaataatagccaacaactggaaagaactcatccaaatatgcctcaagtaggaaatggataaatatactaccgtagatccatacaatggactattactcagcaacataaaggaacaactgatacacagaacatgaatgaatagcaactgcatgatgctaagctgaaagaagcctgattcaaaaggccacagggtgtttgcttccatcaatatgacattctggaataggcaaaattacaggaacaaaaaactaggaagttgttgccagggatggcgttaggggagggattaaatacaaagagcactagggaatttggggttcatgatgaaacttccgtatgctgattgtggtggttggtaattacataactgtatacatttgtcaaaactcacagaactgtagattaaatgggtgaggcttaccataagtaagttatacctcaattttaagttaatatatttgtgccaatctttctttagttatgctcatacatccataaaatatattagaattgctgagtcaaagaacacttatgtttcaaattttggtagttcgccaaattgtactccaaaaaggctgcaccaaattacactacttcccctacactgggctggggcccatctggttatgtcaaagctgtttcatcttctccagtctcataggtgtaaaaggtatctgtgaatttggtttacatttcttcacgagaaaagttgagtctctaatcaattgtttgctgtttgcatctttttatttttcctgtgaaatgcctatttgcatcctttgccgtttacggtctagtttaaatggctggtgatcagttctagatcttggtgggaagatccaaatctcgggaaagtagaagccttggttacaggtcctaatgttaggtgattcctggagaaatagcctccgcggaggcagaagccgctggggccccgcccccaatgagcccgcccccgccctctcattggccctgtccgctctccctgacagtccatctacatgccaagcggcccgacgcagctccgccccgcccactcctcggcgcaccgccccgcgaccgagctccgccctcatctgcgcggcccctcaccttcccgccgggcctcctcgaggaactggccgccgtcagtcagggcgcagatggccgcagaagcgcgccgcagacactcgccgcgccagccacttacccccagaggagaggggtctctcccgccacctcagcctctctggtagtggaagaagccgccggtccagatccctcctgcctgtgggaccgctgtttccctggcaaccagatgcgcgatgcttccggtctcgcgatagcggaaagggctgtaccatccggaaatgggaccggggccggcggctgttggagccctgcgagctgggacggccggcgtgtgtccttccgtcttcgctgccgacggtgggggttgggagcgatttttcgtctttaggttggattcggaacgcggacgtctggatgcttgtgtatctctgtccctcatattgctgtgatgccttacaggtcagttatcctctccgagcacagtttcctcctccgtaaaatgggaacaataataattcccttcttacaagacttgtgcagctcaaaaagaccatgtatgtgaagctctagtaaatttggggtgctatggaaattttaaaaatatgagttttgcacagattcggctacagtccaaaaagagttataattgctttttgcaccttctttcatttcgtagtttctctaattctcagtgcacgaaaattatttccctacgtccacaaactgattttcctcacctccattgccatcatttctcctgctttccagtctgaacagcacattaccgtttacagggcattttcacattcatggcccctttgtcctcattgttttaactaggtacgatgtggttttttttcagcgaagcaaatagtcgtaggctgagttgccgaaagaacacagctgcagtctaggcgagtgctgggtataaaaacctggctataaatgccatccctatgctcctgaatcctgcatcttatcaccagcccagacttccctgaactccagactcctttacctaactgcctatttggcatatccacttagatgtgtaagcatctcaaacttaacacgggaaaaaacaacttctccagagtcccccacccactttctatccatctcagcaaatggtaatttcagcctgccatgcctagaccaaaaaccttggagtcatcctcaattcttcttcctctctcactctacaatctatttgtcctatcagctcaacattcaaaatatattcagaatccaaacattcgtcacaacttcagtgcttccattcaggttcatactgacatcatctctaaatgataaggctttctgttggctctctgacctccactcctacctactgctttcccctggtaaacctggttccagcctcactgtcctcattgttagtgtttctgtgcagggatttcttcccagcatttctcagggaatttatgtggctttccaaatctcaaaagaaaaaaagttgcaaactgaagaaaatgggagaaagtatcctaatcctcctatgagaattaaaacttagcagccgacctagagatgttactgaagaaattcaccaatgtcaagttgaaaaccagcacaggaaatgctgagttcgaggttgaggtgaacattttcaggaaccaggtcaggagcacttgggagagacatggccacaatctcatcagtcagtcttgtttgtagttggtgccatgaaagcctatgttcctggccctgtgtgccgctggcagtgagtcattcttgcaaataaaatataaataggttgatactcattgtatactttatacaaattctatgagcagtgttcaaaaaagtaacgggttttggattcaaagtaaatccttaaattgacagtttccaacccatgattctgggtagtacagttaaccctgctaggagatctattatttgaatactcctcaataatgttctctgtgttttccagcatttgaatatttgctataaaccccacttcttgtaaacacttctaaatttaatagttctcattttttaaacaaaggcttcagatacttgtaataatgagtaaagaatatgaagaaggtagagaatattttaagaataagattttgagaacagctggtaattctgatttcctgtttctgcatcccaaagatcagtatctgtcaggaatttggaaacacttgttgttcctccagtccaaatacacacacacacacaccagcctgaaatacagttt

SEQ ID NO: 1242045 - DNA, 4001 bp, Homo sapiens
cagctgcctcttgggtccagatgtcatgcaaccacccccctgcccccaccaccaccaaccaccgtgctgtgagtcctgctggagcccccaaatcgaggctgggttcatctgggtctagcccagattccagcacactgtagatggagccgcagctgtttggcgttaaaagtgattaaccaactatttaattaccttgcagcactcggaaagaaagcaggcgtcaggcgcaactgaacagtccccccaaagaaagagggccagcctccctctatccaacaaccccagccatggtgaggggtggggatggcttccagaaaatgagacccccacagacggctctgccacagcatgtgggacaagggaggatccccgaaaagagtaagaactgaaaacaatgaatgaatgggtttctccccacccccatcccagactctgactcaccctctagtcccagtttgtctcaaacctggaggcttgctgtatttctcatggtcttgtttcacatgggactctgttccaggctgtggccagagagagctgtgggtgctcttcctggctgtgttcttgggcaaagcccttttctccagcaccagaacctcctgacacagagagccactctgggccactcaaattgcgcctcaccccaggaccgactgctgtttcccagacactgggggtctggctctgacacagccacagagcaggccacgggagggccactcggacacccaatcagtctctccctctagcagagacaccacgcggggtcctgttaccagccctgggaggctcccgtgaatttatcgctcccagtccctgcccactatttgctggatgatcttaacaagtcacttcctctccctgggcctcagtttccttggtggtaaaaactgctggaccagcggctttcaaactttttaaaaagccacagaatcctttttaaaaatcaaatgctccgtagaagcccaatataggaaatagtaaaacgagggctgccctgcttgagaagaggtcaggcttggctaatctcctatgctgtgtccacacctgctcagcacccgccctcaccaggccatatcacccgggttctcctcgcacttcccaagtcagaataggaatcccaacactctccggtggatgagggtctgcaccccaggggccagggggtagaggatgatgggaaagcgggttctgaccagacaagtgactgccgtcagacctgtctggcaagcaggccgccccttggtccagccacacagcgggggcacaggggcctcggccaggccgcggcagaaggcagcccagggacctacctgcgccggccgccggcgcccgcggatcccgcacccgagtcctggccgcacaggtgtgcgggcgggggcgaggcccaagcgaaggagcccccgcctcgcccccggccgctcctcccctccccgggcggaacgcaggccctcctcggccgcggagtgggcgagccggcggcagccccggtggcggcggggaggctggagcacccggcgcctgcggaattttctccccatcccgcccccagcaggggccccgcaggcgcttcctgaggtcagagggctcgccctggccccacgcggaaaagtaccagccacggccggggggccgagacgggcccggcgcgctcaggtgggctgcggagcgccctgtctgctcccggcagctccaccctcggggccggccccggggccagttccggaaagccggcgggcagccgggccccgggggacccgggtcagggctgcaccggcgccagtgccccgaccctccccggcccgagcacccgggccgcggagcccgctcctggggcagagctccacggcccggcccggccggctcccctcgggcccggctcccagacgcgcttgccttccccgggccccgggccccgcgccctcgctacttaccctggggagccctggcggggaaacttttccaggcgaccgccgcggcggctcgggcgcccctcggccgcccatgccgcccgggcccgactgcgggcccgcgttcccagcgccgtgggccccagcgcgtccggccccgcgcggcggccctgcggggccttctggggcgcccgctgcctccggctcctggtaggggcaggtaggaagtggggcaggcgatcccaaagtcctcgcggccgcccggcgcgtccctcaggccccgctgccgtgcccccgcccccgggctcggctcttcgccccgcgagctccccgggaagacggccgcggagacccgaactcggaaccaaagggaaaggcttgggggaggcactccgagccctgcctcagccggactcttgggggactggccctctccgtcccccgcttccccactcctgggcgacgaatttgagcctgaccgggttaagtgcccagggacggcggacctggggtcctccactcccaggtcgagggaggactgcacggcggcaggaccagcctcctcttggcctactgttagaggagtcacgacttcgtctgcatttgtatagacaggtggatatatgagcagaagtagcccacctccttttaatatttttagcttttttttctttttagacaccaaccgcttgccaggcaccaggccagtcactttacattatctccttcttatgtacatgatttaatccacataatcctttcaggctgagattattaatcccattttacagataaggaaactgaggcgcacaacgtttaaataatttgcgcaaagtcccacaaccagcagacctcagatcctgcaagagactggggtgtttggcagagcctgaatccaagctacttgcaatataccagccggagcctctccctccctgggccctagaaaacgtttgtgctacttggctgaggccgacgctgcttgagctgagaaagaaaagaaggaaaatgtggccaggagcttcccaggctgggttattccaaggtcgcagagtagcctgtgcccatctcttctcgctccctgtgagataacctggctgcacaggatcagcctgtggcctccttaacacaggttcccgggtaatgggaaaaaaaaaatccactgagtgttttctatgagccaggcaccattgagagctcttttcctgtgtcaacccgttttatcctcaccacatgccccatgaggtgggtacagtacattttcctttaagtacctttgatgtatcactgtctgcattttatagaggaggaaactgaggcccagagaggttaaatcatgataattcttaaggcaactggtgaaaaatcaatcagcaaaccggttcaaatccctggggcactattttttgctgggacaccttagacaagttaatttctcagggacttcctcaatttacccctctataaaatggagataatatttagtgaatgggatcaggtacgattcgggcacctttacaaacactgcaagaactggaaactggaggaacaatgctgggtcctcaaagttgagcgggaagataagtccagttggccttgtcccaaagtggggacttcccctccgccaaggaactaagacttgtaggggccacactgggtagcgccagccacagttgggagaacaatactccagcagtcagactgaggcaggaagtgactcacgcttcttccttaggctgtgagcaagagaactccattgaggggaaacagggacagggctggccccacctacccacttgtcctcaggcctagaagaaaggtcagcccagaaaaatagcaatacttgctgcttcaggtgccccacccatcctggagactggccccaggggagcccgcagtgggtctttggagggggaggggctagcctaggctcagatgactgccacccaggcagaggcggtgggaagtggagcttcccagtttcttccagccagcttgcctcttcaatctgcataaggcaaaattctttaaagtgggttctcagaggtgcctccctgagagggaggaatgaggacaggattgggcagttga

SEQ ID NO: 1242046 - DNA, 4001 bp, Homo sapiens
atttatacatgtatatttatacaaactaaagcgaaatctggaaggatacacacgctaaaaaatgttaacggtggttctctcaagatggtgagaattacaagtaattgttattttcttctttgtgtcactgtattctccaaatcacctaggtatgttttacatgggaataagatgttggcttttcaaggttcttaaatgaatggcatctatacaactcactagggtttcctagttcagcaaagcagattcagccatagggagttattcgcaaagccccacagctcctaggaagaaaatgggtgaccctaaatgggatggtgcttttaggggccatgtcctgagggggtgcgggggtggagatcacagaggcttcacctccctctatggctgagatggccgctatcagcaaagtcagggccccagactcgtttttacagtttcctggggaacgctggggccgccaagccctgccctgcctgggcctggaggcccccagctgcccccttgcttgctccacgcccaccagccttgcgtaatccgagcccaggcagccagggcaaacactggctgctgagccaggagcgccaaggtgagactgaatcaatagtccgagtgttgtttttcctccttcagcaaacagacggcgggacctctctctgcccggggccacataactgtccccacatagtgcccctgactagccagaagccaaggccctggaggaagggggggaagctaggggaggtcccagcagtgctgctgggggtatcccatatcagtgccaagctccctgagcagcagcagggccctggatgcccttagcacttccatagccaaggccactctgccggataccaaaaggaaggcaccccagctcacgtaggccctggggagctagagaggcaggctcaccacagaaaactccttgcttctccagaagctgcccttagacacaaccggcctccctgactgctgcagtcccaccctgcaggctgggggtactccacacacaattcctggagtattttcagtttggaccaaaataacctgacagctgatggcaggagacatctacaatacagctcctgcacatccctgcgggcagactccacaggacttccagggcaggcctcggaaccacagccccatggtgctttgggtggttggttccagaaagctggcctgatcaatggctgggcagctaggcgccccagccctaggggatggaaggaccgccccccccaccccaagtccctcatttaacagaggatgtgggaccctgggagcagagccatataggaacggggcctcatctctctcctctctcttgctgccacaacagctgcctcttgggtccagatgtcatgcaaccacccccctgcccccaccaccaccaaccaccgtgctgtgagtcctgctggagcccccaaatcgaggctgggttcatctgggtctagcccagattccagcacactgtagatggagccgcagctgtttggcgttaaaagtgattaaccaactatttaattaccttgcagcactcggaaagaaagcaggcgtcaggcgcaactgaacagtccccccaaagaaagagggccagcctccctctatccaacaaccccagccatggtgaggggtggggatggcttccagaaaatgagacccccacagacggctctgccacagcatgtgggacaagggaggatccccgaaaagagtaagaactgaaaacaatgaatgaatgggtttctccccacccccatcccagactctgactcaccctctagtcccagtttgtctcaaacctggaggcttgctgtatttctcatggtcttgtttcacatgggactctgttccaggctgtggccagagagagctgtgggtgctcttcctggctgtgttcttgggcaaagcccttttctccagcaccagaacctcctgacacagagagccactctgggccactcaaattgcgcctcaccccaggaccgactgctgtttcccagacactgggggtctggctctgacacagccacagagcaggccacgggagggccactcggacacccaatcagtctctccctctagcagagacaccacgcggggtcctgttaccagccctgggaggctcccgtgaatttatcgctcccagtccctgcccactatttgctggatgatcttaacaagtcacttcctctccctgggcctcagtttccttggtggtaaaaactgctggaccagcggctttcaaactttttaaaaagccacagaatcctttttaaaaatcaaatgctccgtagaagcccaatataggaaatagtaaaacgagggctgccctgcttgagaagaggtcaggcttggctaatctcctatgctgtgtccacacctgctcagcacccgccctcaccaggccatatcacccgggttctcctcgcacttcccaagtcagaataggaatcccaacactctccggtggatgagggtctgcaccccaggggccagggggtagaggatgatgggaaagcgggttctgaccagacaagtgactgccgtcagacctgtctggcaagcaggccgccccttggtccagccacacagcgggggcacaggggcctcggccaggccgcggcagaaggcagcccagggacctacctgcgccggccgccggcgcccgcggatcccgcacccgagtcctggccgcacaggtgtgcgggcgggggcgaggcccaagcgaaggagcccccgcctcgcccccggccgctcctcccctccccgggcggaacgcaggccctcctcggccgcggagtgggcgagccggcggcagccccggtggcggcggggaggctggagcacccggcgcctgcggaattttctccccatcccgcccccagcaggggccccgcaggcgcttcctgaggtcagagggctcgccctggccccacgcggaaaagtaccagccacggccggggggccgagacgggcccggcgcgctcaggtgggctgcggagcgccctgtctgctcccggcagctccaccctcggggccggccccggggccagttccggaaagccggcgggcagccgggccccgggggacccgggtcagggctgcaccggcgccagtgccccgaccctccccggcccgagcacccgggccgcggagcccgctcctggggcagagctccacggcccggcccggccggctcccctcgggcccggctcccagacgcgcttgccttccccgggccccgggccccgcgccctcgctacttaccctggggagccctggcggggaaacttttccaggcgaccgccgcggcggctcgggcgcccctcggccgcccatgccgcccgggcccgactgcgggcccgcgttcccagcgccgtgggccccagcgcgtccggccccgcgcggcggccctgcggggccttctggggcgcccgctgcctccggctcctggtaggggcaggtaggaagtggggcaggcgatcccaaagtcctcgcggccgcccggcgcgtccctcaggccccgctgccgtgcccccgcccccgggctcggctcttcgccccgcgagctccccgggaagacggccgcggagacccgaactcggaaccaaagggaaaggcttgggggaggcactccgagccctgcctcagccggactcttgggggactggccctctccgtcccccgcttccccactcctgggcgacgaatttgagcctgaccgggttaagtgcccagggacggcggacctggggtcctccactcccaggtcgagggaggactgcacggcggcaggaccagcctcctcttggcctactgttagaggagtcacgacttcgtctgcatttgtatagacaggtggatatatgagcagaagtagcccacctccttttaatatttttagcttttttttctttttagacaccaaccgcttgccaggcaccaggccagtcactttacattatctccttcttatgtacatgatttaatccaca

SEQ ID NO: 1242047 - DNA, 4001 bp, Homo sapiens
attccaaggtcgcagagtagcctgtgcccatctcttctcgctccctgtgagataacctggctgcacaggatcagcctgtggcctccttaacacaggttcccgggtaatgggaaaaaaaaaatccactgagtgttttctatgagccaggcaccattgagagctcttttcctgtgtcaacccgttttatcctcaccacatgccccatgaggtgggtacagtacattttcctttaagtacctttgatgtatcactgtctgcattttatagaggaggaaactgaggcccagagaggttaaatcatgataattcttaaggcaactggtgaaaaatcaatcagcaaaccggttcaaatccctggggcactattttttgctgggacaccttagacaagttaatttctcagggacttcctcaatttacccctctataaaatggagataatatttagtgaatgggatcaggtacgattcgggcacctttacaaacactgcaagaactggaaactggaggaacaatgctgggtcctcaaagttgagcgggaagataagtccagttggccttgtcccaaagtggggacttcccctccgccaaggaactaagacttgtaggggccacactgggtagcgccagccacagttgggagaacaatactccagcagtcagactgaggcaggaagtgactcacgcttcttccttaggctgtgagcaagagaactccattgaggggaaacagggacagggctggccccacctacccacttgtcctcaggcctagaagaaaggtcagcccagaaaaatagcaatacttgctgcttcaggtgccccacccatcctggagactggccccaggggagcccgcagtgggtctttggagggggaggggctagcctaggctcagatgactgccacccaggcagaggcggtgggaagtggagcttcccagtttcttccagccagcttgcctcttcaatctgcataaggcaaaattctttaaagtgggttctcagaggtgcctccctgagagggaggaatgaggacaggattgggcagttgagcacctctctctgcttcacccagagtgtctcacattttagggtttcacatgagattgtattttacaacaattctgctgctaaaaagaatttgaaagccactctctgtgagacttctctggaaaaaaatcccatttgaccacaactggtgacttctgcctttatctcattgcaacaagtcctgtgggcaggtattgttctctttatcactctcaactggccctggagcccaggtctcctgacctggggccctaggggcccaaggtcctctggatcccaccttaccagttttacacagcagttagcaggacttgggcatgtgacagaagtctggagatgagtgagaggagcagggcctgatgggtaagtgggggctgtaaaggggctccattttcccagcagggctctgggaggaagagtccagctaggcctctctttatccttgatttggggctaatccagagaggctcctgagaatcacatagtcctaaatccacccagtcatcctgactccaagcactcctgttgtctccttggggtgctctgggagtcttctctgaaatctctggtccacctcaggcacagcaaataaagccttcggcagcagcacccacacctagttgtaagcagaatgtctacacaacattcagacgtgcatagaagggtgcacaacaaaattccattggtgttctctccgaatgaaagggtcacatttgcgatctttgttttcttctttttgcctacctgcatttttcaggaatgtctacaagaactcctaaaataattaaacctttaagtcaatgcaaaatcgaataaagcatgtccatacttcaccatccagctccagagcacctgggattcatcctggccgctgctgcttccccgccactcactgcagctgcaacagtcaggctcctatcccttcacagggcggggcccttccagttctggctaaaccactttgggaaaaccttctttatatgacaggcaaacagggtgtctgtgggtggggggaggagctaaaagtgatgtggtggtgacatatctggtcgcactggaactggatcctaacatggccagccagcccttctcattttcctcatttattggggtgggtctgcacttaccttctgcctggctttgctgcatcccagccactggctgacttaatgacttccttccgccagctccagctccttgtgttctgccttgccttccatggccagccagtgctgccacaattatgtacctaataaatgctttgggtgcagtctcgcctggcagacattcattgagcagctgctgaacgctgggctctggtgccccatagctgggtcccttagagcttgtccataggaagccagagaccacctctctagtagggttgcatggaggtacctgggacacaccagggtcttcctcagtctgcgacctccctggccttccagcttcaacaagcctgctgcccatccttctctctctcgattcagaaatgtgaatcactcaatcctcatagttttttttgtttgtttgttttatgggtttgttttttttttttctagacaagagtctcgctctgttgcccaggctggaatgcaatggcctgatcacagctcactgcaacctctgccttctgggttcaggcgattctcatgcttcagcctcccaagtagctgggattacaggcttacgccactcgtattttttttttttttttttgtatttttagtagagatggggttttgccatgttggccaggctggtctcgcactcctgaccttaagtgatacacccacctcggcctccctaagtgctgggattattaggcgtgagccaccacgcccggtccccttgttgagttttcaatcagtttgtcatcctgaacagggtttctcaaccttggcattatcaacatcttgggtcggataattctctgtaggggacactgcactctacattgcaggatgttcagtcgcatccctagtcactaaacattagctgctagtagcattcccgctcccatgatgacaaccaaaaagatctccaggtattgccaaatgtcccttgggagacaaaaatctctcccagcaaagaaccactgtcgcagaatgaggagtgggaacgtcacaggatggtggttagtgtgccagggttcgaggcagcaagagttgtctgctgggaactaagctctgagacagctagcagtgagggagaaaactcccaaacttgaaactgcccagtatgccagcacaacaatgggccgtttagtgatcagggcaaacaatcatgcatcctcatgacatctgagatcactttccatcgtgttggtgataatgctgaatcaaggaaaggatcaatcatgttgatcatactccattttctaaggtggggaggtgtgtgagcccttgtagcattaaagacgtatttggaaaacagatcagtgcttgcttggggaagggggcagggaggggcgggaggaaacttttgggaatgatggacatgttcattatcttgattgtggtgatggtttcatgggtgtgtccatatatcaaaacatatcaagttgtacactttaaatccatgccgtttatagtgtgtcagttatacctcagcaaagctgttttgaagatgtgttgtttaaagttttagtgcttgaagggcattattttgaaaattcactactgtggagtagtccatttctttgctgaataaataaggggtcactgtagtacttaaaaagaaaacaggaagaaaaaacaaacagaagaagaagaagaaaagcgatcatgggctgtaaggtcgtcctaggcagggaaggaaaggaatggcgtgaagagttggctcagtcgcccctgagtgtggcccggagagcctgtcctctggcctacggcaggccccagagagtctttccgttgactgatgccatcaaatcaacatgtctggaacggt

SEQ ID NO: 1242048 - DNA, 4001 bp, Homo sapiens
atgagtgtacagtggagtgttccagaggttacatggtgtgctaaccacaacagtctgacgtagatctgagaatcttctattaaaccaggcattaaaaagatttgcaaaaatgcaagatgtcactcttatcatctatgttaacatgtaatggatttattttttgtttttggaaaaaaaaaaccaagagaaaagaaaataaagtcatctttagtttccttaaattcaaagtctgagcctgaaaatggaagtatcaaagctgatggttatacgtcagtgagaaaaaaatttaaaccaagctgggtgggtctttacatgagataaactatctacaggaaagaatgaccactaacttctgcataataaatgagagtggatcttttaattctgagatggcaatgtactttacaaggaccatttacagactacatcaaacctttttctagataaaaaacgtacttcagtaacttgcctgaattgagagagcaaaacagtccggagagaaaacttaaaatgtttccacattatcaagcccccttcagaagtactgtggtctcggcccctcctttgaacagatgtccgctcgccacagtccaatcaggtttaaagcaagagtatttgtactgaaaacaagcttaaagtgggaagacacacacaaagcaggcctgtatcattcctttggtttcagttttcacgatgcacccttgaggctaggcacgctgattcaacacacttggagagcttcaccgaaacacactaaacacacagtgatgaactgtgccctggcagagatgacctggcaaaattctcaacttcttccctgaggcagtgcacccgcagttctcggcggcgaagtctttggggcagaagtcccgagccttcagaacggcaggcttctccccctcaggactccagtccccgcggccaaggctgtcgctgcgggggccccgcgcgggactggccaggctcttccattaaccctgtctggtccggccgatcccgccgcgacccgagcgcctctcggccccgcagcacagggcgcccaggacccgccaccctcgccgcccgttcccctctccggagagcccggcggggccgtcaggctgccgagacaaagggtaccgcggcgccagaggccgaggcccagccgcgcctgccttcctctttctcccgcccactgccaacctccagtcgcccgcagaacctccgctgcctcggcgcgaccccatcgccaccccggggctgccgctcgggaccggcaagccgggtagccgcgaggcggccgcggcatgctagggccgaggagggggcggcggccgccaccatgtctgcccgcccctcccagaagcagtgtgcccagcggacaaagcgcagcggcggcgcgggcgcccaggccgaccccgccgacccccgcggaataagcggggccaggagccccggaaacccggcgccttaatgcaataaacaggaaatcgcggggatgatctgggttccgggggaagtggaattattttttaccagcgaagagatcaacttccacatccggtggtaacagggccctacacagacccgcactgacctggaaaagcttcgggagcggcgacgggaaggcagcaggaggtggtgcggggacccgaggcgcctcgtacccggccgggctgacgcggccccgctacacacaaagcgcttcagctgcacagggcgctattttccgaaaatgccgcgtctggtcggcgcccaaaatccccaccgaaaagtcccccgtgctgcgcgcggagggacacatggtgtgcgagtgagtcaagctcccagcatccctcccggacccggccctcttcagctcatcgcccgaggattttccgcctctgccctcgtcggcagatcctgctcctacccactccctagctgtgttcccgcggggagagaggggaaagagggtctgattttttaacgaagggaaagaaaatatgccatttctagcgcttcagccacacaaagaaagcggcggaatgatccgctctcggcgaccgcaagtcccggctcgcccggcgcctgcgcggcagcgggggtgggagctgcggacggccatgtgcgcggcggagaggccgggtggccaccgaaccttcccgcctgttctgcggtgggtaggagtttggaaactaatgttcctgtgctaaccttcgtgtctctgtgacatgactgttgaaagacggagagtgcggaatctttggagttttaagcttgccaactgtgcggcctagcagaatcctgggagacggaaggacagccaagaggctaggatttacctttaagtgtccctagattcaactaggcagactgggacgggagacgctgtgaaggtaccagggaaggaacgagtgaggttccttttccactttttcataaactcaacagtcaggttcatgacgaagatatagatatttctgtagattttttccccaacattctaattatgcctcatgtttcgtagatcctagtaactgcttggattactgccacctcagaggtagagatctgtttttccgtggctggaatgccaaaaattttgttgtattttattaagaaagtagcaaaagtttggagatttgcaaagttaaaaaaaaaaaaagcattatgaacttaatctagatgtgatttgctaaggaacttaatatattgatatgtttttcacaggggcgtctgggcatggctttcccaacctagtaactgcaacttttagcatcctacatgtaggacttgggaatatgtgagacagcgccaagaatttaatccaggagaattgacaagcttaaatgaaatccatattgcccactgattttgtgcagcttcagataagtaatctttctccacttagccttttgtaacaattgatgtaataaaggtttgtagtctttgtgtaatttattaaagcattgtgcctaaaatagaaaaaaagcataggaaccataggctgtgttttcttttgatttaatattttcatttcttcagttaatagaaatttgccaaattctgatgtttttctgtagcattatttgaatgagcattgtttatttgagtgaacattcagctaattgttacagaatcgttgcccccattaatcttaggctgtagaatgtagacaagtaaataggcatcatcagtatgatgagagtgaagctacttaatactgtggaatcaaataaaggaggaaccccttactaaaccaagagggaggaataaaatggaatgggactagagaagcaattagctttaataagggtattatggaagactttctagatgagaagcagtaagtacagatgtttggaggcaaacactagagagattgttgggtaaagaagacaatgctggaggtctacttgtgaaggccttgaatgctatgtgcagaagtcagcttctgagaaccaggaagaagatattgaaagattttaagtagaagaatcataggattgaattcattttagacagatcactgttacacaaaaatttgaggcaaacagaagagtttggagtaaacagtaggctgtgagccagtaatgacttggactgagttggtagcaggtaggtgtgaagaaaataaagtggttattgggagatttggttaactgaaaatgactgagggagatagatgtcaggtgactcccaagtgagttggtggagcagctaggaggatagtaatgtcttcactgagattagaaacaaaataagagaatatatgttagggaaggaagaagtctttgttttgaccatgtaaaatttgaagtgcatgtgagccaaccagtcatatatgtgtagtgtgcaattagatattcattcaacactgttggaagagcacctactctgtgcctggtactgttctacacactgaaataggtaaagcagcagcaaaacaaatggttcctactcctgttttttagagggaaacagcatataaacaagttttaaaaataagaggagagagaatatcccataaattcgtgaag

SEQ ID NO: 1242049 - DNA, 4001 bp, Homo sapiens
tacgtggaaagaagtggggaaaagcacatttaagaaacaggttttctgcaggatcacaatactgtgacaactgcctataaaagagtgtggctactttcccggcattcggtccccgtgactacataacttaagcactgcatctgtggaagtctctccactcaatgctggaccctaattaatgtatttgagatccaggcagacattgtccctgggctcaacgactaaccttcctgaaaacacgcatttctcagtatgcgcataacgcaaataggtgctcacaggcatccgaacagtatgcttcgaaaagaagcattttcccaagaagcccccccaacccccatcccccgcaaactccggaattgggagacacaacaggtacttccacctcggaagcgaaggccttctgcgactcctgccaagaagggcagggtgccatgcggtggtcgcctgggcgcgtccggggggctcgtcgcggggcccgggccagagccaggcggcgagcacgcggcgctgcatgcgggaaacccgggcggcgcctcccgccgcccctcagccccgagccagggacccccaggagaggctgcgctcccacgaccctccggacccccacagaggctcaccagggccggcgcgccagggcaggtgggcgcgggggctgcactgcggagccgcagcctgggtcgccctggcacccgcggtcgccacccgcgcggtccgcagcggcacgccgagggtctccagctccccggccctccccggctcgctcccggctttcgcagacttcccctgctcctgccccgggtacgagccaagcgctccgccaggcagcgccttcctcctgggctgggagcgcgcggtgcagcagcgactccaagtcccctggcctcgagcagcccgcgcgacacgcgcgcgacacccccgcggggtccgagtccaccccgcgagcagcgccgggacgccgcgcgcctcagagccccggggctgacgctggctttccaggtgggcgatctcacccctccggctcccgtgatggtggcaacgggtgtcccccacccccaaccggtcaccgcgccctggtgccccgtccggcagggatgagccgcccggaccccgctctctcccgcgcccggcttcagccccgcagtcgccagggtaaagtttgcgctctggcctggctgcgcgccccgcctgctctgcacctctcctccccggccacgcagcctgccgctcaggcgccccgaggagaagggtgcggaccgagccggggcggccggtcctcttccccgctcgcgtcctcttaccccactgccccggcccagcgcgcccagggctcaccctgcgcgccggccccgggaggcgagccgtcggtgaggatgcatcctccttctcctccgcctgctctcgcccggctggcaggcgcggaaggccggtgcggcgtcaccgccccatgctgccagcgcgaacttccccggcactcccggcggagcggctcttgcgccccgcgctcccgccgccgccctgcagctccgctccgcgccgcgccccgggccgcgcgccgcccgccgcagagccccccagcgcccccggcgcactcgcgcccgctctcacctcgcccgagcgccacatgtcgtctctgggctggaggatcggccctctgcagaggtgctccggtagaggccgccagacgctcagcaaatgcgcccttggccgagctgggcggagggggagggcgcagggcccccggctcggcctgcaaggggagaggccctgttctgctgaagtttctccagggccctcaacagcatcttcggcgcctcgtgtagtcaccaccgcccgcttgtagagcagggatgggagggcagtgtcagcagtcgggtgatagaggcctggactccgacagctttgctccctagagccggccccaacgcctccctgcccaggcctgggtccttcccgggtgctccatggcaccccttacatgcgcatctcttaggcgcttctgaaagaagctggcctgtggacattcttttcatctcactcatagacaggaatgcataactacgggagggaaagccagggtcacattggactcgattagaatgaaatccttacctaacgcagtgtatatctgggggttttctgaagttccatttcttgacaacaagccgcagtggcaaacgggaaagggccaggagccctgggggctgcaggtcggagagcgcctctggggtgacggggcgggatctccccagcagggcttccgagccacgtcgggtcactgcctcattagccacgtacatggggtcttactatggtcattacgtcggtgtgtcgtccgtcctagtggtgcagttcctgggaggtgagggtggcattaatgacaactgcgcggcagcagggccccttcaaacaacacaagtaagagcgcatcgtcttgggtttgccaggtcttgcttcctcaggaggtgggggactctcgactataacacccagtggaaaacgttcaagactcaaaggaaagccactgaaaacgtgatggggaggtttacttacaccattgtcccattccttttgtgaaactgcattattcataatctcttttaacagaataatggtaagtaaaggcaaattcctaactcccctccaggaaagatctttgaccttccagtgtaggaagcctctcatttttccagttatctctaatacagtgtattccaaatctaagttacctgttaatacttctgcacattccagaaattctgaaattttctgaaaaacaaaacttgtaaatctattccaggaataggacataaatatacataaatgtgcaaatatacaggaagtgtttctctgaatatacatttagccacactattaaataactgtttccagtggttcttcaggaaatatgaatgaaataagatgctaatttgaattttctaattctaaaatggatcactgaacgtatgcatttcttcattttctaatttcccaaaagatgtaccactagggtgaaattccttgggagacattaaattttaaaaagttaacaacatggttttatgatcagcctaatataattttcacctattaggtgttggaattctaacacctaataccagcgacagctgctcttctctcaggattaaacagcataatgcaaatcaaagagttggaagaattggtaaattttaaacttcacagcttgtcacacaaagtcattcggtgtgagtttgcaaaaataaatgtatataaacaagggatgatttttgtattagcgagggttatagacattaattcttaataataaaagaaatgtcagctgtaaggaaatatgttcttttgatggattatgtttaaaacttccactttttttggtacactttctatcagctttatgtccacacaacacatattattgaatatataaaaatcattttaagttagagtcattctttaacattgtatttcagcatgttgcttaaattcttttctcttccctgtaatgaaacggtatgccactctctctcctcctagtgtttatgtaacataacatagcctcactttagatggactgccctgaggggacagtgaaatcgtaaggcccatcagaaccttacagaaactcacattgctagaagagtgcttactaccatttcaatgatttttgttttactatagaattctgtatttgtgctgagaaataataggctatccgttgaattcccatttgtttcattagcattttctcttcattgaatgaaattaagcaatgtcgtgatcgttgtggaagacagtagagggcaccctagttccacacaacctcagccttggcccgggcttcataagaatttcatttccagtgtcagagcctaaaatagctgaaggtggggaagctgggccatgagtagaacacgtgttcacagagcacccaccctgtaccccggtcaggggcaggaactgagacagtggctgtgtttgcgtggttgggtgtggtaaat

SEQ ID NO: 1242050 - DNA, 4001 bp, Homo sapiens
gtcacagttcctggaatcaaatcacactgctatcacaacaatttgcaaagaaaggagcccgctgtccttccccaggacagctgcacaccaggtattttccatcaccctcactgggcagtaagttggagcataaaaataagtaacaagaggcttatttttacttctactcagggtgcagaatcaccctaattcgttgttttccactcaaatactctgttttgttttttagcatgttatcaaataaaccattagtccaattattaaaataaacgctgtagttatctgagcgactgtattttgtatccgtcaaatccacaagtgtagtaattttacctttctgaaatatctgccacgccacgcgttcaaagccagcaagctactcctctctctgcaaggcactgagaaagtacgtggaaagaagtggggaaaagcacatttaagaaacaggttttctgcaggatcacaatactgtgacaactgcctataaaagagtgtggctactttcccggcattcggtccccgtgactacataacttaagcactgcatctgtggaagtctctccactcaatgctggaccctaattaatgtatttgagatccaggcagacattgtccctgggctcaacgactaaccttcctgaaaacacgcatttctcagtatgcgcataacgcaaataggtgctcacaggcatccgaacagtatgcttcgaaaagaagcattttcccaagaagcccccccaacccccatcccccgcaaactccggaattgggagacacaacaggtacttccacctcggaagcgaaggccttctgcgactcctgccaagaagggcagggtgccatgcggtggtcgcctgggcgcgtccggggggctcgtcgcggggcccgggccagagccaggcggcgagcacgcggcgctgcatgcgggaaacccgggcggcgcctcccgccgcccctcagccccgagccagggacccccaggagaggctgcgctcccacgaccctccggacccccacagaggctcaccagggccggcgcgccagggcaggtgggcgcgggggctgcactgcggagccgcagcctgggtcgccctggcacccgcggtcgccacccgcgcggtccgcagcggcacgccgagggtctccagctccccggccctccccggctcgctcccggctttcgcagacttcccctgctcctgccccgggtacgagccaagcgctccgccaggcagcgccttcctcctgggctgggagcgcgcggtgcagcagcgactccaagtcccctggcctcgagcagcccgcgcgacacgcgcgcgacacccccgcggggtccgagtccaccccgcgagcagcgccgggacgccgcgcgcctcagagccccggggctgacgctggctttccaggtgggcgatctcacccctccggctcccgtgatggtggcaacgggtgtcccccacccccaaccggtcaccgcgccctggtgccccgtccggcagggatgagccgcccggaccccgctctctcccgcgcccggcttcagccccgcagtcgccagggtaaagtttgcgctctggcctggctgcgcgccccgcctgctctgcacctctcctccccggccacgcagcctgccgctcaggcgccccgaggagaagggtgcggaccgagccggggcggccggtcctcttccccgctcgcgtcctcttaccccactgccccggcccagcgcgcccagggctcaccctgcgcgccggccccgggaggcgagccgtcggtgaggatgcatcctccttctcctccgcctgctctcgcccggctggcaggcgcggaaggccggtgcggcgtcaccgccccatgctgccagcgcgaacttccccggcactcccggcggagcggctcttgcgccccgcgctcccgccgccgccctgcagctccgctccgcgccgcgccccgggccgcgcgccgcccgccgcagagccccccagcgcccccggcgcactcgcgcccgctctcacctcgcccgagcgccacatgtcgtctctgggctggaggatcggccctctgcagaggtgctccggtagaggccgccagacgctcagcaaatgcgcccttggccgagctgggcggagggggagggcgcagggcccccggctcggcctgcaaggggagaggccctgttctgctgaagtttctccagggccctcaacagcatcttcggcgcctcgtgtagtcaccaccgcccgcttgtagagcagggatgggagggcagtgtcagcagtcgggtgatagaggcctggactccgacagctttgctccctagagccggccccaacgcctccctgcccaggcctgggtccttcccgggtgctccatggcaccccttacatgcgcatctcttaggcgcttctgaaagaagctggcctgtggacattcttttcatctcactcatagacaggaatgcataactacgggagggaaagccagggtcacattggactcgattagaatgaaatccttacctaacgcagtgtatatctgggggttttctgaagttccatttcttgacaacaagccgcagtggcaaacgggaaagggccaggagccctgggggctgcaggtcggagagcgcctctggggtgacggggcgggatctccccagcagggcttccgagccacgtcgggtcactgcctcattagccacgtacatggggtcttactatggtcattacgtcggtgtgtcgtccgtcctagtggtgcagttcctgggaggtgagggtggcattaatgacaactgcgcggcagcagggccccttcaaacaacacaagtaagagcgcatcgtcttgggtttgccaggtcttgcttcctcaggaggtgggggactctcgactataacacccagtggaaaacgttcaagactcaaaggaaagccactgaaaacgtgatggggaggtttacttacaccattgtcccattccttttgtgaaactgcattattcataatctcttttaacagaataatggtaagtaaaggcaaattcctaactcccctccaggaaagatctttgaccttccagtgtaggaagcctctcatttttccagttatctctaatacagtgtattccaaatctaagttacctgttaatacttctgcacattccagaaattctgaaattttctgaaaaacaaaacttgtaaatctattccaggaataggacataaatatacataaatgtgcaaatatacaggaagtgtttctctgaatatacatttagccacactattaaataactgtttccagtggttcttcaggaaatatgaatgaaataagatgctaatttgaattttctaattctaaaatggatcactgaacgtatgcatttcttcattttctaatttcccaaaagatgtaccactagggtgaaattccttgggagacattaaattttaaaaagttaacaacatggttttatgatcagcctaatataattttcacctattaggtgttggaattctaacacctaataccagcgacagctgctcttctctcaggattaaacagcataatgcaaatcaaagagttggaagaattggtaaattttaaacttcacagcttgtcacacaaagtcattcggtgtgagtttgcaaaaataaatgtatataaacaagggatgatttttgtattagcgagggttatagacattaattcttaataataaaagaaatgtcagctgtaaggaaatatgttcttttgatggattatgtttaaaacttccactttttttggtacactttctatcagctttatgtccacacaacacatattattgaatatataaaaatcattttaagttagagtcattctttaacattgtatttcagcatgttgcttaaattcttttctcttccctgtaatgaaacggtatgccactctctctcctcctagtgtttatgtaacataacatagcctcactttagatggactgccctgaggggacagtga

SEQ ID NO: 1242051 - DNA, 4001 bp, Homo sapiens
ttaatgagaacagcttggcgtggtcaaaagtttcttcctataagatccttagtggtaggtattttaaaagtatctcactaacgtctatttttaaaaatagttttactttatttgtatatattcatatatctgtgacttactgcaaagtttctcaaaatattgtccacaaaatacccgcttcaaaatatttgaagaagtagttttaaatgcagggaccccaagactccagcctatcttgatcagaatcccttggagtgaggaactagcaggcacgcatttaaagcaagtttgcccacgtgattccgacgtacacgagagttaagaagcctacagagtggatctaaaaccatgtctcactgtattctcaatgttgtatgtccgaaagaaaagttgccaaacaatttcttccaaaaaacaaatattgtttacaaatgctccttccagagtgtccctccgcagaaaactaaactagttttcaaatcccacggcgtttcagctcaattaacaaatgaaagggccatccttctcctgattccctggcgtcctaaagcactcctggcaaaagcccgcttcgcacctcggggtactgacctccgcttcccacaggtcagaatattgaatccagtctgcattcacagaagacctaagtgacactgtgtcaccagcctccgactctcccggtagagcggctcctctgagagcccgcctaggcgcggcctcccgctctctgaagcagcggaagcctgtcagcacctcggacagagactggcggtgccgggcccgggtctcccagtccaggaggcagccttggaaaaaccgcagagacacccctggaacgcacagaccactgtcttcgttcccctttcctgcagccagaatctctttccaaacgacaacaaaggaaaccttaagtacctcttacctagaatataggagccacccccacatctcgcctctcccggttccccagcgcctgttgctaaggaggcgagacagcgctcgggaaacctcgggaccaggcgacagagcgctggaggagctgggagcccacgggcagcggcagatgggagcactaggccggccaggactcccccgcaggaagggtgcgccctcgcggctccgacgccagccaggcccccgagcgcccggggcgggtgcagggagccgggcaagcgaggggccggcgcctgggagcgcggctccctctgcggaccggggaaactcggccccggccgaagaggcctccggcccagcactgtggacgcctgtgatcccagacagcgggccgggggctcagggaccgccctgggagggcgggcactcaccatgttgacttcggaaaccatgtcgatgctggcgatgtcgatgttcatccccacgcagaccgggggacctgcgggaagcacaggacacggcgatcagcccagctccggcgcggggcgcgggcggctctgaggactgggggctatcccaggaggggcgcgggcgaagggcccccactcccacccgccgctgctccgcggatgcggcccccgcctccctccgcccaggccgccgccgccgtgggtcgcgcttcccgcaacggccgcgcgcagcccacttacccccgaagtcgggtcttaggcgaatgtcgtagcctttcaacagcttgtccaccgtctccttcacaaaggacatgttcccgggatcgttcacactgggggagggacggggagcacaaagagcggggtcaggggcggctcagccgccagcgccccgcgcaccccgcgccctgcccgccgcccgccggcccacccgcgaccctacctctgggcgcagcacaccacagccaccagcaccggggccgagaagatgccgaaaagccttcctcccgcaaggccccacatccctccgccgcgccccggcacgggggagggggcgccccgccgccgtcgcgacccgcagccggggctgctcctgctgctgccgccgccgccgccgccgccgcgctggcccggagcggaggagggcggagggggaggggaggagggggaggagcgggcgctgggagaggaaggaggagcggggagggaggagcgcgcgcgggcgcggggcgggggaggaggccggagagtcggaggcggagccgccgcgccgcgcaccctgccctcccccacgctcgcctcggcccgaggccggggccctgggcgctcccctcccgcctcggcggccgccgcacgggactcggacctctgggaccgcggagtgcgggggcgacctgggccggacgctgcgagcggagccgcggctgcgcggagtcgggaggggcggggggtcgtcccctgagccggctcctctgggctctcggcggccgggcgagtgcggggactgtcggcagcctcggcgccggcataagcggcggcggaaacgctgcccgcctaccccggccgccgaagttggccccgcacgacgaccaccgcccgctgcagcgcagcccgagagcccccgggtgccgcgcctctgcccgccggactgcgggccgccgcctcccgacggtgcctgcagaacgccgggaagcccccgcctcacctgcggggctcagagcctcgggtccccagggtccaggagagccagatgggcagcaggagctccaggagcccggagcacatggcgctgttcctccggcctaacctgctgggatccgctctcccccctactctccgagcagccaaacggcgacgcagggatccccgcccctacccccacccccacccccaggctttcccgcctgacccgtcttccagcccctgccgtggcggccctatttttcatttatacaattggaccttttttttttaacagctgctccttaaactgcacctcttaccctcactcctgaacatttcttgggagcactgagccctttctgctcacatatatacaaatgtaatggatggttaagtgaggactgaatatgtgttttgttatcagcaaactggaatcccagccagacttggagactggattgtcattccaggtaaaatacgtgccttttttggtgccgcccagagctatccgtggtccttaatataaggcaagggtccttgcttccctgcagcaggcctccttcggctgtcattagaaggctactggcgcactggtgcaaggaccctggtgtaccagtgcacaccggatgcaccccaccctctggaccaccaccgcacacctgaggggccactcacctacggccacaggttttatattttagtgagtgatccccaataaagtttatctgtacctcggacttctaatattgaagaagatggttacacaatcctacttgtagccaactaacaaaatctacacatcaagctcgtttttgtgttctgtagacttcttcagattattccaggacttaatgaatggttaataatagataactactttcctgtattgactcattttttttcccatgaagcttaagcttttaacatcgttgagactttatattagtaaatacctaaatctagatcctaaatctcacgttggcatgtttctgtgcattaattttaaatatactgcctttttaaaaaatcagctattttatttttggaacagaaaatgtgaccgcagtacctgaaagattcagagataaatatagcatcctaattattttctggaaaagtctattcaccactgctttgcattcaatgttctgttaatgcacaatggaattatctggaaaattatatctgttgcatcacacacacattcatatttcagtttatttctcctatttgcatgcagttcttttggagaaatgccctgctggggatcgtggctataaaaagtaaacaatgaaaagaagttgttttaataaaaccaacaacatagcaagaattagcccccttactaccagtttatatgttctaagacttgcaaagccacattacaaacattattatccaaccgtgcatcacatcagaccttcttggcttcaccttctctggagcttttggctt

SEQ ID NO: 1242052 - DNA, 4001 bp, Homo sapiens
actatctattattattttcattatcactgttagtaattattaaaggtgcataggaaatcactcaggactgtctcaatgaacagcagttcaggaaataggagtgaaagacaaatctgtagtctgtggagaacactaagttctcagaggtcacaccaaaaacagagaaacacaaccatccgctgcctcaaggggagataaagcacatcccaaaaaagccacgtgcaaaaaaattacaaagccacatagcagttaggcacaaaaaacaaggtgccaggtaaatatatccatactgagggcatgcagacaagagggcaagagggggccatgggcagctccttgaggacctgggggggtctgagcttgaagcaggaggcaggtgtgagcaaggagagagtctctctcaccaggaccagcgagcttttctaaccatcccagccttggaacgaggcaggaacacacgtgggagacttgggctggtgattgaagaggtcagaaaaatctgagagacagcagaaaaaccaattattcaaagctgccatttccagccagcaaagttaactttgggttttgagggtcctcagaagcctctctaagaactgagcaggaaacagagcaacagatatgatggtgacagagaatttttccctgcagctgtgtgtgggatgtgctacatcccagaagagagaggagagaaaacccacacgatgtaataagacttgcacaaaaatgccaaattatgacaataagtccttaagtgccgaggcaggaacgagaaggacatgacttagcatttggtaattatgttgaagaaattatgaaataataactatttataaaccgattctcttactagtcctgagcacatacaatatgttttcagataaaattatagataatgaaatgctagaaaatgttgttaaggtgcatggtgttggttgcattgtgatatttaatatactaatgataagtagattactctgatgcatcccgtgcctgaatcatctgttgtcttgtgtgcaaaatccattcttttattagtaaactattaaaaacatccatggtctgtcatttatgggccttctttattgcaactcatttataatgtatagaatgtgacctcaacactccatagtttgctctaagatttccagacttgctacatcttccagacacaaaaagcaaaatacacagagaacaagccatggtaagaacacacactgttgtgaacacagtgctggttttcaattagaatgaaaagctgagccatgcaggaattccccacaccttctaaagcaagtgcatccaactcaagctatacatgagctgatcaatatcctgactcaagggaaacaaacagaaaagtctcatcttcaaaatgtaagattgtattgatttttttctcctcaaggcccagagagtacaaactgcaaaacagctctcagcaactgaatgctacatgctgatcctcttcccactgaacgtggctgtgtgtgtgatgggtgtgcgctgggagtggaggtggaagcacatccaacaaagaggtaggataatgaacctgatgtagctgatgatgctgcattcatatttatagagaaccacaggctcctaaaacccctatctcagccctttgtgtcataccacagcacattcgagtccctcagagctaagagctcccctctgtatttcaccatgcagcacctaacccatcttcacaattgccatgaagaaacgatgctcagggggtttgagcaatgtgtgcaagttccccaagcaggtcaaacccataaaccgtcttcaccaacttctcacagcctgcctcacatcaacttgtgaatcccacttacttacatctccttagaggcctcttgtgggttctcactgccaacagcaagtctcttctatttctttaagaatcatccaattatttttatcaccaactgcctttctctttcacaggccatccagctcacatggcatatatccagtaacagcccagctctgaggacctccaccaaatgacagcccagctctgaggacctccacccaaccacagcccagctctgaggacctccacccaaccacagcccagctctgaggacctccacccaaccacagcccagctctgaggacctccacccaaccacagcctagctctggggacctccacccaaccacagcccagctctgaggacctccacccaatgacagcccagctctggggacatccacccaatgacagacagcccagctcttgggacctccacccagcgacagtccagctctggggacctccctccgatgacagcccagctctgcggacatccacccaatgacagcccagttctggggacatccgcccaatgacagcccagctctgaggacctccacccaatgacagcccagctctggggacctccaccctatgacagcccagctctggggacctccactcaatgacaacctagctctggggacctccaccctatgacagcccagctctggggatatccacccgatgacagcccagctctggggacctccatcctatgacagcccagctctggggacctccacccaatgacagcccagctctaatatccacccaacaacagcccagttctaatgacattgctctccagctctgaagctcccagggactggataatgtggaccatgtgtaaagctaagaccacacatcctagcacttcgattacttacccatcaccaaaacagtaacatgctgtgggttccagggaagatgctaccctgaattctccccttgtccaaatcatgccttcccaacaacgctcatccagaactggaactccacattttttaaagacagcccttcagatctgataattggatggaatctctctctccccctggctccctccctcacccatcacacgtaatgcgtcatgcttctcttaggggtactgattttgttttcccttgctccatatttttcttccctcccattgaaacagacacctctttacaagctgagctggatcttcgtcttgtcagtctggtatttggcgttaaccaagagaactcaacagctgtaacaaatccaagcattccaaagccatttgcctcttaggccaaaggtagagatcccttgatccttgtaaatgatattatcctctgttaatcattttaaaggaagaagagttctcacttctgcaagtacttccacaatcagtttatctctcattctgtctcattctttctcttttgcccactttggaaaagaaaaacaaccaaaaaaaatgtcatacataacctatctatggcagcactgtttagtgttcttttctggaagctgttggtcctgcacacacctgaaaacaaaaaagaaacttccccaaaggtctagtcaaaggccagaattggcaaatgacaacttgtacaatttaatagcttatttcttatttatttatttatttatttttttgggacggagttttgctcttgttacccaggctggagtgcaatggcacgatctcggctcaccgcaacctccgcctcccaggttcaagtgattctcctgcctcagccttcccaagtagttgggattataggcatgcgccaccaagcccggctaattttgcatttttaatagagatggggtttctccatgtgggtcaggctgctctcgaactcccgacctcaggtgatccgcccacctcagcctcccaaagtgctgggattacaggcgtgagccaccgcgcccagccttaatagcttatttctattaatacttataaagaatccatactaacgctgcaaaacattttgcatacaatctcaagattaatatgatgctcaatgtgtttttttttcttattatactctcgtctatagttattccccagctgatccagataatccacctttcctccttagcagcaggctttggatggctgtagctatctcagatattcagaacaccacccaccatccatcatcctccacaaggtggccagaatgatttt

SEQ ID NO: 1242053 - DNA, 4001 bp, Homo sapiens
atttttaacccacagttgagaccttctgctcagaaaaaacattcctttcaaaatgttactgctcattttcaatgtacctggtcactcaagagctctaatggatatgtacaaagagatgaatgttgttttcatgtctgctaacacaacatccattctacagcccatagatcaaggagaaactgactttcaagttttattatttaagaaatacatttcacaaggctgtagctgccatagacagtgattatttttacggatctgggcaaagtaaactgaaaacattctggaaaggactagatgtcattctagatgtcagtaagaacattcatgatttataggaggaggtcaaaatatcaacaccaagaggagtttggaagatgtggattccagccctcatggatgactttgaggggttcaagtcattgcagatgtggtgggaatagcaacagaactagaagtgaaacttgaagatttccctgaatttctggaatctcatgattaaacttgaatgaatgaggagttgcttcctatggatgagcaaagagtggtttcttgagatggaatctactcctggtgaggatgttgtgaacattgttgcaatgacaacaaaggatttagaagattacataaacttagttgataaagcagtggcagggtttgagaggactgacttcaattttggaagaagttctactctgggtaaaatgctatcaaacagcatccaatgctacagagaaatctttcatgaaaggaatagccaaagtaataaatttcattgttgtcttaaactgccacagctttcagcaaccaccaccctgatcagccagcagccatcaacactgaggcaagaccctccaccagcaaaaagatcatgactcactgaaggctcagatgattgttagcactttcagcaatacagtattttcaattaaggtatgtatattttatagacataatgttattggacaattaatagactacaatgtagtataaacataacttttatatatcttgggaaaccaaaaaatttgtgactcacttcatgatatttgctttacagcaatggtctggaacagaacctgcagtatctctgagggtgtgcctgtatttactcagttattcagcaaatgtttattgagtgcttaccgcctgctaggcaacttgggggaggcgaagatgaacctgaggcactgtgagccctcaggggctgcccatgtggcagagacaataattgcaggttccaagaattcaaaagcaatctaggttaagtgctatactaaacacgaagggatatggcaatcagaaaaagaagccacttctgggaaggatgactacaggtgaattcttggaaaaacaaccatctgatctaaacctagaagtaaaagattcagctatgtgaagggaagggcggctgcccctggagggccagtcttgggtatggacatctggtcgaagcagctcctgttatcaactgaccctacacagctattttcgcaaaaaaaacaaaaaaacaaaaaaacaaaacaaaacaaaacaaaaaaccaaccagcgccacagggctaggcagaggagatggctccacagggtggacctcacattctacctaggttggtgacccccccagggtagctgagggagccctagagagacgaaagggggccagcagaggcctgaaacggcagtcctcaaacggaggctctcaggccttggaaatccgagctgggaggtgtgggggagtcaggtgcaagagcgcctccactccttgtgactgccgagagcccgcgtccccgacttttacctcttctgtctggtaggtggcccacatggggacacgagggagtctcccggtatcccggtgctgaggtcccaaagactccgagagcctccgccacgctaaccggaagttgtgactgtcgcttcctctccatctctgctctttacaggagaggctgaagctcggggaggcgcaggggcggagtgtggggagaagcagctcccgggagacggagggctttgcgaagcggcggcaatcaggggcggggcctggaaaggagggcagcgcggaagcttggccccgagagggaggaggcgtggtctgtggctcgaggggcgtggcccgtagcggaaaaggcgtggcccagctcaggagcctggcgggcaagctcctccctgtgcgcggcgctgtgcggcgtggagaacctcgccctgggagggtgggcctgattagattagcacacaccgggaagagacaggctgtctcctggcactggctcttggctgtggcacaaccagccttatcagcacatctagaccgaatgtgttggcaggaggaggagggggtattggtggagaggtcagagcttgcaaaaatagcagcttccagtggggctgcggagacacagccccgtgtccaggggatgcagaagtgtcctcgtccttggctgtgggtgagccccacaaaccgaaggtggtaacactccacttctcacatcaccaaactcttcagccctggtgcagcttctgagttcaccgagccccttctggttgtaattagatgtaacctgactttagaaaactacagtcttagtgggagttgagatttatagccattcaagcatttataaaatatccctcctgtaaattaattaactgacacactgaatgtgtgttcaccaatactgactcgaacgtattttgttagcacgtgtctccatagccctgggcaccctgagaacgtttggcttctggttaaggtgcagcgccaatcctgagatggggctggccctggatggatacagtacttagaaggctgtaggtaaaggcaatgagaggtcctggcaccccgcaaccctccacgacctctgccaccccatttactcagcggttcaaccccaaaccctcaccagggaaggccgctggggaagcccttgtggagcaattatccttggactcctgcattcctcggccaggctcccggaggtgaggctctttcctctgggtgggcaggagcccagggcacctgcagagaccttctgggcccctgctctacccagtccctctgtacctgaaacagctgtccacagaagggaaagctgccagcacctctggttataccgtgacaggttcctgtggacattgcagccctgggatatgggatttaatggagagtgctcaggcagtgaggaggaaaacacaagggaattctccagtctactgggaactggaactctctggagtatgctctctggagcatgtgagttgttttgctgaattatagtggtttgaactattacagtttatcaaaatcattagataagatgtcttgaatcaatacctttctctcataaaagccttctgaagaacttagaatcagcatgaagaaatattcgagtaagagttgcattcaaaacaaagggtctttcttaaaaacagaacctttctttaaaaaaagggtcttgcttaaaaactttgcaaacaaaatcacttgaattaaaaagccatttattcatcttggcttattttggggatcataaagccctttgataatctaatgaaatcgggggccctctccacagaaaatacaatctctctcagtattggtgtgtgtatcaatcagttagcacaaaaccctgaagttcatgggatgcgtgttttacaagctcaaattgctttcaatactagtgggtggagttccacaaatttgtacatcatttgcttaggatgtctgcagtgttttcctatagaaaaaactatgacaaaaagggttgttaggtttcactccagattatcaaacaatttcatgtgaaggtaagaagccacggttcctggtgagacacgaggactagcccaggctccctgttttggagccacagtgccgctgggaggcaaggaaagtattgctggacctagaagctgtagaggaagccctgagtgccgggagcaggcattctggaatatgagccacccacaagtgaagcatttatacatagtgactgcccttt

SEQ ID NO: 1242054 - DNA, 4001 bp, Homo sapiens
gcggcctcccgctctctgaagcagcggaagcctgtcagcacctcggacagagactggcggtgccgggcccgggtctcccagtccaggaggcagccttggaaaaaccgcagagacacccctggaacgcacagaccactgtcttcgttcccctttcctgcagccagaatctctttccaaacgacaacaaaggaaaccttaagtacctcttacctagaatataggagccacccccacatctcgcctctcccggttccccagcgcctgttgctaaggaggcgagacagcgctcgggaaacctcgggaccaggcgacagagcgctggaggagctgggagcccacgggcagcggcagatgggagcactaggccggccaggactcccccgcaggaagggtgcgccctcgcggctccgacgccagccaggcccccgagcgcccggggcgggtgcagggagccgggcaagcgaggggccggcgcctgggagcgcggctccctctgcggaccggggaaactcggccccggccgaagaggcctccggcccagcactgtggacgcctgtgatcccagacagcgggccgggggctcagggaccgccctgggagggcgggcactcaccatgttgacttcggaaaccatgtcgatgctggcgatgtcgatgttcatccccacgcagaccgggggacctgcgggaagcacaggacacggcgatcagcccagctccggcgcggggcgcgggcggctctgaggactgggggctatcccaggaggggcgcgggcgaagggcccccactcccacccgccgctgctccgcggatgcggcccccgcctccctccgcccaggccgccgccgccgtgggtcgcgcttcccgcaacggccgcgcgcagcccacttacccccgaagtcgggtcttaggcgaatgtcgtagcctttcaacagcttgtccaccgtctccttcacaaaggacatgttcccgggatcgttcacactgggggagggacggggagcacaaagagcggggtcaggggcggctcagccgccagcgccccgcgcaccccgcgccctgcccgccgcccgccggcccacccgcgaccctacctctgggcgcagcacaccacagccaccagcaccggggccgagaagatgccgaaaagccttcctcccgcaaggccccacatccctccgccgcgccccggcacgggggagggggcgccccgccgccgtcgcgacccgcagccggggctgctcctgctgctgccgccgccgccgccgccgccgcgctggcccggagcggaggagggcggagggggaggggaggagggggaggagcgggcgctgggagaggaaggaggagcggggagggaggagcgcgcgcgggcgcggggcgggggaggaggccggagagtcggaggcggagccgccgcgccgcgcaccctgccctcccccacgctcgcctcggcccgaggccggggccctgggcgctcccctcccgcctcggcggccgccgcacgggactcggacctctgggaccgcggagtgcgggggcgacctgggccggacgctgcgagcggagccgcggctgcgcggagtcgggaggggcggggggtcgtcccctgagccggctcctctgggctctcggcggccgggcgagtgcggggactgtcggcagcctcggcgccggcataagcggcggcggaaacgctgcccgcctaccccggccgccgaagttggccccgcacgacgaccaccgcccgctgcagcgcagcccgagagcccccgggtgccgcgcctctgcccgccggactgcgggccgccgcctcccgacggtgcctgcagaacgccgggaagcccccgcctcacctgcggggctcagagcctcgggtccccagggtccaggagagccagatgggcagcaggagctccaggagcccggagcacatggcgctgttcctccggcctaacctgctgggatccgctctcccccctactctccgagcagccaaacggcgacgcagggatccccgcccctacccccacccccacccccaggctttcccgcctgacccgtcttccagcccctgccgtggcggccctatttttcatttatacaattggaccttttttttttaacagctgctccttaaactgcacctcttaccctcactcctgaacatttcttgggagcactgagccctttctgctcacatatatacaaatgtaatggatggttaagtgaggactgaatatgtgttttgttatcagcaaactggaatcccagccagacttggagactggattgtcattccaggtaaaatacgtgccttttttggtgccgcccagagctatccgtggtccttaatataaggcaagggtccttgcttccctgcagcaggcctccttcggctgtcattagaaggctactggcgcactggtgcaaggaccctggtgtaccagtgcacaccggatgcaccccaccctctggaccaccaccgcacacctgaggggccactcacctacggccacaggttttatattttagtgagtgatccccaataaagtttatctgtacctcggacttctaatattgaagaagatggttacacaatcctacttgtagccaactaacaaaatctacacatcaagctcgtttttgtgttctgtagacttcttcagattattccaggacttaatgaatggttaataatagataactactttcctgtattgactcattttttttcccatgaagcttaagcttttaacatcgttgagactttatattagtaaatacctaaatctagatcctaaatctcacgttggcatgtttctgtgcattaattttaaatatactgcctttttaaaaaatcagctattttatttttggaacagaaaatgtgaccgcagtacctgaaagattcagagataaatatagcatcctaattattttctggaaaagtctattcaccactgctttgcattcaatgttctgttaatgcacaatggaattatctggaaaattatatctgttgcatcacacacacattcatatttcagtttatttctcctatttgcatgcagttcttttggagaaatgccctgctggggatcgtggctataaaaagtaaacaatgaaaagaagttgttttaataaaaccaacaacatagcaagaattagcccccttactaccagtttatatgttctaagacttgcaaagccacattacaaacattattatccaaccgtgcatcacatcagaccttcttggcttcaccttctctggagcttttggctttatcaccccagctgctgcctcagcacccagttctgcaagaggtctgatcagctttacatgggaacaagcccacatgggatatgatcacctcatatccgcaaggtctgagatgccacgggatttgctcagtactcacatatatgcaatctgaaatttcaggcaagttagaagtctatgaggcagacttttgtctaatggacacatatccatggatcaaagagtctccctttattgcctcctaagaaatgtcctgagatgcagtcgctgttggcctctcaaagatgatcctgtgagatggatccatcttttgtacttcatactcagcagtgggtggtctgcctggtaatgaaccctcctatctgctccctctctttccatgccacaattcccttttcctttgctcctgttttcattggaatcaaacatcctagtaacatatcaccacctaaattttgcctcaggatatgttttctggggaacctaggctgagttgtaaattagtcggcaagtcactagaagtgtcacctaaaaacacagtctctttcaaaaggcaaaatcagagagaaagactgcaaaggtgtgatcaggatgcatgggctataaggtccttacacacccacacactactgcacatcacagtcgctgcccgacttgcacctacatccgcaacaaagggtggacatgcagcctgccgcccttcctcctttctcag

SEQ ID NO: 1242055 - DNA, 4001 bp, Homo sapiens
agagattttgtgtatatttgggaatccccagtaaccggactgttttaaggcagaggctgaggtatcttcctactaagcacatgcagtagtgaggacaataggcagtgtttcttctagaatgttaagaatccagagacctaaacagttgattactgaaccctgaacggctggtcactcgtttgagttggtggcaatagaaaggtggcagagatgtgactgccggcctcagcgttatgcccggtgctgtctgcctccctctccatctctaaacagagatacaaccaggaagaagcaacctcagaaagcatgtttccattgcttgcaccagctgcctcttgagacagaaagaaacttcagctgaaaggcccaaggagtgctctgtctctttgaaagagttgcctgtgagtcaccggtggagtcggcttccacactcaactcagcaaagaggagcagttgcaagggggagggccagggcttccttcctcagggtaagcacccctgcccaattcaggagtgagaactgggggcccccttcatgtttagtaggatttattcatgtgtcttcctagctccttggtagttcacaaataggaatgaaaaggcaaggcctcctggcattgcctcctgatggtggccaggcttgtgcacgcaaggatgccctctgattctctagctcccagacccaggaaatggagaagcgtcaaaacaagagggtttgggggataggggcacgctgagcttcctagggtggggaaagaggtaaaggccagacactgctccaattttcaaataacaggacagtctgcaagctctagccagaaatccagccagagagacagaattaaagaaactaaacccagaatctccagttgtgtttacagcaacaggatttaaccctttgggtcccactgtccttgtatcctcatgcgccctcttcatctcttctagagtgattctaagctcccattagccggttggtgtactgggaggaaggttgcggaatttatggtgagatgatttcttacattaccaggcagaagccttattatccatttcgacatgcgtgctttatgggggtgggagtgcgtgtgttcctctgtgtgaaagtggctgatgtggaaggtgtgtgtgtgtgtttgcaggacctgggaggggagtcctcccagacaagcagggctttcttctgcccacctggttccaatccccccgcgcctgcctccaatgcattagctctttccagcccggtctaaactaggcagttagaaccacggttcccgggttcttggaaatttcagagtgatggaaatgacagagaatgtcagccaaagtgtgtgtgtgtgtgagcccctgaaacagctgaggtgggaattaggggtcggtaaggagccagaaatggcccctgccccctgaacctggttctcaaaaccccttaaaaccaccagatcctaaaagcgtcaggagacgagcccattaatctgagtccccacactcccggctgcagaggaaaaagcagatgaccgtgtccaagggagctgggacaggtgaggtgcagaccgacttcccagtcccctcccggcccgccgtgccgcagcccagccgacggctggcgcgccagggactccagcagacagcgccccccgccgccctgtcgcccagctcggggcctccggggatgcggcccccgcgccacttaccgcgcgtgcaagcccgagaacaggcagaggaggagcagcagcttcggggccatggtgccgtggagctcggggcgcagggtccggggcctcggccgggcgcggcttcctccggcgcggacctggtctccgccggccctctttgccctggcttcctccgaggctgctggccgcggcgggcgggacaggtatctactctggcgctggccgcgcccccgcggggcgcacactggacgcacacgggacgccgggccaccgcggcgcgccgcccccacccgcgcactagcgccggtccgcgcaaccgggcggcgggagcaatgggcgccggggaccccctggcgcggcgccgcccaccccgcctggagccgcgagcgggcgcgggtgcccaggccggggctgtgtgcgctgtgctgggaggtgggggcagctgggcggctgtcccctggcagcgcctccgaggcggtcccggcggggaggagtttccccaattacacgcctgacaacgcgcagggcgaggaaggcgaggtttgaatggactcggagtttgaggccaggaagggggcggagctccgagggggaggggaggctggggatcccgcagggagcctgaagaaaggtccccggggttggcaccatgagagcgagcccgcggtccgccttcctccagccatttctaccccagtgcaggtttcctccagcgctccctgacctcccgtgcccgccgtcgcccggggttgagacggtttgccaaaagcagcccttccatcgcactcttcgtgctaagtcggctgaactcctaggcactgataagattctgtgcttggaaaggtggctttctgcgggaatatttgggaaaaaagcaccccagatttatgcctttcttacagaaaagagagactaacacatagcaataaacagtagaggtggaaaggcatgttaaaggtaggagctagaaagatcctaaggcaagaagccaaagacgttccgtttggtggaagcatgaggtgcgcctcattccatgtattttcatattccaaaaaccgaaaatggcatttacgctttcatttgtcataatcattcagaaagttagtcttgcaccatgtaagtattgcaatcgcaacagtgtagtaaatccactaggaattttacatttctatcacccccaaaaagttcttagaaaatgttttataactgctattcatagaattatgtaagggtgtgataactgtttctttaatattgtcaaatagctttgttcggccaggcacagtggcccaagccggtaaccccggcactttgggagtccgaggcaggcggatcacttgaccccaggagttcgagaccagcctaggcaatgtgcaaaaaccctgtctctacaaaaaatagtaaagaattagctgggcatggtggcatgggcctgtattcctctggtgtgttcccccttgtttctggataggcatgaagtggaggggagtgcagttgttaatgacaatattgtttttcaacaatggagctgtcatctccctggcatcacctttctgtctctgtgaggtgctgaactcacccagctccccgcctttccaggactctttctggcattctcatcctcctctgcccagcacatccctcctacttaggtgcacatgccctataaggtcccctctttgatgaagactctgacgctcctgcattcttccacttccaacacctgtaccactcctttaggcttcaggggaatatgagcctttatcatactctgccctaatctctaattttctgtaccaaaatctgagcactttaaaaatcagttagatgatgatttattgttccttcattgcttatgtcgtctccacataagagacttgagtctcactctatcgcccaggctggagtgcagtagtgtcatctggactcactgcaatctccacctcccgggttcaagtgattctcgtgcctcatcctcctgagtagctgggattacaggcacccaccaccacgcctggctaatttttgtatttttagtaaagatggggtttcaccatgttggccaggctcttctgcaactcctgacttcaagtaatctgctcgcctcggcctcccaaagtgctgagattacaggcatgagccaccacgcctgagtgtgctgcaagaatgctgcaagtagaaacaattcttttgtgtttcccttcttaacacagtaataggaacataagtaaaaataaccatctgacattgatcacataacaggggccagggccgacaggaaggctttacattgattaactcattttaactctcacaacattattt

SEQ ID NO: 1242056 - DNA, 4001 bp, Homo sapiens
cagcaatttctcaggtcccttccaatgatcctgttctctgcttctacttgctattttttctctcttctctcaactagcattaacatccaaaactatatataatcaccaaatttcatttaccatggttttttaattattctttaaatttttctagttccatgttaaatccagagaaatgttactttttcgaaagtttctactactgcctctctctctgaaggccatgggacttaactatttgtcaaagcagaaattcccaacatttcgtaaacaccactaattactttttataactgtaaagacaattattccatacttaaaaccaattcaaaataaaataaatcctcaatacttcttattccctggggtagtaattttaattagattttattgattctttattttctcctatgtgcctttatttgggaaatactgttagtctaccttactatcgagtctctttccctagcaagaaaatgtcagtcttaagagtcaggaaagcttttactttcactatcacatatgaagaatgaactaaacacctaaattggataggaaaacttaaatgagggattcaggacacttcccaaggggtcatatgaccaatttaaaagttggtatgatgtgtctaaaataacaaattaactcttttacttataataaaggtacagatgtgctgattagtcatgctaacatgtacatatgaaatatgcctaaaccaaattaaaagaaaacaaaatacagtctatggcaatcttgaaaattcagggagctcaataaatattaagaggatgctctcacaatgagagcattaaacacttggtaattaacataatttaatatgcaaaaataagaaaatatacaggatgagggatgaggagtacacataggaaatttttgtgattttcttcattttgattgtattgctttcttgtcttcaggagggaagattttgacttcaaaagtaacaaaatatttaagaagggaattcacatctttctgttctaaatgatattcttgcgctattttctcagcagttcatgtttctggataaagtttatgattattgaaaagtgtcaatgcttctacagtggaaattttgcctttgggaatgctcttaatatttatcatatcaaagtgatggcctttcggcaatctgaatttctttggctcctgacgtgtttcagcagctttcagctgcacggaagacacaggatctttggaatcaacacacacatattttagaaatgacagcagcttgtcatctttacgagcaatctctcccttaatttctggatagagactaatctgctctggcaggaggctgctggtagaggggtgcctgggagcgagagagggcttcatgttgcggatttccctttccgctcggttctcttgaaattcctgatcccgcgagtcaccgcagcccccatctccttacaacatgatgccctcaggttcacagtaatgtattttttaaaaaccagtcgttgttaccttaatttggtcccaagggctgtaaaggtcagtttacaactcgttgaacaactgagtaagatttaaggcaactcaactgatagctgcatacctaatttaggatatccatagaattgttttgtcaactacaaatataacaagcattaagtgtaaactgtgttgctgaaaagtactccaagtatcttaggaacacccaccgcaatgtgtgggctaaatgcacacgtacaatgatagcagaaataatacctgtcatataggacgggcatgtcagccttttctccgcgaaaggcttctggtcctaagctgtcccttactttcaccggaatgagatgcgtccagagtcccaagcaagggaggagactgctcctttacccaggaggctggaaactgctcgatgcgagcgcagtttccgacgcccttcggctgagacctgcagcaccggacgatgtcccagttgccagctttagttgctaaggcaccaaccacttcggaggaaacggggggtggtgcagtctcttttggagtcgtagcgaatcagctacaagtcgagataattagttccggcaggaaacagctcctctaagagggactggaaggcggaaagaagctgagagtgacgcctctgagccgcggaggattgtgggaggaggttgtctccaatttctcctccccctcccggccaagatgtctgacatggaggatgatttcatgtgcgatgatgaggaggactacgacctggtgaggcgcagggaatggaactctgagggtggtgatgtgtcttgttttcggggtccgggccggggcgcccgcggcctctccccgtagagcatgtgccgtttacagcctctctcagtgcggtgacaggactggtttacctcctccccgttcccgcaccgggcccgggccctgcttctccagcatgggggaagggagggcaaaggaggcagcgaagggggccccgggccttgccctccgagtctgagcgcctcttcggtttacacggatgcccctggtcccaggcgttcggttctctgtcttctgcctccccaccgcgctagccgcctcggtgaccatgctgcggtgtaggccctggctttgccctttcgggcccagcgttccgggcccccacttcttcacactggaactgagcgggtgcgaaatgctaggagaagtcagaaaacgggggtgtccttactgctcccaggcctgactgcgaaacgcaacttgtgagtctcctggagacatagcttaaatagtcttgccagggccagttttggtccgaggtaagtgtgtaggggagagttcagagcaaagataactgaaaaaaaggtagtcgaaccactttttcagttctttataaagaaaagctggggaggaggttttgcttgtggtgtttttggaggacgggtgaaagataattgaacccatggcttttcccttagaaatttcccagtatacaaagtttaaaacagcaacagcatagaaataaacgaatttttctgaccgaatggagatttttaaagattcaaagcttcatttattaatggatttgcaagtttgaataacgtttgctattcaaaaacatcgtgtggaaactcagaaaattatcttgatccagaattaacgtcaattttgctgtgtttctttattttgggggtgtttcatatggttcttttatggtgatgctgcattatcataaagttacgaaatagatgttttgggacgtctgactcattttaagtgccagagattgtcaaaatattaatacattgttttgaattagtctataactttttcgtatatattttcagttttttgcattttaaaataaggcacactttgcaaaagggagaaaggaaattctcgctattatttgaaagtcatagtagagatttttataatttttaaagttaaatgtagtttcgctaatagttatggtttctaccttacattttagtttgtgcaagccagttgtaggcagtgacttcagttcattaagaatatgtatctgtccatttttacttattacctgtttatttatattacaggtgttttgttatcaaaatgtttcttttatatgtgcttgtatttttttaattgattcatagtattttgtacatatttatggggggtttcgttacatgcacaggatatgtagtgatcaagtcggtatttaggatatccatcaccttgtgtttttatcatttctgtgtctagggaatatttaaagtcatctcttctagatattttgaaatataaaatacgttttaaccatagtcaccctgctccgctgtcaaacattagaacttactccttctatctaactgttggtttgtacataccattaaccaacttctcttacttccccactcctcttccccccacaacacccttcctatcattctactctctaccaccgtgaaatcaacttcttttgctcccagatctgagtgagaacatgtgatatttgtctttctgtgcctggcttatttcacttaacctaa

SEQ ID NO: 1242057 - DNA, 4001 bp, Homo sapiens
cggatcacttgaggtcacaagttggagaccagcctggccaacatggcgaaactccgtctctaccaaaaacacaaaaaaataacggggcgtggtggcgggcacttgtaatcccagctactctggaggctaaggcaggagaatggattgaacctgggaggtggaggttgcagtgagcggagactgcgccactatactccagcctgggcaacagaacaagactctgtctcaaaaaaaaaaaataagactaaactacaagagatcaagttattttcatgtaacaaatttctcattaatcttattggaagcatgcctttaacagtgtgtcttaattaattcaaatatataagggcaacagtgctatacaagaacctctagagtatattaaaacattcaaagacattgagaagtagtccaaagctgtgctggactctataataagaaatcatgcttctttctggtaactaaagacacactgtttgctggtttaaggatgaaagaacattttcaagttgtagtaaagtataatatcatcaactgacacacggtggtaataaaccaccaagtaggaagagcttaaggacttgatgccagagaaaaaaactaacagaaaaaaactgaaaacagcaaaggcagagggccgggcgcgatggctcacgtctgtaatcccagcactttgggaggccagggtgagcggatcacttgagctcaggagctcgagaccagcctgaccaacatagagaaaccccatctctgatgaaaatacaaaattagccgggtgtggtgacgcctgcctgtaatcccacctactcaggaggctgagacaggagaatcgcttgaacctgggaggcggaggttgcggtgagccaagatggcgccactgcactccagcctgggcaacaagagcaaaactccgtctcaaaaaaaaaaaaaaaaagaaaaagaaaaagaaaaaagaaaggaaggaagaaagaaaagaaaagaaaaacagcaaaagcagagagtcaggaaagcccttcgctaatgtagcaggtgacagacttcattttatgagacctcagccccattagtcagaacgaagtatttctacaaagtacctgtaactgaaaagatcctccccgagacatcactaaactattagttactgtgtagctagggactgccagcaaattaattccctaagtgacagttcagagattctcgtgtttttgttttgttttgttttaaagaggatgcagacaccaagaaggtttttgtgtttgttttcaattaatatttagaaagaagacttttaaaaagcagtatcaactggcatgcgagacaaagagaggagttcagtgtggatatgggcatttctgctgaagcccagtagaaagagtacactaattacaacaagaaaaggaaaagaagaatctgcatggatgaagaaaaaaacatacaacccttcgtagtagtcaaggtagaatgtgtttgcggcgtgatcttttttgcaagcccagccacgtgtccttatagaatcccaagggttccacttgctccccgggaccaaaagcagcgccccaagggaggagccaagtgctgtggacccgatctacacgtagccaacccagcagatcccaaagcccggcgtctcctctcccccacctaggatgttctgccacctggacccgacgcgtagcagggctctctgtagccatatttcgctagatccttctttctcctgtagtttcaagtgtctaagcaaagctcccagagcaatcacgagacttctgtgacaggagccgttttcttccgggagataaacagctcccgccctgcggaaatcctgcagcttcgctgaggtggctgcttccaatcggcccctcctctggctcctcctccctggactcagccagggttccctccaagcagcagtcaggtacagcctccgtcctgctcttagctcccagggagggactagggcctcgcaggagcccctgcgcagagcacgtgcgaagctgactagtgaggttttctttttgcgccctgtggatgtcagagaacagtgtcataacctggcgccctacatacacctagtttctgatctgtctcgggctgcgtttttttgtttgtttgtttgttttttagttatggttttggtctttattgttcagcagctactccccaaacaacactaaaatgtttagctattgcttctttgcggattacttccaaatcaagcaacataaaattgatgtatcacttgatttaaatagatttgcatttatttacaggttagaggcattggtgggccttcctagaacacagtagtgaaaagacggaaacacatgccttttaatgtgcaagaccccttagcatccagttaaacctcttcatttttcacttatctagagaaatcctagatgccctatcaaaagtacactatccctagtacatcactaacttttccttccttcatagttctcctatttgcttatgtatttattgtgtctctcaccacctccatcatcactaccactagaaagcaactgggggcaggcagattggtttttaatgaataggtaagataaactgaatgaacgacgaaaggtgaaatgatgtgcctgaggtcacagtgatcattgggaacaaaactggaattaaaattcagatctattaactctcaatctagtgcactttgcacctcagaaatattgagattaaacccaagcaaagacagctagcaataaacccattccaaagtttcctgattaaggaagtttgagccaacatgcccaacacactaggggtagtagcataactcagagagattcgataagttgtatacatcagtaagttactgctccagaatttctatatgtatatgcatactttgtctccatgtttccttcccccttctgtatacatgtatacaggaggaagggggaaggaaacatggagacaaagtgtgaatggacaataaagcatagccaaagagtggcagccccttggcaccccgttgggttattactgtaaatgatacatcaaagaaacaaagttactctggtctcagggcagctttctcactattatttcagtccctctttatcattttcaaatgaatgaattatatcttcttgtttctgggccccaataaatcccagtttgatgttcattttggtttaattttgagtaacaggagtcatcactgtcacttgtaaatagttttaatagggagataacctaaattttaaaaaaaaatgtaaaatgtttagggacatcagtaaatacagaaaagaacagaatctttttttttttttttagatggagtttcgctctttgttgcccaggctggagtgcaatggcatgatctctgttcactacaacctccacctcccaggttcaaacgattctcccgtctcagcctcccaagtagctgggaatacaggcagccgccaccacaccagctaatttttgtatttttagtaaagacggggtttcaccatgctgggcaggctggtctcgagctcctgacctcaggtgatcagcccacctcggccttccaaaattctgggattaaaggtgtgagccaccgtgcccagcccagaatcattttttattcagatgtttctaatatattcttttgcattagttgaaaaataacaaattttaaagttttgaatttttttaacagtccaaaataaactcattttatacagggttaaaaaaaaatgactgtagaaactgtttcgaaaaagaatacttcctactgaatatgtacttgatgaccgaacattaactttgctaaatgaaaccagatggcaaatcattagtttggaccttggatacattgctattgcagtctcaacaaaaccgatgcagactagaaagcaccttacagagcaattagtaaagcatccttttttgaaatgattggcacaaagtaaaacaggattaacagagctagaactaaaacctaggtctctagactcctagcctagaggccatactacttctgaatatgt

SEQ ID NO: 1242058 - DNA, 4001 bp, Homo sapiens
attgaagtttgagtatatgtatttaaactagcctccatctgattaaaacaactacagattataaggagaaaaaaaaattacaccggctttcatgcactagtgtggccgaatgcatctgtagtcagcatgtccatgattatgtagaaagctatgactgaacacaaacgtcgaaatattatgaaaacaagcccaggcagatatacttggccatactaaaaaactgtttgtccttcactgaactcagtctttgtccgtttattttaatttattaaaaaaattttttttgagacaggatctcgctctgcctcctacgttggagtgaagtggcacgatcttggcttgctgcaactgccgcctcctgggctcaggctatcttcctgcctcagcctcctgagtagctgggactacaggcccacatcaccacgtctggctaactttaaaatttttgtagagacagggattcagcatgttgcccaggctggtctgaactcctgggttcaagcaatctgcccacctataggcctcccaaagtgctgggattacaggcatgagcgaaccggcccagtttattttaatcaagtgtacaaagattggagaatcttttgtttcctctttacagcttcgaagaattaactctgggatgatataggaaggggtgattatagatgaatttggaaagcaacatgcctgaaattcacgtgttaagagttctgattgcaacttttccactgttaatgttatttaaccatcctttttttttggagacagggtctcactttgttgcccaagcagtggcaagatcacagctccactgcagcctccaaatccatcctcccagtggtctcccaagtagctgggactccgagggggcggggagggggtctcgaactcctgaactcaagcgatcctcccaccttagcctcccaaagtgctgtgggattacctgcgtgagccactgcacccggcctatttaaccatcctgaaagtattttatgagaggctattaatatcaactaacttcccgcgaattgagagaaaagataaaggtcagcaaataccaaatacgcaaataagaaatgcaattaaaacactattccctgtttctagggaccctggggtcactcgctacagaagcacttggcctttaccttatttcctctttcactgctgcttccatggcttctctgtcactccgaccagctcccagctctcaggacaagggccctgggcgatcttttaaaaaagccgattgggtgtctttctaaaattacaaccagtacttcatcgtcaagtttctgggaagggagtcccctccagattctcatggagtgacaaatcttgactcttgctcctggaatttttcaggcccaaactagcgtttctacaatgatttatttggcaaatttgtcttgattatgggtggctgatgaggaacgtgcttttgttaggaaccgaaactgggcggcggtgagggcgtgtacgcaatgagtcctagagggtaaaaatcaagagcgttaagaacctggaaatgccgagacggcctccctgactgggacgaagcatctgcagatctatctcagtggcggggtcacgccacagattttgaaaactgaccctctctgtctccgttttcggttaagggtgggaagtgccggccgggtctttgctggaggctaggtctccagccagattgtactgcagcatcgtactcttcagggctagaaggggcctttgaaggttgttacactacccagtctaggaatcgcgtgtactccaccaccgccgaattccagcctttgcttaaataccacccaaaccggagaactcactactagacgccacttgggcagccaggcttagggcttttccagactttctggccccaaagtctgacattgacttagaagggatgaagggctggggcgagcggaagtagagagccaaatcctgcacggggtgcctgcctggtcctaaaacctttaacggctgggagacagaaaagactcaggccaggctggcatgtagcgatctctctaacccagctgaccaggttccaacaggatgacgcctgcgcagtaggtccaaagtctcacggcgcacagacgactgtctgagagaggggccgctacgccgcacagcaaacaagctccgcgacgtttccaggacccggataatcccgcccttagagcagagccggaagaaggcgggacgaaccggaagagggtgaaatgctttcggtaggcactccacggctgtgaagatggcggcggctgcgtggcttcaggtgttgcctgtcattcttctgcttctgggagctcacccgtcaccactgtcgtttttcagtgcgggaccggcaaccgtagctgctgccgaccggtccaaatggcacattccgataccgtcggtgagtattcacttcactaacgtctgaacctagaggagcaaggggtggggctacggcggcccaaggggtccatgaaggttccgcaaaagtctcttcaaaaggggtggggttgctgggatggtctgtgtggctagccaactgggacccacctccctggagtggaaagccgcgcacttctgtgattaggctagcgggaatgtaagggccacttcagcaacagaaaggagtggtggagcggcttctcatcagaaaaacagaactttcagtgcctgacttgagatgtaaacttgatgtacaaacggagagttgtttatctttcagatgtttcacagaatccagtgtccccgggttggataagaaagatatgtaaataggagtcttcatttctttctttctttttcttcctctgcacttcttggtccctgggtaattctgcttacgagatggttcgacttcgcttcaactttggaatggctattctaagctttactgtgtgactagaaagcatagagatttaagaaatgtgttttaacatgggaatggttaaaattgaagaaatagtacttaaaatttaatgtggtaaggctagtctttcatttggataattaactacatgggttgaccctttctgccccttacccattttaaaccttatttcagtaacaggtatagtcctgtgagcagacaaaaaccagatgcagggaggaaatgctgaaaagcattagccccattaaacctacgttggcctttttgtttcattctgctctgctcactgactgtaatgtccaaatcttatttgggcttttattatggtaaacgttataccttttgttcagtggtgaagattttcaggtgttcagttaggtttttacttgttactaaaatggttaatagttaagtctttttagatttgaaaataaaactctggttatttgcacacagaatagttcattagaaaaaatgattggttattctgagcagtgattggtgagtaaagggaatgaactgattaaggggtacgtcccataaagatttaagttaagttggaatttctagcagtcttagatagttatatgatgctttggtaattgaagccatctgaggctaattatctttcctttatgtttgcaggggaaaaattattttagttttggaaagatcctcttcagaaataccactatcttcctgaagtgtgagtttttgaatttcatgaagttttaatttgaattttaaaaatttataggtaatgttttaaattacctattttataagttctgaaatctaatagtctggcattatctaggtataaatatttttagtattactaaggtccttttactgaatcatcttcaaagtactcgtgtgaactttattttcttctcttgtttttctggtgtttacattgcatatatacactatgtagacattatatattagtatatataatgtatatattaatatatatgctgtatatactacattgaatattcagtcacatctcagtcgaattacatttacagttgatactttctgagaaaagcatccttaggtgattttgtcattatgcaaacatcatagagtatacttaaaactggat

SEQ ID NO: 1242059 - DNA, 4001 bp, Homo sapiens
cttttgtaaaccctctgaggtaaacaacaaaacatcaggttctgggattactccaaaagtaatgggaaaagatcactgtcacttatgaggacatattcttttgaaataatgactgaaggctatgaccacaaaagtaaaatctgaaggaggaaaaccaaaacagcatcccaaaacgaacaaaccaaaaccaaccaaccagacaaactaagaaccataacccacccaccgatttattcaagaaaatattttcagaatattcttcctgagagctgggctctgaggaagatatgaactgtgttcaagctatcagttagggttttaccagcaatcacaatacaagctgacaaatgctttaatagaggtgcaaggtgctagaataagaacagaacagacgtagaaggggaatttcttgctttttaagatgaggtgacaaactaggggccatgttttttaaaaccaagtttccagaagagctgtttctgggataaaacatgaatgagatatatgtatattgaagtttgagtatatgtatttaaactagcctccatctgattaaaacaactacagattataaggagaaaaaaaaattacaccggctttcatgcactagtgtggccgaatgcatctgtagtcagcatgtccatgattatgtagaaagctatgactgaacacaaacgtcgaaatattatgaaaacaagcccaggcagatatacttggccatactaaaaaactgtttgtccttcactgaactcagtctttgtccgtttattttaatttattaaaaaaattttttttgagacaggatctcgctctgcctcctacgttggagtgaagtggcacgatcttggcttgctgcaactgccgcctcctgggctcaggctatcttcctgcctcagcctcctgagtagctgggactacaggcccacatcaccacgtctggctaactttaaaatttttgtagagacagggattcagcatgttgcccaggctggtctgaactcctgggttcaagcaatctgcccacctataggcctcccaaagtgctgggattacaggcatgagcgaaccggcccagtttattttaatcaagtgtacaaagattggagaatcttttgtttcctctttacagcttcgaagaattaactctgggatgatataggaaggggtgattatagatgaatttggaaagcaacatgcctgaaattcacgtgttaagagttctgattgcaacttttccactgttaatgttatttaaccatcctttttttttggagacagggtctcactttgttgcccaagcagtggcaagatcacagctccactgcagcctccaaatccatcctcccagtggtctcccaagtagctgggactccgagggggcggggagggggtctcgaactcctgaactcaagcgatcctcccaccttagcctcccaaagtgctgtgggattacctgcgtgagccactgcacccggcctatttaaccatcctgaaagtattttatgagaggctattaatatcaactaacttcccgcgaattgagagaaaagataaaggtcagcaaataccaaatacgcaaataagaaatgcaattaaaacactattccctgtttctagggaccctggggtcactcgctacagaagcacttggcctttaccttatttcctctttcactgctgcttccatggcttctctgtcactccgaccagctcccagctctcaggacaagggccctgggcgatcttttaaaaaagccgattgggtgtctttctaaaattacaaccagtacttcatcgtcaagtttctgggaagggagtcccctccagattctcatggagtgacaaatcttgactcttgctcctggaatttttcaggcccaaactagcgtttctacaatgatttatttggcaaatttgtcttgattatgggtggctgatgaggaacgtgcttttgttaggaaccgaaactgggcggcggtgagggcgtgtacgcaatgagtcctagagggtaaaaatcaagagcgttaagaacctggaaatgccgagacggcctccctgactgggacgaagcatctgcagatctatctcagtggcggggtcacgccacagattttgaaaactgaccctctctgtctccgttttcggttaagggtgggaagtgccggccgggtctttgctggaggctaggtctccagccagattgtactgcagcatcgtactcttcagggctagaaggggcctttgaaggttgttacactacccagtctaggaatcgcgtgtactccaccaccgccgaattccagcctttgcttaaataccacccaaaccggagaactcactactagacgccacttgggcagccaggcttagggcttttccagactttctggccccaaagtctgacattgacttagaagggatgaagggctggggcgagcggaagtagagagccaaatcctgcacggggtgcctgcctggtcctaaaacctttaacggctgggagacagaaaagactcaggccaggctggcatgtagcgatctctctaacccagctgaccaggttccaacaggatgacgcctgcgcagtaggtccaaagtctcacggcgcacagacgactgtctgagagaggggccgctacgccgcacagcaaacaagctccgcgacgtttccaggacccggataatcccgcccttagagcagagccggaagaaggcgggacgaaccggaagagggtgaaatgctttcggtaggcactccacggctgtgaagatggcggcggctgcgtggcttcaggtgttgcctgtcattcttctgcttctgggagctcacccgtcaccactgtcgtttttcagtgcgggaccggcaaccgtagctgctgccgaccggtccaaatggcacattccgataccgtcggtgagtattcacttcactaacgtctgaacctagaggagcaaggggtggggctacggcggcccaaggggtccatgaaggttccgcaaaagtctcttcaaaaggggtggggttgctgggatggtctgtgtggctagccaactgggacccacctccctggagtggaaagccgcgcacttctgtgattaggctagcgggaatgtaagggccacttcagcaacagaaaggagtggtggagcggcttctcatcagaaaaacagaactttcagtgcctgacttgagatgtaaacttgatgtacaaacggagagttgtttatctttcagatgtttcacagaatccagtgtccccgggttggataagaaagatatgtaaataggagtcttcatttctttctttctttttcttcctctgcacttcttggtccctgggtaattctgcttacgagatggttcgacttcgcttcaactttggaatggctattctaagctttactgtgtgactagaaagcatagagatttaagaaatgtgttttaacatgggaatggttaaaattgaagaaatagtacttaaaatttaatgtggtaaggctagtctttcatttggataattaactacatgggttgaccctttctgccccttacccattttaaaccttatttcagtaacaggtatagtcctgtgagcagacaaaaaccagatgcagggaggaaatgctgaaaagcattagccccattaaacctacgttggcctttttgtttcattctgctctgctcactgactgtaatgtccaaatcttatttgggcttttattatggtaaacgttataccttttgttcagtggtgaagattttcaggtgttcagttaggtttttacttgttactaaaatggttaatagttaagtctttttagatttgaaaataaaactctggttatttgcacacagaatagttcattagaaaaaatgattggttattctgagcagtgattggtgagtaaagggaatgaactgattaaggggtacgtcccataaagatttaagttaagttggaatttctagcagtcttagatagttatatgatgctttggta

SEQ ID NO: 1242060 - DNA, 4001 bp, Homo sapiens
aagttcgctgcacccatcctgtcaaggttcgtccaagcttccaagaacaaagaaaagattattgtattgcattgctctatcagtacttacagagaggaggaagtggagatggagtaaaaatccagcataacattgccacttaaacccctttagaacagcataaaccaagacgttaacagtgtgtaggtgggtagtgggattacagataatttttttaaccctcttgtttatctacaaattgtcttcttatctattaattgctgtaactctttaaaactcctcagaagaccgtgtccccagctaccatacacccccatctttatctcagaatgcaattcctgcactcaagctttaagcaactgttttgcagatgggtcagtcctcctctcagaaaaccatagacagctgctctaaaacttcccgccagtctcagctggggacggaacctccttttcccttaagtatcaaaggttaccaatattaggctttttatttatttttttttacaaatgaaaagttgggaacatttgtaaaggaccttatctttcagaataaccagcttcaaatcaaatttttttcatctttgacatacacttcgcattctttggcacttcaattctgagagtgagcaactgccatctgctccattttacagatggtccacagtaccctagccaaggtcaggattagctcaggcgtaaattcaaacaaataagaaggagatctaaaaacttcaaaagccttttaaaaatgcatggcctataaaatctagagcagggagggtccctcaacccctgagcaaacctcaaccccccaaatctctatcctgctctgttaaaagccttaggaagtgggcaggaggagaactcgggtggaggcagaagaaagacggagaatgacagctgttcaggaaccagttgctgggaggaagccagaatgtcggagcgattccagtactagaagcatgggagggtctgctgccagggcagccgagggcggggagcgcagaaactctgcttacaggctgcactcgccccgactcctctccagacgtgggatcccatgttatacttggagtgaatctggtcgctcgctccccgtccccgattcccactttgcttgcctcttctccccatccatctaccccacacgcattttccagaaatctccccaactcgacgcccactcaggctactgaaccccaataacgccacccttttactaagaggagcctccgtcgtcccaaccccttgctccgagcgggaagcttggtgcagcgcaccaaggtccggtagaggggggcggcgccccctgcgccgtgggccagcaggccgcggacgcgcagacagcaagtggaccccaagggctggagccgcaacgcaagttccccctgactgggggacgccgcccagctcctggagcctgcgaaggctcttgaagctgagcttcccagggataccagaagggacactctcgtgcaattccggctagggaaagcgagggaaggtggcggctccgggcagggagcgagcgagtgctccacgccgcccgcaggatcgagtgagtcacgcggccgccagacgaggccggtggcgcacgcacccgagatccgatgtagtgcaccgcctcggcgccgcggctcccgccgcgcagacaccgcacccgcagcatcgccctggcccggctggtccacgcgcggaatgttcctggcctctgggccgcgtcggtccaagccttcccgagagcgcgcccggagcggggtgggcgggcgcgcggggcccgaggccttttgtagccgcgctccgccccggccgccccccgcggccccattggctgccgggaacaggtggtggggccggcgtagcgccccgaattaggaactgtcgggaagcgccgcggccgctggctcgagcctccgatgcttgcccttttttagccagcggggccactgacggcttctgttgcacgtccggacccggacccagacccgagcgtcgcaagaaggcccgttggagtctcgcgcaactgggcaggacgcgacttctgacgaagtgacaatggtctatgcatatattaagtgaatatttgagaatttaaatatgcaaagcgtgagtacagtgttacccttaaattcacatatgcgcactgaaccagtcacctcatttttcggtaaacgaaaccacctaaagattaggtggtttcttggtgcaacatcgggtttgagactgcagaaaactaagtctggaaattgggccatttgttccccggggaggcagtgctttccttccagtaccccgtcggttgttatttggaacacctggcatttcacatggtctttggccatatgcccctggcttgagaaactccgtcatgaaaatcgacaagtgtgggtcagaaataagggaggacgacagtttcgttccttccatttcatgttttaaaatttttgtttcaacttgatcaggattcttttttagaaaagtattttccctcacagtgcagtcttaattgctgtggatttgtacagagctagagaactcaggttaacatttatgctcctagcaggagggggggcaagagatttgagtatttcatttttgtacttatagaattataactattcatttttgatgagctgtcttttcaattttggtatctcaagcttgttttccagagttcatggatggaaagcaccagacgagcagatggcatggtggaaagagcctccgagagggaattaggataactgagttccagtcctgaatcacttatagactactatatgtcttcctgaattgcagtcttcttatctgcaaagtgagaacaatagaatttactgtccctagcacatggggggttgctgagaggccaaaatgagagattgtacatgcagaacttgatgcgtggcattagagctgtatgaggccgggtgcagtggctcacgcctgtaatcccagcaattgggaaggccgaggcaggcggattgcctgaggtcaggagtttgagactatcctggtcaacatgatgaaaccctgtctactaaaaatacaaaaactaggtcgggcgcggtggctcatgcttgtaatcccagcactttgggaggccgaggcgggcggatcacgaggtcaggagatcaagaccatcctggctaacatggtgaaaccccgtctctactaaaaatacaaaaaaaaattagccgggcgtggtggcgggcgcctgtagtcccagctactcgggaggctgaggcaggagaatggcgtgaacccgggaggtggagcttgtagtgaggcgagatggcgccactgcactccagcctgggcgacagagctagactccgtctcaaaaaaaaaaaaaaaaaaaaaaaaaaaaagccgggcatggtggtgggtgcctgtaatcccagctactgagctgagatcgagccactacactccagcctgggcgacagagcaagactccatctggggaaaaaaaaaaaaaaaaagctatatgaggtaatgtgttactactctagcaataaggaggcccccaaatgccataatatggtgaaaggagtaagtctaggttcataacttaattctgccacttaatttgctgtgtgacctggaaccaaatccctttatctttctaatcaaggcttcatacttctagtgaggttttgggaaatctctaacatttctcaaaatttaaaaagtacttactcccaacaataaaatgcagccacctctgaggtctgattctcttagtgtactgagggcagccagagatgtgcttctcctgaaaagaactgaagagtacagtaagtacacataacaagcccttgagattactataccatttctgcttgagattggaggacatcctcttgccacccattaaaagcactattttaattttgcagatgtaagaattgggagtgtctggtaataatgaagtttacgatgttgttaagttttacataatgaaaaactcatagccaaagagcatacccttatctcctg

SEQ ID NO: 1242061 - DNA, 4001 bp, Homo sapiens
ggagaggctacagatgggaccaactcctccggagaacagagccccaggatgcaggcagggggctctgatgctgggccctgtccctgggcttggaggttgtataaagggagcagaggcaggtctaggggctggcagggagaggatactgagggaggctgctacttacaagttgtttcccaaggctcttctctttgaagcccccagatgctgcatcagctctggatccgactgttcatcgcccaccatagtggggcccacctcctgcaaggtaagccacagtggctgcttggctggctgccaggaggaggtggaaggtcttgcctgtccttcctcccctgcctgctagccctgagtaaggttcaggtaaaggctacagagagtagcaaggattcttaggggctgagcacaagctgtgaaggggtggagcccatcaatgatcaggaggagcaatgtaggcgccctccctagtgccttaaagctcagctttagccaggcaaagtatcacgagcctatagttccagctactgaggctgaggtgggaggatcgcttgaggtgggaggagtttgaggctgcagtgagccatgattgcaccactgcactccagcctgggtgacagagtgagactccatttcaaaaaaacaaaacaaaataaacatgtaaatgaaagaagccagactcagatcacattaccacagaaaggtaattagtggttatctagggctgagggacttgggggaaatcaagagtgtctgccagtgggtacagggtttccttttggggtattagaaatgttctaaaactgattatggtgatggttgcacaactctgagtacactaaagaaacaacaacactgaattgtacactttaaatcaaagaatttatggtatgcacattacatatcaataaagccatatcttttaagaaataagaatcactttggggggccatttccaagtatgggttcccaagccccagacagagttttaggaggtctgggaagggacccaggaatccacattttggcagctgagcagatggctgcttcacaaaccgctgcccagggctctgcaagagctctctgttgcgtggtgaacccaccaagggggttgtgtaccctttgctggttcaccccagcactgggcagtgagcaagggcagagagcaccttgctgcccgtcatgtctttctgaagctaaaaggggactcctgaggggcaatcagaacctttttacagataaggaaactgcgcccagagaaaggaacgtgacttctaactcatggtgttcccacctctaactgcacagccccttctcgccttccttttttccaagcagggtgttctttcttttcttccttccctaaagcttcagggatagcccttcctggaagtgcctaagggtgcagctagttgctgtttatgggtcaaggacttggcaccggggttttagcgccttggcaggtccttatcttttccaaacctctttctctcaggttattcgcccttttttcccctgcggagcggctctgtgcagggcactaggtgctgcgcgtgaggccagggctccctgggtctctcccgccgacaggtaggacaggagccggaagcgcccggaggtcgccctgttgccgggacgcacgtacccgggccccttcgcggcaataaaggcttcaggccggccagagctcgctgagtcccggaagccgagctgagcccgcttctccactccctctccccggccaagggggcgtgtctgggcgggttcccggtccagtccccggtgggtgcagcccaggagggaggcatgaaggtgcagtcgcagccccctagggcctggtcccggctccaagtcgccaggcggccggtactcaccatgcggatctgggtgctgatgagcaggtagggcatggtgcacgcgtcccggcctggctcccaccgggggctctaggctggacgccgactccagcccttctcgcgtcgggactgcgacgcgcagctgggagtcccgttactccggctctggccacaggcggcgtcaatcccggggcaccttgcccgtgaccgccgtggccgccaatcaggagcggctgccgtgacgcgccctgcagtcggcggttcggggcccgcccccgccctcccggcggcggacttggaccccggggcccacctgaggcttccgccgagtgatccagttgcgggaaggtggagtgcggggaggagggggcggtcccacgacctggaaggacactatcctgaagctccagcgtcctccaggacgcttagtgctgttttctttgcagcctgtgatcttactgcgtccccgcgcgcgtgttgcccccgcgcccgcttcttgaacacttcaggccaggttccaaagtcccctgccaggcagagcccagagcaaacggcgtcctcacggaggcctctccaggccccagcccacccctctcagagacgcctcgacagcttcaacggggccccacttcccctcgccaagacatgcgctccagagattccttaagcgctgaggaggccggggcacgaggctcggagctagccctgaaggcgacaactaaaataccacccagggcgcactgtgcattccccctcccagactctaattccagcacagaggcggatccttgcatttctgtggacccgcaggaaagtctgtaaaggaaccgcgcgcttggctgggtgccaggtctggagtgactgaatggatggaacctggccttccctcccctgagcttcccgcgcagctggacagacgcggcgcacgcgcaggaggtcactgggcaacacctggggcaaatgaaacaacttcccccgcaccagccaccaatgagcggctgcgagttcccaaccgtgtgtccacgcccctcatccgcagttatcaaaatctgacaactcatccttctttatctgccttgttgtgattggttttcttttttcttttcttttttttttttttttttggacatggagtttcgctcttattgtccaggccggagcgcaatggcgcgatctccgctcaccgcaatctccgcctcccaggttcaagcgattatcctgcctcagcctcctgagtagctgggattacaggcctgcgccacgacgcccggctaattttgtatttttagtagagacggcgtttctccattttggtcaggctggtggcgaactcccgacctcaggtgatccacccgccttggcctcccaaagagctgggattacaggcgtgagccaccgcatccggcctgtgattggttttctagaaaataaagcaaaacaaaaacagcctgtaggtagccttccctcccatgggagggtaataatcttcactttttaagaggggcctttataggggatgctgccgttccaacactttgacagacgtggagagagctataagggaagcaggaagttgtaatcctaaacgttccttaactggtctaatttattattctgtagttcctacccctgccctcttacccactgacctaacaagttagccagagagataaaacacattcatgcttaacaaaggatgtgttaaaactgacgaaagggccgggcgcggtggctcacgctgctaatcccagaactttgggaggccgaggcgggcggatcacgaggtcaggaaatcgagaccatcctggcttaacacagtgaaaccccgtctctactaaaagtacaaaaaattagccgggcgtggtgggggccgcctgtagttccagctactcgggaggctgaggcaggagaatggcgtgaacctgggaggcggagcttgcagtgagccgagattggttgggccactgcactccagcctggggcagagcaatacttcgtctcaaaaaaaaaaaaaaaaaaaaaaactaacaaaagattgatgcccaggagctcctacaactcagtgagaaaaagatgaacaatggaaaaaacaggggtaactgacttgaataggcccttcacaaaagaggaaatagaaatgaccaataa

SEQ ID NO: 1242062 - DNA, 4001 bp, Homo sapiens
ctgggattaaaaatgtgagccactgtgccgggcctgaatatttttgttgttgtcatttgagacaaggtctggctgtacagcccagattggagtgcagtggcgccatctcagctcactgcaacctctgcctcctgggctcaagcgatcctcctacctcagcctcctgagtagctgagattacactcagctgatttatttttatttttatttatttatttatttatttatttatttatttatttatttattgtagagatggagtttgctgttcccctggctggtcttgaactcaggagctcaagcaatctccccgcctcagcctcccaaaatgctaggattacaggtatgagccaccatgcccagccaaatattttatttttaaggtaaccaaagtaagttggttatgtgttaagtatttgttaataacacattaagaaatcgtggctctattttgttgagatggtctacattatagtaacgtcaagtacctagtaataaagcccagcgtgggactcagcccaaaaaagctaggtctgaatcctggctctgccacattcaagctgaatgatctgcaacaaattcattcatcagtctgtattttagtgaattcttttgcataatagaagctaatgctaatatttgttttctactactattgagaagattaaacaagatacatatgaaggaccaggcaaatatagcctggtacttacagcccctcagtgaaggttatcatgaaatagatccagtgctagcccacaaagacctattttactgacaaaataactcaaggtggttacaagtagcattcctgaactctggaccaagcagaagtgttaatgtttatgatgtagtgagggaaaggactaagaattgccctccatctctgtgttctgtggagagactctattgtaagttgtcaccctcagcacctcaggcagaataagaccagggatgagctgcaactgaccccagggaggtacaggagaggggacagaatggctgcggaagggcacaggaagatcgggggtgaggcaacctgcagagatcaggcaagcattcagaaagatggccagcagcttcctcaccttaattccatgctagccctgaagaacatacaggacacttggcaagagggagaaagggcgcagtcccagactgcctgggatcccgggcacatttcaaggcaaaaactgaaacctggggtatgatgcttttcacagggttccttttacccctgctaaggacaaaaggtacagccagatgatgctgaaagcaaatttatccaacagcccaggagtcatgaagctatttagacatcccaagaactgaaaggatgaccttcacctccctcagtaaccaaaatataaagcaacataatataagtaagtccaacccagtcctgagttttcctacaatgactactactataatgctgtctttcaaatagctaactcttcccactcagactcctcaatctttttctcctaatcactagttcaggcttcctatgggccaaaagcttcaacttcatcgcttgagctttgaattataaatccttgtatgtttgtggaaaggtctaagagttccagtcatgggaaacagagaaactaagctagggtcatcaaggtggtgctgagagaagccagtgggatttgatgttaaccttgacggaggctcgaggaatcctacagtcccaacaccagcgtcagagaagggcccaagaagcaggattcatcttaagctgaatttacaaattagctaatgcacacttttacttaatttgttatggtggcatttacctttgccaggcgtcagcttggtcttctcattgacaggaagctccttgaggtcatgttcttcatctgtttcccttcagcacctacagtgataggtattagcagaatcccagggcttcccagaacaaaaactgctgagtaaagggcaggtcacaagtagcaagggcagttcccgtgacttagagagaagaggctctgactcagagaagtaatgcgagaggatagataaataggaaaacccagttaatgtgttacttattaggctggagctagggtttgaaaaagactgaaggcactaaagaagatgaggagaggggaggtagggtgttttgagctctaacattaaataaatgttctaggtagtgggctcttaacaaagatgaagttatgaactctagccacagacaaacggttgaaagacccagtgtgatcaaactggtttctaatcagggttgcaaagtgaagctcagactggatgcaatttgctgaaagacagggacagcctgtaggttcctccttagagctccacatcctctctgcactcaaagttcccccttgctctagacagccctcctggatgcacttcacatggcctggagtggaagagaaaagagattaaagaagaaaagagaaaagagattaaagaggaaaagaaagagagagagagagaaagagaaagagagaggagagaaaagaaaggaaggaaagaggaaaggggaaggggagggaaagaggaaaggggaaggggagggaaagaagaaagggggaggggagggaaagaagaaagggggaggggaggggagggggaggggaggagaaggggagggggaggagaaggggagggggaggagaaggggagggggaggagaaggggagggggaggagaaggggagggggagggcgaggggagggggagggcgaggggagggggagggtgaggggagggggagggggaggggagggggaggggagggggaggggagggggaggggaggggagggggaggggagggggaggggaggggagggggagggggagggggaggcagaggggagggggaggcagaggggagggggaggcagaggggagggggagggagagaaggggagggaaggaggaagggggagggaaggagggagggggagggaaggagggagggggagagagaaagagaagaagagaaaaggaagaaaagaaaggaggaaaggaaggaaggagggaggtaaggagggaaggagggagagagggaaggaaagaaggagggagagagggaaggaaggaaggagggaaagagggaaggagggaaggaaagagggagggaaggaaggaaggagggagggatggagagagggaaggagggagggatggagggagggaaggaaggagggagggaaggagggagggaaggagggagggaaggaaggagggaaggaaggagggaaggaaggagggaaggaaggagggacggaaggagggagggagagaaggaaggagggagggaaggaaggagggagggaaggaaggagggagggatggatggagggaatgaaggagggagggaggagggagggaggagggagggaggagggagagagaaagagaaaaagaaagagaaagaaggaaagaaagaaagcccacactacttactcaaagcaagcaagcaagccccacactgcttattcacaggaaggaaggaaggagtgaaggaaggagggagggagggagggaaggaaggaaggaaggaaggaaggaaggaaggaaggaaggaaggaaggaaggaaggaaggcaggcaggcaggcaggcaggcaggcaggcaggcaggcaggcaggcaggcaggcccacactgcttattcacaaaatgcagaggaaacttctgaatcttctcaggtgagataatcttaatttgctactctctctctactcacattcccaaggccagtcatttgccaaattgtaaaggcggccttatttcctcactccagtctttgggtggtgctctgcttcctgccaagaccagctgcctgctcacagctgcccctgctgctgctcagcaccacggaagcaaagggcagccacggccatgcttgttctatctcctgtctccacaaactcaccaaaatagacttgtcttcactgtggtgtcacaagctccttgagggcagggatcatgtctgactcagctgtgtctttcccacagcgg

SEQ ID NO: 1242063 - DNA, 4001 bp, Homo sapiens
tcacagcttcccaccacacacacaatccccagcacacacacagatagtacttgtaacatctgcaaatcatgagcagagctagaaaccataaagatgggcagaaccctagaccctttagataccttccttccagaaacaagtaccagtgtacccaggacagccctgaatggcctgatcccgagccctgagttctccagtccaaaatacgtctgccatcttattcaaaaggcaaagtcttttcaagagtgtcacaatgtgtccgacagcaaagcacctataattaaataaatattccaaaggaaacgtttgacccaaaatcttcagaaatgttatttgtatactagtcacatttgtatcaacccaccgtattaggttaggtaccccaactaatccccacctctggaagggaagttacagagaatttcatgcaattcatgcagtctggtcacacatatgatcctctcagggctcagggttagcttttcagtgacttcattctttctcagttgcaattgtgttcaaattgagaaagatttccatagaaaaatacaaacacccaacttagagtaaggccaggactgtggttggaaacccccttggacccaatgtagatcttactctatgatgctaatgattggacaactggagttctgtcaaccttgggcatgagccaactgatggattctggggtgtgtgtgtgtgtgtgtgtgtgtgtgcgcctgtgtacacaacctaagtgtctggtgagtgcacgcacacacacaccccagaatccatcagttggcccatgcccaagagtaacacacctttcttctagagctaagaaagacagcttataaggtgaccaccatcactcgcttaaggcatgtaaaagcaaataagcaggtccaagcctgcacgcagacagaaccagtgggggttttgctttggacttaaccacctgtttaaatcttgaggaaacacgattacagaagtctcaatcagagcaaagaggtaccaaatgataagtattgaacatcatgataaatggaagaactaaaaagccacaagccaagcccctggctgtggctctaaggtgctgaccgtgttagaaagatggagcatttcttttacagagcatctggagagatgggaaaagatgccacaaagatcaaaaagaaacagcacttccaaagggaaaccttccctggagatgctgtcccaagctttcagtgctgccattgttgtcactgtgctaatatttaaatcagacagaagaaagtggtttacataaaccggagtcccacacagtcgggctcctgggcggccggctgctgttctggtttgcccaccttggctaaccccactccagaattaccctatcactagtggataccctatcactagtggacacaagtgaccccatctttcttttaattaatggaagaaggaaagtttgagttttaaatacattcattacttttgagtctcaaggtagggacactgcacaaatgtcttccttcatttttaaactggtgccgccaataaactcggcttgacagaaaggcaggaaggagaggaaatctctgggaattccataaagtcccctaagccctctcctaccagctggtgggccccctgaaacctcaagcgggagggtcactgccagagccggcacaggaccggggagttgagcccagggtggggcgtcggggccaggtgctggctcccgagctttcccatccctagtcccctctagagggggcggccgggatgggggaacgggacggcggcggctcccgcccccgctactcaccctcctgctgggcgccccgggcgtcctggcggcgccgcccgagagcagggtgaccgtggacgtggagcgcagcatcccgcagcggcggtcggtagcgggctggacgccggcgttcctcccgggcagaataagcgtgcggggcccgccctgcgcgggggcgacgcgggacggcgccggctacttgcagcctcagctgcaccgcgaaggcccgggggtggggccgggggcggggccgggccgggccggggcggggccgagcgcgctcacccgacccgtcaggctgcattttctcccgagggcgccgacccggttaaagttgagcaccatcctctcccagggcgctgcgccctcccagggtcagtcccagggcaagaaggagccctggacagcctggacgcccatgctctctctgtcccccgcagagttgagatccacctgcccattcagtctcacgacctacccccaccccggactgccccctacagcctctgcacgccctcgtatcactgggaccctcaccccatgtcattcattcagtatttcctgaatgcctattatgcgtccccaccagcagccaacccagtcgactggctgttggcctcggagagtttgcagtgtggtggggatgacaggtgccgggctgtggtagaagaggagataccatgtactaagggagcacacagccaacctcagaggaggtgatgactaagctaagacctgaaatgcaagtaggagtgggccacactgcccatatttattcaatgattactgtgggcctgcctggcgagcactttgcgtgtgttacctcatttaatcctcaccattgccctttgagggagtcactgttgttaccttgtatccccattttgcagatgaagacgctgactcacctagggattgagcaacacagcaggcgacccactggcctctcagtggcaaaggtaggatatgaatcccccagtccgaccctagtgccttgcttgtcccctctgctgtcccctaacagagggaggagggagtcccaggtcaaaagaactagcatgcacaaagatggaaggaaagcaagggaaggtataaaatatgtttcaagaattggaagtatcacagtgcagtgggaaaacagtggagaagcagcggaagggagctgaggacatcatgaggaacctgtgtgcttagctggaaatttggcctttatcttgaggacaaagtgtttttcagcagggaaagacacaatctctgtcttcaaagcccaggtcaagcactgcctccccacggagctctccagaaaccccttccccaaacacgcatgctcaggaacttagcagctccgcgggaccctgtcttctgttagagttatctatgtgtgtgcctgtaccctgtccttctggagggcagaggccaggccttgaccctctctgaatgcccaatggcaccaacagggaagatgctgaaaaaaaaatgttgctaaacagaattacagatgatcctgtggaactcactccttttgtagatgaggaaactgaggccggtgtatacaagtgactttcccaaagttgcacagcctgttcttcaccatcctcatcgtcatcctcacagtagctgtgcttgtgtcctaagtgctttatatgcattttctcaaccaattctcacaatgccccacaaggtgggctacagttatcgcccctgttttgcaaatgaggaaactgaggccagagacattaggttaattggtgaacagctgagactacacatctagtcttctaacccaagtccttctgcttttctgctacactcctctctgcatcctcccatccacctatcccttccaaaaagaaaattgttcatgacaggttccttcccattccacttccacgaagccctctaatctacccaagtctttttcatattgttaacatcctattcacacggtgttatatttctttacaaaagcagcagacagctcactagcttgtgagctctgtgtagaagctggatcttgtttacatctctgcctgtccaatatctagagcaggtaattgacgtgtggtagtgcaagtaaatgtggaaagaatgaagaaatgttattacagagtaagatttcaactcactcatggtcatgaaaaacagaaactaagatccttgccaacccagctcctagggtgggccagggactccaagcaatttggcagctgaagcaacaagagcc

SEQ ID NO: 1242064 - DNA, 4001 bp, Homo sapiens
gacaagcctgaccaacatggagaaaccccgtctctactaaaaatacaaaactagctgggtgtggtggcacatgcctgtaatccgagctattcaggaggctgaggcaggagaactgcttgaactcaggaggcggaggttgcggtgagctgagatcatgccattgcactccagcctgggcaacaggagtgaaactctgtctcaaaaaaaaagaagacagatacttattaccatgcagtccaggtattcgccttggcttgtaagaggcaaacaaggtctatttagtacaggagacataatgacagcttcttgctttttgcctaagcttttactaacagaagactaactctttctcggacagaaagagcctgctattaagagaaaaatgatcggccgggcacggtgggtcacgcctgtaatcccagcactttgagaggccgaggtgggcgaatcacgaggtcaggagatccagaccatcctggctaacagggtgaaaccccgtctctaccaaaaatacaaaaaaattagccgggtgtggtggcgggtgcctgtagtcccagctgctggggaggctaaggtagaagaatggcgtgaacccaggaggcggagcttgcagtgagccaagatcatgccactgcactccagcctaggcgacacagcgagactctgtctcaaaaaaaaagagaaaaatgatcaggttgggatgggcctataccctagttatttttttttatttttattttttgagacagagtctcactctgttgcccaggctggactgcagtggcacaatctccgctcactgcaacctccagctcccaggtttaaccatgtctggctaatttttgtatttttagtagagatggggttttgccatgttggccatgctggtcttgaactcctggcctcaaatgatccgcctgcttcagcctcccaaagtgctgagattacaggcatgagccaccgcgcctggccttgaatatttctacaatgatggaatgtacctgttaatacagtgtgtcttatcaaacacatgctgccaaggagagcactgggtattcttccagtgtaaagtagattcctaggcagtctagggagtcaggaaaggcttccctgaggatgagatggaagagggactgagggcccaaagtggctgaaagacagagagccaataggaggaagtccagttacagagggccaggatttgggtttttaaccatttaatggttataaactgagactaacatactcagatttagactttacaaagatcagcaagtataatggattggaaggatcaagaattaatcccagcctgaccaacacaacctccacttcctcctcccagcagtttggaatccttaccttttgcaatagtatacgttcattcatttattatgcattcgataatatttactgagagcctactatgtgccaaacattatcctagaggttaagaggggacaagagcaaagggtcagcagtctaggggtgagatggagtcaaaaggacggcaggtcagctggaatgatgagaacagcagtggagagcctttaaaagtgccttggactggaccgattaccttctaaatgccggcgcccggaaaaatcactaacaccctttggacttacgtatttccatctttgtaaaatgggaacctacctcgcaagggatgttgcaacaatcgaagaaaactatgcacaatgcttgacatccagtgggtcctcagtaaatagcctaagaaggaagcaaggttatggttacttctggaagaggtggcttgggggctgcgacaggtgcagcgattgcctgatgataacatctagaaaagcccttgctgggcagaggggcagccgacgacccccgccactcagcgagtctccaggtttcccggaaacgctagctccagtgacttctcagatgcccctatgggaccccacccagggctgccgccgccaccacctactgcagccgaagcggatgcacctcgcgactttccccgcagccgctgccggggccacagcgaggtcatgacgcccgtgacgcatacgcagccagcacgcacgcgcgcggcgtggcccgcccccccctcccaccccggaggcggggccgtgagtcccgggctccgccccggagcgtcgggcccctccccgggccccgcctccagctcgcctaggaccgcttggagccggcagctcgcctgccaaacccggctgggaacgcctggcagcttttaggagggggcgggcccgggggtggtggccccaggagcggttgccgcggggaccgggcagtgacgcggcccaagggcggaagtgagaaagttgtctgcgtctcgaggcgagttggcggagctgtgcgcgcggcggggcgatggggggctcgggcagtcgcctgtccaaggagctgctggccgagtaccaggtgcgcgggacgcctggccctggggagctcgcgtgcgggcctcttctcgggagcagggtccgggagctggctgcggggcggccgcggcctcccagcggtccgctaatccccgctctggctttgccttccaggacttgacgttcctgacgaagcaggagatcctcctgtaagtgctgccttgaaccctgcctccgaccccgggatcctctagagacagcttcgggggcgctgtcccgagggaggggcgggggctggcctgaggtctgcagaggagcgggagctggaggccgggagacctagcccgggctgcgccctcctcccggcacgccctccccgccctcgcctgaggccccagcgtggcaccgcggagccaccttacagcctccaggaaaagttaggcgctctttgaccctgggctccactagcttcagcactgccgaacttcctgccccagtccggcaggggccgaccttgcccagtggctaaaccacagaagccttggggagcccggctccttctcccaactttacctgaataatacagtaaccgttatcgctttctgagcactcaccatgtgccagggactgtgctaaatggttgcctgcgttacctaatttaatctttaggagagaggtactggacaatgaaacaggttcagaaaggtttggtaactgcttaagacaacactctgagtaagtagatttgaacttgggctggaagcccttttgccggatttatgcaggccaggttcctgtggcaaagataagctcatgggaaggaggtggaggccgaggaggacagttcagtgtggttgctaaaaaggaggctttgagggtaagagatccctggagtgaaggtgagaatgagatttttggttttgctcttttctccgtttttttttttttgagacagcgtctcgctctgtcgcccaggctggagtgctggggcacgatcttggctcactgcaggctctgcctccgggttcaagtgattctcctgcctccgggttcaagtgattctcctgcctcagcctcctgagtagctgggattataggcacccgccaccatgcccggctaatttttgtatttttagtagagaaggggttcaccatgttgctcagactggtctcagacgcctgacctccaaagctccgcccgccttggcctcccaaagtgctgggattacaggtgtgagccaccgtgcctggccaattctttagggccaacttctggctcctttcccaacttcttcatcccttggggatctctagaatcagtgccaagcacatagtaaatgctcagtaaatactcattgcaagaatagactcctaggctgtactgccttgtgacatgtccttttgcttaccgttgcctgatgactcggaagttctgtgtacgtggttttagctcctcacctggttgacaatgagcagcaggcaaggagtgggaatgaacacacagggagaccgatcgctgagaacaccgacagttcccctctctctaccagagcccacaggcggttttgtgagctgcttccccaggagcagcggagcgtggagtcgtcacttcgggcacaagtg

SEQ ID NO: 1242065 - DNA, 4001 bp, Homo sapiens
gagcccctcgcacagccagcttgatcttgcgccatcccaggtggttgagttcagccaggttgagcacaacacagatgccacttacagcaaacatgaacactagaaagacagtcttctcagttggccgggacacataacattccacctccttgatgcaggggtagcggttacactcatacaaccctgggacactaaagccatagagaaaatattggccaaccaggaacccaatttccagggcatttcggaacaccacttggataatgtagaagcgggagatgccttcctgccttctgagcttggattttgatgcagtgcgtagacctgatgggtgtggagtcagctccttaacctctaaacaatctggctctgtctccttactggtgttctctgtgttctgcagcaccccattcacaatagcattttgcaacttcttatcttctcgtttgcccccaccactgcccccacccccagttcctccaggacctcctatggactcaggggggtctctgtccagggctaggaagactgtagagtagcggcgttctcgctgcttggcggactggtgcacagagtaggtgatgaagcaaagactgggggtacacaccattatgatctggaagacccagtaacgtatgtgggagatggggaaggcgcggtcatagcaggcctggttacagccgggctgcagggtgttgcacacaaacatggtctgctcatcatcgtacaccgtctcccccacaatggccacaatgaggatccggaagatcaccaccacagtcaacaggatcctgaacggaggaagagggagggagagaggttctcacgggctgcgtcactgacaggaaacccctgctcctcccttccctttgctggtgtttaccagtcttttgactggggagctgtccatcccgggctggtactgaactaggaatctgggaaagctttttgtctcttccttttctgctgagtgctggtaggctgggaatatttcatattatagagatcccaggtacacacatctccatacactggacatagtctacttgcaacagatagatttcatctctctatatagaatgtatagaaacacaaaacacaccttcactctggatatggcaaatgcacacagaatacctttacagatggtgcatgcttcgaggtctacacacagggtgtgtaaataactactccatgtgtatatttagtttattctcaacatgaatattaaatttaatgctttatataagcagatggctatgaatatatattcatatatattgaactcatatatatataaagctaggtagatagagacatagatatagatacagacccaaaaatggcaattgggtgtgtaggctcggtaagtttacaccgccaaataagtttggtttagtaattatttgttgagaaaagaggcatctgctctgaagagcaaatccatctccccatttgcccttttctgtccaaatgcaatcctgccttctttgtagattctatttagggaaccaaatggagattggctctgactctggagagtggagggaccaagactgagccagcggctccttttctgatgtgggaagagtgaagccccagtggtgcttgatggggaagggatgggcagctggttaggagtagctagaggaggggggcatcgcggggcgtcgggtaatccctcatcgccgggaacaccggagccttgacctaggacgatggggaggaggcagaggacggactggggattggagcgggagactcagtccaggtgtgagaagggactcccgggggccgcccgacggggccccctgaccgccggcttggcgcccttacctcccgatcatagtggagtgctgctgcaccgcggcttctagcagcctctccaagatggtccattcccccatcgctgtgcatccggaggcagcagacaaagactgggcagcaccgggcacgttcccgctcctggcccctccccgggccgcacttccagaatgggagtgaattgcctcccaattaaagaagcaattttttaaaaaatcctcgaatccccctttccttttattgtacttaaaagagaagaaatggggaaagaaatccaagcgcgtcccgaccgatggggcagttggcgcggtctagagagagggcacgaacctcgggcgccgtccggggttcgggtctggatcccgcggacgccgggacgaggggcggggcggggtggcagcctgcaggtcctccagcgctcgcccgcccaggagaagtctcagcgccgctctccgccgcaggttgggggccaggggagggtccgaacaccggctctgttcctgctacttcagcgggcacctggcgctccggcgcggcagcctgcgaggccagggccgagcgcgcggagccgaatgctgggctcggggatccgcggccgccgcctctaatccgcccttaagtagtctccgcctgcgtcacgccaggtcggcggaggggagcagagcgcgccgtgcggctgtcgctgcgcgtcggagcccgaggggccggggacgcgcgcggggggagaggggcaagagtcctggaggcccggcggggagcggggcgatttcgaaaggaaggactgcagcgcccctcggggcttctcggggagcccaggtaacctcacctgaccgccagacccaagcaggcggagggggagccgggagcggacgcgtgggtgagtggggaggggagtgagtaggtatcttctcttctctcggtgcatccctcaccttttcgctttttgcctcctggagacaactgaaattccttccctagatggagatgctggctgagggagggcgagtgggggcgaccacttttaaatctcccttaggggacagagtggctgagagtgcttctgcagagtggctgcggttcggtgcctctgtggatccgacagtgaagtgagaaaggcttgatgggaatccatttaggctgaagggtaaatgcaggtgtggagctgtctctcggtataggggtcagggcacacgagcgcatctaacaggtgcctcgcaaagagcaagtggggtggccatggttaaaggtctcgcttccccttgcactaacccagatgctcggctctttttaaattattgctattattttactaatgggaagggggggcggggtactcgtcaggtaaactgtgatttaatctgaatttaagacccagtattctgctagcagaaacagagccactcacagcctcgccctgcccccacttgccttactgggtttggctttctcccctcaaccagcagatcccggtttttaaaattcacattgtgttgtcagttctgtctagagcaactacttaattggttgctgaaaaattgaaacaacctcactaagctgctaattagcccaggggtcagtattaggagacactgtagctggcagtgtttgatgtaaatgtaccaaaagtccaatgggaaagtaattgtcatcctttcgaaaacacgaccttgaaagggttgctaacttgtcctaggcatataaagggacctagccttaattatccacagggatcatagcacatatgtatattacataagccacaccatggtgagccttcacttctggaacaaccgaggtggttgggtagttggtggcccagggactgggaagaaaggtgcagggcatggccctcagtccactcacagtgtacttcttcataaaatgatgtttaaacacacggtctaagcttcgccgccagaaagatcactgaaatcctctgctagggttgacatctttaccccaagaaagcagcctttcactgcaaaggagtaaaagagtccactaacaatggagagagggataaagtgatttattagtttccttctgaacacggaggaggttcaagggtgaggacgaatggataccctattatccagttagcttccagatggaatggtgatcccctaacccaaacttggtgtgttttcccaggtttcccttctactccccttggccct

SEQ ID NO: 1242066 - DNA, 4001 bp, Homo sapiens
cagtgagccatggtagcgatgctacaacctagcctggaaggcggaataagtccctgtttcaaaagaaacaaaccaaaaaacaagaaaaaaaaaaaactgacacgaagaaaaagactaaggcaggcaaaattatttgctttggtatactcaaatttgtctgttaaccccagattacatatttacagaacagctctgagtacggacttcactgcctgccacattaactttcatatacaggcctctgtgatagagtaactaaccaaaagaaatgtcaggcaaacacataggctttctcacctatacgctgtttttttttttaaccaatacacatacatacaagtcattttatttaaatcccacctacgcctacgctagttaccaaaacctctgtaatatccaaggctaaatacacttttacaatacaatgaaactgttaagcagaattctctaaaaaagctcgattaaccatccttacaggtcacagaaaacgtttttgcagagttctagctttgggatttcaaattccattgttttctggaggctgaatttgacgttatccctctctacaaatgcttttcaaaggacagaaagaagccagacagaacacgcttccctgcactatccgactctgcctaacattcactcaggcaagacttcagaacagatctaatcatgcaggatgagcaaagcagaccaccacctaggaaagcaagccaaaatcagtcttccccaccctcaacagattccagttgctcaggagctgtatccacgctcaacctgcggacaccggcctcctaaagaacctgcagaccaaacgcccacctaaggtgctgccactctagctcccggagctccagcgagaccagcgcgcccccacagggatcccggggcagagaaaagaaaactgcagaacaaacgcactgcttcttcaactaggcaacaacaccgatcaatcctccaactaagcattgagtaaatctcatccagagagaaggagacctgaacaaaaacgtttcaggatgctgcccagcctgcgcggtagcaccaaagccctctcccgccctcagcggacccagcgcctgcggagccgcgcccaccccgagagactgcccgggggccagctaactcgccccgtcgcccccaaaagactggagaccatgccaagttaccgccccgctccgggcaaagcagaaaccccggccagacgctggtcgccgctacacaccctcagcccccaacaaccccccaaggcggccccggccccagcggaacggatacatcgctctctcacccggagacaccgatgaacagacccctctccccagaacccggacacactgcttcttcatcccagcaatgcgaaacggacgcccacgcccgctcaaagaacccccaagaccccgatgatctgcctccagagacaaggtttacaccggtgtaaaccttgctaaactgcattctctgccccaaagagctcgggacccgggtaaaaagaccccttgtcccggaaccccgctacaccacctccaagaagctcaagaccctgataaatctccctcgacgtcaaagacctaggaccccgtgtgccgccacccacccctaccccaagccggaagagcccccaggatccctaatacattgccccctcacctcgggagctccggcacccgctacaccgcccttgggcgcccgcgcccggatcccactgcaccgcctcctcgccccccggactcccaaaccccgccaagcctcgcgcccaccaggcagcgccgcgcagcccccagagccgcccccgtcaggagcccgcctgctccggctgctccgtgtccccgctccccgaccgctcctcagcggagacgcgctccgggctttctaacctgagcagcgtcggagggcgagcagacacgggagccctgaggaagagaaggagacagcagagaaggggtggctcaggcctgcggtgccgcagctccagcctctcggcaaggaagcgcttgtgtgaggagagccctcccgctccgcgcgcagccgggagaccgagccaccgccgtgcccgcagctcttcccgcgagatcccagccacggcaaggggcggggccacggcggggggcggtagcggcagctcctcgagtgacagtcctggcagcctgtcggctgcaggacgggcggcaggactcggagtctactacgaccaattgtaaaaaaggaaaggtgattctccccgccccttctccgcccctcttcttctccgctcctccttaataaactgtgagcaaaggtagtagtgaccagaagtagtaggaggcagtggactttcgcggtaaggtagctcgaatgacgtgacgtgcttggcttgtgtgtggtcctgctaggccgccgtagatacacctggtttggggaagaggctggtcttcacaccggtgtaaaccgaggtgcggttacccttggttacagcgctgcccgaagtgcgctggggattcccatcttccaggttgaaggcccacccactccggttacccgcgtctaaacctccatttaattcctttccccgatttgggcctctcctccctctccacctcaaacagggcaccattgttaagatgcccatgttttccaaaccccaacccaggacatctggtctgacaaagaactcgtctgatgactgtatttatttctacatacagccttccagaagaatgaaaagcaaatctcgagttaccaacataacaaattccaaaattaatgaaaagtcgtacctttatagaccccagtgcccagtagtatttggcacacccagggcactgaataatgtgaaaggaatgaattaagactgttaaatatatgcaaatctcgagttaccaacataacaaattccaacattacatgaaaagtcgtacctttgtagaccccagtgcccagtagtatttggcacacccagggcactgaataaggtgaaaggaatgaattaagactgttatacttaaatatattaaatctggacctggccccagaaaattcggctttcctagcctttcctctataatgtgagccagtggcttcacccttaaatccaggctcttcattattatgcctatcctgtaccttcattcatcttaccctcttcactccctcacccacagcaagaagtgccctttctcctcaaggttaaatcttgcacctgtgccctggatcccagccattcccagattttattcagctattctttctttccccattattaatttcttcctctaacctaaatctttctcccacaaacatagtctcgcccatcctttgaacagaacaaagccacccaatctcttccacccaaactaccttctcctttctcctaggaatcacacttcttgggaaacattatatttgctgctgagcactgtggctcatgcctgtaatcccagcaccttgggatgccaaggtgggaggattgcttgaggccaggagtttgaaaccagtctgggaacataataaggctcccctatatgcaaaaaataaaaaactagccgggtgtggtggcacacacctatagtcccagctattcgcggtgggggaggcggggtgctgagatgggatgatcgcttgagtgtgggaggttgaggctgcagtgtactgtgaccaagccactgcactccagcctgggccacagattgaggccctgtctctaaataaataaataaaagtatacttgttgtctccactttctcatctcttatttttcccactacagcgttgcttttgctcacacaatctgctattctttcaatggttacaaaagacctcttaccttctagaataatggtctattttggggtatctttctcatgacctctctcagcttattgacaatgctgacatctcttcccttagtagctgcctaactacattctcctgattctttggcaactcttcttttttttttttttttccctgtcccttgtcctggtttgaaaacttgcatatttatgtctccttatcttatagcc

SEQ ID NO: 1242067 - DNA, 4001 bp, Homo sapiens
gttgcaattcggatacgaaagcttctaccttaaaagcaggattaaaaatgtaaaacaatgatgctcagatgtatccctttttgaggattttttaaaagccttaaaatgtagggtagagagctgaaagggcgagaatgaattcccctaaggaggtttttttcatcttatagcagtccttttttgaaacttctgcttaggtccagatttttaaatgataacatgaatttaaaaaacaaatgaagtgaggaatggaaaacttgatctctctcaaaagatgtatttgaagtatgtagtacttttacgtagttttaaaagcatttcagctcatgtaagttatttaaaagcttctgtgataacggaagtttaagtcaatttattttcaaatacctaggattctgaagtatggctcacacttgactggaggtaatagccgaaatctttctaattataaagtgaaacaagactgttgcaattgtaataaataatgaaatggaatggggaactgcaatgtgatctaatagtatttgttaaatacctattgaattaaaagcggcaaaagcaaagaaacttaacactggaaaacaaatctttgaggctttgaagactttcttcagagcagtgtttcttaaaccttttgggggaggcatgcaatgggggaccccttgaagatctagtgaaaagctgcagaccctcatccacatgggcaggagggcacaggcacacacacttggcaatttctgcagttccgtgtactccctggagcccagtggggagaccaatccgcaggtcccatgttaagaacctcagctttgacactgcattttaagaaaaaaattgcaccatattgacgtccctcatttggaattgcttgagatccaggggcaactttcccagcatctaggtcccaggtgggcagtaaaactagggctgttttcacttaaacggaaacaattaggccggccatctcgcaggaatgaggcgatgccaggtgaaaagccagaccactagttgatgccagggaaagaatccctttattgaaaaagcctacgctctttcagaaacgcgcctccatcctctcagagggccccacccacaggtcagtggcacaggcggagccccaaggctgctgcggctccattcacaccaggagacgaaaacttgtctaagctgagaaggaaaataggctcttagaaacactgccttcgcccttcgtttacatgtggactcaaagaatgtcagaggtagaagagactccctccttcaccctgtccccaacctcacagatgagaaaacagactccagtgggttgaggtgcttgccaaggtgacatccccagctactcatgcccacagccctctccgcagcacctcgcagcctggccaggggagaagagggcgtcggcgtcctcgccccacacccccagccgcccacctggccggggcgccacggggaacagagaccccgcctaccggcaccatggagtaggtcatcatcatcagcatgtcatggctctcggcgcggatatgcggcgcgggctcgccgctgtggctgcgcttgttgcgagctgagctggccgggtcttggggtggtgcggacgccccgcgcggcgcgcggctcaactcggccaggaaggagcgcagggcactgtcctcgcgctgctcccggccccgctgcgcctccaaagcccgcagcgccgagctcagcccgcgccactggcacagcgcgaacaccgtgcccgcagcgttgagcgccgagagcagcgccacggccgccagggcgccacgcaggccccaacccgcgtccccacggcctccctcagcgcctcgggccatgctctatgcgccttgggcagggcagggcttggcagcctgcggccctggcagcctttatacgcctcgggcaagccgtgggctggtggcagcgtcgtgagtcaagtcaccctttggcccagctggcggggcgggatggggacagtagtggtggcgcccgagcagcccagagggacaggcgggcagaagcaggagaggagccagtggaggcagcctgcggaggaggggctggcagggctcgtgctcccagagtcccgccagctgagcaaaccctctcctcctcttcccactgctctgcctgagggcattgccgtggcccagacaggcaaagcaagggtcagactgagggggagagcaggaattcttatggagagaagtctccggattccacccccttctacccccacactgccctcttggagaaaaagatcagcatgcccagatgctaaggcacgtgcccactgtccatgggaggtctggtcctggcccgagcaccaggctgcgcatcactccccaccatggccatgaggctccacgaggccactgaagaccccagatgatctttcccaggaaggggatggataggggcaaggagacacttggcactggaaggcaaaaaaggccacccatcagaaccagaaaagcccaggactgcctggccaacaggactcgtccttgaaaggagagttccaggatttgacaagtcaggaactctccgatgagatccatatctggaaaatggcaggatggtgaggaaaaaaaccccaggaatcaggagacctagttctaaagccactctgttgctactcagctgggaggctttgagcatgtcccaagaccatgaggaggtgctttctggcctaagggttggagagctgggccatggttgggttcttacctagccctaggaaaacatgttttcccatgcctctcatttactcctcacaacttttatgttgcccaatacctgctctgcctcgagggtcactgtcaaccaaatgcagagtcacttttgagtctcctcagagaacctcttcactcaagatctttctcagcttctcctagaatggctctgcttccctggggccccaggacctatgggaaactaacgtagacagcaatcttcaagccccatgttaagaacctcgggtttgacattgtttaagaaaaaaaaaaaatcactctgtttggatgtctcccatttgggagacccaaccagaaggcaggattgctgtttccatagcccaataactcaaggaagaggtgcctccccgccaatgagccagctggagcagttatagagaaaggacttcctctatcagagaccacactgtttcagcacctgagggagaccagtaaaatgatcagagagcaagctccttttgacttaatggtaggagctctgtaaccatctactccccaaagattcacattctgatgtggtttggatctgtgtccccacccaaatctcatgttgaattgcgattcccagtattggtggtggagcccagtgggaggtgactggatcatgggagtggtccttcatgaatggtttagcaccatcccctcagtgctgttctcatgatagtgagttatcatgagatctggttgtttaaaagtgtgtagcatctctcctggcccctcttcctcctgctcccaccatgtgagatgttcctgctcctgctttgccttcctccatgagtaaaagctccctgaggcctccccagatgcaggtgctgccatgcttcctgttcagcctgtggaaccatgagccaattaaacttcttttcttgtaagttacccagtctcgggcttttctttatagcaaggcaagaatggactaatacacataccaattcttgcaggtaggattttttggcacaggagagaaagctgagtagtatcagacttcttgccccctactctccagggtgagccagggtagagcctctgagaatgcacaaggaaactgaagtgacatctcaatcagaaattctgagtcaaagtttagattcctgagttttaataggaacattgaccaacttcagtattcttagaagagcatacaggataagaagaaattaggaaagcatgaaggtccaagtgtttcataaagtacccccactgtggggatatgatgactgggaggggatggcagtgatgtaaaaagct

SEQ ID NO: 1242068 - DNA, 4001 bp, Homo sapiens
ttttggattgactacatttgccccctgaggttccctttgaaaagctgcatctctgctctctgtcttaaggcaacttacaaattcacagaaaacctgaaaatatccaggcatgcagcctgcactattgaataagtgagtttctggagaacgccctctgcatgaagctcaaaacgggtttggcgaaaataatctgaagtgagcctgagctggcactctgattgcctggggggaatccgggtcccaacacttagcaggggaccttcggtaagtcctttaattctttgtgcctcagtttcctcatctgtcaaatggagaaattagatgacctatgaatacttttcaccatgttggccaggctggtctcaaactgggagaaggatttctgggaaaacttttgctttgctttcttgatagggagcaaagagagattggtgtccatattcccccttcttcctgccttggatacagaagtgatgtttggagctgtggcaatcatattataatcatggggcaaatgccactgctctaaggtgtggagaagaaaggcagaaggagcctgggtcccttggtggggggtgcatggtgcagctgaacaacagcaggtgatcatccacctttgctcttgttatgtaagaaaagtaactctcaatttgcataactacattatttggggtttacagttagtgattgctggacaggatttctaagcttagagtgcctcctatttaaagaagacccctaggaaagcacagcacacgctagatccaggtcatccacttctcttaagtgatcttcagagatcaaaaggtaaaggccctagcacgaaccccatttttccattccacatagaatgtaaagggtggcatcgattaggaatggcaggagaacaacgtcaaggtgtgcaggagggcaccgtgggaggtgctcagcaaaggggagatgccaccctcagagctcaaaagtgagcagatacaaccacttccccaagcctggcccccagcccaagctctgctgaggaggagccctctgacaaagtaaaggaacgctgttttggccaagagccgctgaacctggctatttaatcgctcactcataaaaatcacagagccagttctgaattacggtggtggtggtgaagaatgcaagtttaagatcgctatggcttttttatgccaatccaccacatcgatccaaaagctttttaaacagccttaaacgaactgaacggttgaatttagtgagctcctccgtttcccttctctctccgtcatccagctccccgccccaaggataggggagaggttggaaaaatgagctttgaaattgcagtctcataaaagcaaaactgagaaaagatacaacagtgatggagaaagccagacgggcattaaaaaacaaaacaggagtctctcctaggccgcgcctacacgggctcgccgcgctcgctcgtcaccaccgacaccccaccccctgccctccgcatgggaggggcaagaacgcgatccgttcgcagcttccaggcaggtgatgaggatagctagtcccgcggtcctccgctagctggcggcgggggtcggccaggtgcccggaccctccgagggccccaccgccgcgcgtcccggggatcgggaccgctacccgcgcctcacctgcgcgcccgggccccagggccctgctcccgggcggtggcgcgggcctggctcccgtcgcagccacgaccgcccccaccgcccccgccgtccccgcccgggaagtggcgagccggtccggcttgccccgcccgcctcccggcccgcactcacgctccacatcgtgcagcttggctcgctcctcctccagcttgcccttgaggctctcggcctcgctcttcagcgacgccagcgtctcgttctcgtgcagcccctcggttgccatcttcgcgcggggacgcagcggagagggaagcggagagcgggaatgcgctgagccgcggcgggcgccgctccagcagccgtccccggccccgagcaccgccccgcggccccgccctccgcgatgacgccagcagctgcgggcccggctgctgcgcctgagccccaagaccccgcacctgggcgcgcgctctggcgcagtgcctggtgcgatgtccgcgtcagcctctctcctccgggagaggcagggagtgtgacgcccattttaccagcgggcaaactgtggcttagggatgctgggtgatttgcccgaggacgcacacagagggaagggccaagccgggattccaactcgggactccccgcttctggggagaccggtgaggcccccgcgacatggccctcccatccccaagcctctcgtgcagatctccgctctgtgggacttgattgcgggctgcgggcccgtggctcctgcaggcagagagaggacgggagaggagacggctacgaggcttggccgcaggtagctacggtgctcccccaacaaggaaccggaaaccctcttcgtttgttgatctaaatatacaaaaataaaactagttgctgggttctcagacggagtctctgcggcattaggaggcccacccttattttctcttttcttcacgcaggaatcaggtccctggcctgggggcggcaaaaggagatggcggtgggtcaagtgggcgcgcaggctcagacctggggcttctgagcccacgcccaggcatctcggacctctcacttctgaggccacctcctgccctttagaatgaagggctggcacagttctgccaggatgcacgtttagcgacttctgtcagactgaagcatcccctctccgcaagcgcctgaagtgtgagaggcactgttctaagtgctttaatttgcacttgtttaatcctcacaggagtcaacttgaatgggcacacttattcccactttacagaagaggaaactggggcacagaaagactgagtaattgctcagggggcatgctccaagaaagagggagagacaggatttggacccagacaggctggctccctagtgctctggactttggtgtggatgatccaactcaagccttctcctttttccctcctatgtgatcttgcatgcgtttgtgcagagaatgagaaggcagatcaaagttacagatgctgcgagaacatcgccaagcagaatcttgggtgctgtccccacctctctgtacctgctccctcccagagaagccagcctccacttgctgtcccgggccttctctatctgagaaaagttgaaggtactcgatgttaatctgtacatagttgttttgcaggttagagtctgggatcctccgtttccttatctggaaaagcttcttcataggatctgcttcataggattgttatgagaattaagtaagatggtgtgggccgggtgcggtggttcacacctgtaatcccaacacttcgggaggccaaggtgggtgtatcacctgaggtcaggagttcgaaaccagcctggccaacatgatgaaaccctctctctactaaaaatacaaaaattagtcgggcgtggtggtacgtgcctgtaacctcagctactcaggaggctgaggcacgagaatcgcttgaaccctggaatcagaggttgcagtgagccgagatcgtgccactgcactccagcctgggcaacagagcaagactcaaaaaaaacaaaaacaaaaacaaaaacaaaacaaaaaaaggtaagatagtgtgggtgaagactttagcagacttctccgtacatagcagatgcttattcactgctagttctcttttccgttcccatccgtataataataggtttacttgtcgctgttccttagtatttagatatttagcatagtacttgcatatggtaggtgctcagttaatgctagtttattaaatggatgtataaaaaatatataaaatatataaatctgtataaactatgttaaaaatataaacatataacaaacatgtttataaatgaataaatatataaatacaattattaagtataagataagaatatata

SEQ ID NO: 1242069 - DNA, 4001 bp, Homo sapiens
gggtagatcacctgaggtcagcctgggcaacatggtgaaaccccatatctactatacaaaaattagccaggcgtggtggcaggtgcctgtaatcccagctacttgggaggctgagacatgagaactgcttgaacttgggggatggaggttgcagtgagccaagatcgcgccactgaaatccagcctgggcaatgcagtgagactccgtctcagaacaaaaaaaaagaaaatatatgttcacataaaaatgtacatactaattttcatggcagcattattagccaaaagtgaaagcaacccaagtgtccaccaaccgacaaatgaaaaacaaaatgtctatccctccagtagactgctattcagcaataaaaaagaatgacgttctgacacatgctacaacatggtcaaaccttaaaaacgctatcctatgacagaagccagacacaaaaggccacatattgtatgatttatttatatgaagtgtacaggatcagcaaatccatagagacatgaagcagatgagtagttgcgaggtggagggaagagagaataagggggaaggagggagctgagagtgagtggctgcttaaggggtatgggatttctttttcggggtgatgaaaatactctggagtcagtggcaatggttgcaaatccttgtaaataaacttaaaaaacactgaaatatatgttttaaaatgatgggttttaaaacatgaaacaaaacgtggacatcatatctcaataaatttttttttttttttttttagacagagtcttgctctgtcgcccaggttggagtgcagtggcgcaatctcggctcactgtaagctccgcctcccaggttcatgccattctcctgcctcagcctcccaaatatctgggaatacaggcgcccgccacctcacccggctaatttcttgtatttttagtagagatggggtttcaccgtgttaaccaggatgctctcaatctcctgacctcatgatctgcccgcctcagcctcccaaagtgctgggattacaggcatgagccaccgcgcccagcccaaagattatttttaaaatggacaaaaggcttgtgtagtcacttcacaaatgaggatacttatatggtcaataaacatataaaaaggtgctcattatcattagtcatcatagaaatacaaagtaaaactacgatgtgatacaactacttagccatcagaaaacctaaaaagcctgacaacacaaagtgtgggcaaggatgcagagactggaactgcctttctctgctagtgggagtataagtcggtataaccactgtagaaaactggttggtaggagctactaaagtgaaacggatatagtctatgaccaggcaattctactcgtgcatacatacaccacagaaaataatgcttatttccttaaaaaaaaaaaaaaaaaaaaaaaaaaaaaaaaaaaaaaaacataaatgtcatagcagctattcatagaaggcctaaacttgaaagacccaaatgttcaccagtcacagacgaaactgtgaaatgagcatagaataaaaaataactgatacacacaatgtggatgtatctcagacttacaactaaaaacctctttctaaccccataagctgtactcagaggcttatgttgccatgtgtcacctggatcaaattttaaaactgacttagtgattttaagtatgcttaatctctttcctgatgccaatattaatgtaaaaaatattgaaatatttcaatttgaaatatttgaaatttactatttcaaaataaattcatgtgtattgtagaaaaattagattctacggattaacaacaacaaaacccctcacccatgctcccaccgcacagaaagacctgctaacactgtgccctgtactcatctggatgcttttctgagcatttcaaaagctggagtattttaaccgaatgtcagcatgcacataccttccagagtcagcactgggagccacagagcagatggtgagaggtgaggaccagcgcgcagcttgaggtgtgaagcacgtctcccactggctaatctccttatcttctctggagtgctgctcagcttgcttccttcctccacagcacttccatgctccctgctgggcacgcactgccatctgcatccctcactcacccctggaacctgcccagcccctctgtggagggaggccttggcaggtttgacctctgtgtctgcgcccactcactgagcagccctcacattcacctgggccacatgttcttaacatttctctattttggtctccttgccactgtcagctttgtagaactgatcaagactgtgggatgagtgcctccctttccccatttttccacacataaactcctcagcctccacaggtctccctgtccccaaacatgacctactttttcccatggttgactccccaccacacacacacagtcctccaacgggactttgctccttcagttctcttcccacctcatcagcagtaggatgaaggcagggatgaggaggatgtggcacctgccctctggggctcacaggcctacagaggaaatgggcagcatttctggcttccagtccagggtaagtgctataaaacaggcataaatcctgagttatggaagccgaaaaccaacagtgatggctcctcatggtgtggggaaggtctagaaagggcatggaggccgcagctcaggatcagaaaccctgccaattctctgccaagtagcccctcattctgacagtgtggaagcgccctggagacacagcctaagccagcacttatgacatatttacttcttctctaaacattttaatatactttaaatgagatattatgaatctataaagattctagcatctttcagtatgaccgtaaagaaaggcatacaacttgtacacttaagagacatgtcatctcctcgcaatgaaagaatctgacccaattcatttggtaattaattttattgattaaagtattacaaagttctacttttcattttttcatgtacaatgtattgaaatgaactaaactcaatcacttataatataaaaagacattattatgtattagcagggtgatgcttcataatcatgtattattcctacctctaagacaccagtctgtattatagaatcacagctgtcacctgtgactgtcagaaacagaaggtgcaattgggattcttaggttggtgacagaatagcactggatccacaggccagagactaggagtgcttatcaaatgaggttttaggctctgaaaggaaggaatgagaaggtgtgccgggacaaggaatagccagttcccataaaacttgggaaacgtagatttctcaaaagtagggtccgacacaattttttagttactttttgagaaaatttaaaaataaatacattgaaatgctgattagagagcgaaagtaatttaggttgctttttcaatctgaggttgttttaaaaaagttattgtatgaaaggtattaaaaaataaaaaaattatggtgaatatgttggcaggtaagatttgaagttctttcagagaagataaacggcatggcaattaagctttaataatatattagttttaaatagatatacatataaaaatacttcaaatgattcatctcggattgaacactcttaaaaattaaaagggtcagccgggcgcggtggcacacgcctgtaatcctagcactttgggaggctgaggtgggcggatcacgaggtcaagagatcgaggccatcctggccaacatggtgaaacctgtctccactaaaaatacaaaaattagctgggcgtggtggcaggtgcctgtagtcccagctactcaggaggctgaggcaggagaattgtttgaacccaggaagcggaggttgcaataagccgagatcatgccactacactccagcctggcgatagagcgagactccggagtctcaaaaaaaaaaaaaaaaaaaaatttagaagggtctaaaataaacatttttaaatgc

SEQ ID NO: 1242070 - DNA, 4001 bp, Homo sapiens
caacaattaccctctactgccccttgggccccctgtccccaggagcctggccagccaagactcacatccccaggtgagtggcaaccaccggaagtggttgtctcagggctactgtcagtttttttcttttttgtctttgctcctgctggaataccagggctcttcctttgctgatattcttttagctgtgggaaagaagagcagtaatactcatgagaactaccagcccttacagccacaccctccttacagtttttgcaaaatactcttatacaccatctgatttaatgccaccaacaactgtacaaggtgttgtcacaatcacttaagtgactgagagggatggatattatggctaaaaaaaaaagtgtgggggggcaataatggaacttaaactcagtcttctgactccaagctctggggttttgccatgaatcagcagctgccggggaccaaaaccagacgcagaggtagaaaagtaaacattacataggcatgaactacacgctgtgtggtttagagtcatacatcctcaaatgcctgttagtgtgaagaagtgcaccagtatctctcaaacttttatatcaatgtgtcctcatggcagaaggcagcttttttgttaaatctgggaatttatcagaaagaggacaacccaagtctcatttcagagagaagtctggtatactcttagaaacctatgtgagggtcacccctaagtacattaatgttttttctctctcaagagaatcaagggaaactgatgcttcagaaagatctcccacatttatcctgtggcactcaatgtaccctaagttgagatgatatgaggaagattcaagctgtcaagttcagtttcccaagacctattccacagaagatgagcaaatctcacttcagagaccactgactgaagggcagtctggtcccagaaccgtggagaattagaatatgaggtggagaactcggaaaaaaatgttaaagtctctctggagagtagaagcctgggagaaaaccaaaccaaacccattctcccattaccacccagagatactgtcaacgttttgagctcacaggggaagtgtaggcttttcacactgtcgatgtctatgtgaagggagtaaggcagcctgaaacctcttgctcctaggtcccatggtccccatttcccttctagctggaaatttgtgctgtgaccagaggaaccagaaatggggtgagaatgcttaggggactgggttataagatcaaaggccggtcttgcagcagtaatgacagttcctaggaggactgtgacatcactacattccactcctcctgggggtgggggaaacctcatcagtgcaatggctgagttgccgatccacgatgggggaggggggacgtggggctgggacccaggtccttggagatgccagtccagagagcccagggaggtcgggcttgggtcagcaggaggggagagcagagtctgctcagggaaccccaggagtcaccagcccaaagtcaccccgggatgactggcgatgctggggggttggggctgggggacccaggtccttggagaggtgagcccaaagaacccagggaggttgggcttggggtggcaggacgtgagggctgaatatggagcaggtatccccagtagtcatccgcccaaagtcaccgcagggtgattggcgagggcagaggctgggctgcttgctgaaggggcggggctgactgacaagacgttggtggggggagtccagaggcgccggggtaggggggcccagcccggtgtgcctcaggagtggtatggactctgggagtggtcttgtcatcagaggggatctctggctaggttggggggccatgacctttttcttggctttttacctttttcttggctgctgccaatttattctgtcgagattcttctaacatcatggggtggggagggaggtagggttggggccacatcagcgaacacctccagtcacctacaaggctgctgtgtgactgagccagaggaggcgtaaccagggccacactagaatgcagaataggggtgtggccttaatgctccaatcccattggtcaatgagaaagatgaaagggaaaggaggcgtggccaggcagcagtgtgcccagaggaacctgtgacatcacaaggaaagctgcccatgcgactgctgtccctgcccacttggggagaggggcggggcctgcctactccgggagaggggagggctggtttttgctttaaaatgttaaaaataaactttaaaaaaatatgtatttatactttatatatatgtgtgtcagtgtgtgtgtgtctacatgttcctccagagctgtcttcattatccagcttctatgcatggtctatgattttggcctacatttttcatcttcagagggagtataagaattaccagtattaccccagttaagacacaaatcctataaaaatggaaaatccatagcatgtttgatgattaatgaatgaagtggactatattatccaacatcccaataaggtaaaataatcacaatgatttctcggctttggaaaaaacatttctcttattctcctacattattaagattttttaaaaaacaagaaacatgtctaatatctttaaaaacacaaagcttttgggccgggtgtggtggctcacacctgtaatcccagcactttgggaggcctaggtgggtggatcaccttaggtcaggagttcaagaccagcctggccaacatggtgaaaccctgtctctactcgaaatacaaaaactagccaggtgtggtggtgggtacccgtaatcccagctactggggaggctgaggcaggagaatcacttgaacccgggaggcggaagttgcagtgagccaaggtcacgccactgcactccagcctgggtgacagactgagactccatctcaaaaaaataaaataaaatagtcaaaaataaataaaaacacaaagctttccatttaataagcactcaaagctctttactggtttaaagcaaatacaaggcctatttttctagaatcacctggcctctctaagccttgcaaatgaaactgaatttctcacttgatacttggctatgacttgcaatcatgaaaaccaagaattgtgttatgtcactgtgtattgattgttacctgaattccacactaggctgggatcaagggttgaatctttcatgatttgctccataacctgtgagcgtcttttcctacaccaaactaagctttgttctagagttctacaatttacagttagtagacaagagtggttctcaaaaatgtagtctctggactagcagcagcagcagaacctgagaaccttttataagtgcaaattctcaggccccaccctggacatggtgaatcagaaactctggagtagggctcagcaatctgtgctgcagtcatccctccaggtgttcaagaacctctggcatacagcaggcagaaaaatgtgtttccttctgtaggtccaaagccagggataccatatgttctgtcttgatatgaaacaatggcatgcaattaaaagacataaatctccttcctgctcccaccctccatccaatgtgttttatttttatgagttaaataagaaaacaaacggcaatcagagattcagcctaaaaagtatgtttacaagtgtcagttctcatccagcctgatctcacacaataccatttacaccctcttccctctcaggttttttaaaaagtgtcttcacaatgtaagtctcgggcacactagcagttctataataaaacaccaagtagatcagaatgtccaaacttactagagaagaaaagtggaatcactggctgtattttcaagttgcattcaacaggaaatgtaagtttttcattcttttcaccttcacacttcaatagcattaaatcagaatactccattcttccaaagcctctagccaggcaaagttttactgtattacttcttgctttcaatagatataaagcagagtcctggt

SEQ ID NO: 1242071 - DNA, 4001 bp, Homo sapiens
tcaacaattaccctctactgccccttgggccccctgtccccaggagcctggccagccaagactcacatccccaggtgagtggccaccaccggaagtggttgtctcagggctactgtcagtttttttcttttttgtctttgctcctgctggaataccagggctcttcctttgctgatattcttttagctgtgggaaagaagagcagtaatactcatgagaactaccagcccttacagccacaccctccttacagtttttgcaaaatactcttatacaccatctgatttaatgccaccaacaactgtacaaggtgttgtcacaatcacttaagtgactgagagggatggatattatggctaaaaaaaaaagtgtgggggggcaataatggaacttaaactcagtcttctgactccaagctctggggttttgccatgaatcagcagctgccggggaccaaaaccagacgcagaggtagaaaagtaaacattacataggcatgaactacacgctgtgtggtttagagtcatacatcctcaaatgtctgttagtgtgaagaagtgcaccagtatctctcaaacttttatatcaatgtgtcctcatggcagaaggcagcttttttgttaaatctgggaatttatcagaaagaggacaacccaagtctcatttcagagagaagtctggtatactcttagaaacctatgtgagggtcacccctaagtacattaatgttttttctctctcaagagactcaagggaaactgatgcttcagaaagatctcccacatttatcctgtggcactcaatgtaccctaagttgagatgatatgaggaagattcaagctgtcaagttcagtttcccaagacctattccacagaagatgagcaaatctcacttcagagaccactgactgaagggcagtctggtcccagaaccgtggagaattagaatatgaggtggagaactcggaaaaaaatgttaaagtctctctggagagtagaagcctgggagaaaaccaaaccaaacccattctcccattaccacccagagatactgtcaacgttttgagctcacaggggaagtgtaggcttttcacactgtcgatgtctatgtgaagggagtaaggcagcctgaaacctcttgctcctaggtcccatggtccccatttcccttctagctggaaatttgtgctgtgaccagaggaaccagaaatggggtgagaatgcttaggggactgggttataagatcaaaggccggtcttgcagcagtaatgacagttcctaggaggactgtgacatcactacattccactcctcctgggggtgggggaaacctcatcagtgcaatggctgagttgccgatccacgatgggggaggggggacgtggggctgggacccaggtccttggagatgccagtccagagagcccagggaggtcgggcttgggtcagcaggaggggagagcagagtctgctcagggaaccccaggagtcaccagcccaaagtcaccccgggatgactggcgatgctggggggttggggctgggggacccaggtccttggagaggtgagcccaaagaacccagggaggttgggcttggggtggcaggacgtgagggctgaatatggagcaggtatccccagtagtcatccgcccaaagtcaccgcagggtgattggcgagggcagaggctgggctgcttgctgaaggggcggggctgactgacaagacgttggtggggggagtccagaggcgccggggtaggggggcccagcccggtgtgcctcaggagtggtatggactctgggagtggtcttgtcatcagaggggatctctggctaggttggggggccatgacctttttcttggctttttacctttttcttggctgctgccaatttattctgtcgagattcttctaacatcatggggtggggagggaggtagggttggggccacatcagcgaacacctccagtcacctacaaggctgctgtgtgactgagccagaggaggcgtaaccagggccacactagaatgcagaataggggtgtggccttaatgctccaatcccattggtcaatgagaaagatgaaagggaaaggaggcgtggccaggcagcagtgtgcccagaggaacctgtgacatcacaaggaaagctgcccatgcgactgctgtccctgcccacttggggagaggggcggggcctgcctactccgggagaggggagggctggtttttgctttaaaatgttaaaaataaactttaaaaaaatatgtatttatactttatatatatgtgtgtcagtgtgtgtgtgtctacatgttcctccagagctgtcttcattatccagcttctatgcatggtctatgattttggcctacatttttcatcttcagagggagtataagaattaccagtattaccccagttaagacacaaatcctataaaaatggaaaatccatagcatgtttgatgattaatgaatgaagtggactatattatccaacatcccaataaggtaaaataatcacaatgatttctcggctttggaaaaaacatttctcttattctcctacattattaagattttttaaaaaacaagaaacatgtctaatatctttaaaaacacaaagcttttgggccgggtgtggtggctcacacctgtaatcccagcactttgggaggcctaggtgggtggatcaccttaggtcaggagttcaagaccagcctggccaacatggtgaaaccctgtctctactcgaaatacaaaaactagccaggtgtggtggtgggtacccgtaatcccagctactggggaggctgaggcaggagaatcacttgaacccgggaggcggaagttgcagtgagccaaggtcacgccactgcactccagcctgggtgacagactgagactccatctcaaaaaaataaaataaaatagtcaaaaataaataaaaacacaaagctttccatttaataagcactcaaagctctttactggtttaaagcaaatacaaggcctatttttctagaatcacctggcctctctaagccttgcaaatgaaactgaatttctcacttgatacttggctatgacttgcaatcatgaaaaccaagaattgtgttatgtcactgtgtattgattgttacctgaattccacactaggctgggatcaagggttgaatctttcatgatttgctccataacctgtgagcttcttttcctacaccaaactaagctttgttctagagttctacaatttacagttagtagacaagagtggttctcaaaaatgtagtctctggactagcagcagcagcagaacctgagaaccttttgtaagtgcaaattctcaggccccaccctggacatggtgaatcagaaactctggagtagggctcagcaatctgtgctgcagtcatccctccaggtgttcaagaacctctggcatacagcaggcagaaaaatgtgtttccttctgtaggtccaaagccagggataccatatgttctgtcttgatatgaaacaatggcatgcaattaaaagacataaatctccttcctgctcccaccctccatccaatgtgttttatttttatgagttaaataagaaaacaaacggcaatcagagattcagcctaaaaagtatgtttacaagtgtcagttctcatccagcctgatctcacacaataccatttacaccctcttacctctcaagttttttaaaaagtgtcttcacaatgtaagtctcgggcacactagcagttctataataaaacaccaagtagatcagaatgtccaaacttactagagaagaaaagtggaatcactggctgtattttcaagttgcattcaacaggaaatgtaagtttttcattcttttcaccttcacacttcaatagcattaaatcagaatactccattcttccaaagcctctagccaggcaaagttttactgtattacttcttgctttcgatagatataaagcagagtcctgg

SEQ ID NO: 1242072 - DNA, 4001 bp, Homo sapiens
tcaacaattaccctctactgccccttgggccccctgtccccaggagcctggccagccaagactcacatccccaggtgagtggccaccaccggaagtggttgtctcagggctactgtcagtttttttcttttttgtctttgctcctgctggaataccagggctcttcctttgctgatattcttttagctgtgggaaagaagagcagtaatacacatgagaactaccagcccttacagccacaccctccttacagtttttgcaaaatactcttatacaccatctgatttaatgccaccaacaactgtacaaggtgttgtcacaatcacttaagtgactgagagggatggatattatggctaaaaaaaaaagtgtgggggggcaataatggaacttaaactcagtcttctgactccaagctctggggttttgccatgaatcagcagctgccggggaccaaaaccagacgcagaggtagaaaagtaaacattacataggcatgaactacacgctgtgtggtttagagtcatacatcctcaaatgtctgttagtgtgaagaagtgcaccagtatctctcaaacttttatatcaatgtgtcctcatggcagaaggcagcttttttgttaaatctgggaatttatcagaaagaggacaacccaagtctcatttcagagagaagtctggtatactcttagaaacctatgtgagggtcacccctaagtacattaatgttttttctctctcaagagaatcaagggaaactgatgcttcagaaagatctcccacatttatcctgtggcactcaatgtaccctaagttgagatgatatgaggaagattcaagctgtcaagttcagtttcccaagacctattccacagaagatgagcaaatctcacttcagagaccactgactgaagggcagtctggtcccagaaccgtggagaattagaatatgaggtggagaactcggaaaaaaatgttaaagtctctctggagagtagaagcctgggagaaaaccaaaccaaacccattctcccattaccacccagagatactgtcaacgttttgagctcacaggggaagtgtaggcttttcacactgtcgatgtctatgtgaagggagtaaggcagcctgaaacctcttgctcctaggtcccatggtccccatttcccttctagctggaaatttgtgctgtgaccagaggaaccagaaatggggtgagaatgcttaggggactgggttataagatcaaaggccggtcttgcagcagtaatgacagttcctaggaggactgtgacatcactacattccactcctcctgggggtgggggaaacctcatcagtgcaatggctgagttgccgatccacgatgggggaggggggacgtggggctgggacccaggtccttggaggtgccagcccagagagcccagggaggtcgggcttgggtcagcaggaggggagagcagagtctgctcagggaaccccaggagtcaccagcccaaagtcaccccgggatgactggcgatgctggggggttggggctgggggacccaggtccttggagaggtgagcccaaagaacccagggaggttgggcttggggtggcaggacgtgagggctgaatatggagcaggtatccccagtagtcatccgcccaaagtcaccgcagggtgattggcgagggcagaggctgggctgcttgctgaaggggcggggctgactgacaagactttggtggggggagcccagaggcgccggggtaggggggcccagcccggtgtgcctcaggagtggtatggactctgggagtggtcttgtcatcagaggggatctctggctaggttggggggccatgacctttttcttggctttttacctttttcttggctgctgccaatttattctgtcgagattcttctaacatcatggggtggggagggaggtagggttggggccacatcagcgaacacctccagtcacctacaaggctgctgtgtgactgagccagaggaggcgtaaccagggccacactagaatgcagaataggggtgtggccttaatgctccaatcccattggtcaatgagaaagatgaaagggaaaggaggcgtggccaggcagcagtgtgcccagaggaacctgtgacatcacaaggaaagctgcccatgcgactgctgtccctgcccacttggggagaggggcggggcctgcctactctgggagaggggagggctggtttttgctttaaaatgttaaaaataaactttaaaaaaatatgtatttatactttatatatatgtgtgtcagtgtgtgtgtgtctacatgttcctccagagctgtcttcattatccagcttctatgcatggtctatgattttggcctacatttttcatcttcagagggagtataagaattaccagtattaccccagtgaagatacaaatcctataaaaatggaaaatccatagcatgtttgatgattaatgaatgaagtggactatattatccaacatcccaataaggtaaaataatcacaatgatttctcggctttggaaaaaacatttctcttattctcctacattattaagattttttaaaaaacaagaaacatgtctaatatctttaaaaacacaaagcttttgggccgggtgtggtggctcacacctgtaatcccagcactttgggaggcctaggtgggtggatcaccttaggtcaggagttcaagaccagcctggccaacatggtgaaaccctgtctctactcgaaatacaaaaactagccaggtgtggtggtgggtacccgtaatcccagctactggggaggctgaggcaggagaatcacttgaacccgggaggcggaagttgcagtgagccaaggtcacgccactgcactccagcctgggtgacagactgagactccatctcaaaaaaataaaataaaatagtcaaaaataaataaaaacacaaagctttccatttaataagcactcaaagctctttactggtttaaagcaaatacaaggcctatttttctagaatcacctggcctctctaagccttgcaaatgaaactgaatttctcacttgatacttggctatgacttgcaatcatgaaaaccaagaattgtgttatgtcactgtgtattgattgttacctgaattccacactaggctgggatcaagggttgaatctttcatgatttgctccataacctgtgagcttcttttcctacaccaaactaagctttgttctagagttctacaatttacagttagtagacaagagtggttctcaaaaatgtagtctctggactagcagcagcagcagaacctgagaaccttttataagtgcaaattctcaggccccaccctggacatggtgaatcagaaactctggagtagggctcagcaatctgtgctgcagtcatccctccaggtgttcaagaacctctggcatacagcaggcagaaaaatgtgtttccttctgtaggtccaaagccagggataccatatgttctgtcttgatatgaaacaatggcatgcaattaaaagacataaatctccttcctgctcccaccctccatccaatgtgttttatttttatgagttaaataagaaaacaaacggcaatcagagattcagcctaaaaagtatgtttacaagtgtcagttctcatccagcctgatctcacacaataccatttacaccctcttacctctcaagttttttaaaaagtgtcttcacaatgtaagtctcgggcacactagcagttctataataaaacaccaagtagatcagaatgtccaaacttactagagaagaaaagtggaatcactggctgtattttcaagttgcattcaacaggaaatgtaagtttttcattcttttcaccttcacacttcaatagcattaaatcagaatactccattcttccaaagcctctagccaggcaaagttttactgtattacttcttgctttcaatagatataaagcagagtcctgg

SEQ ID NO: 1242073 - DNA, 4001 bp, Homo sapiens
gcaatctcaacaattaccctctactgccccttgggccccctgtccccaggagcctggccagccaagactcacatccccaggtgagtggccaccaccggaagtggttgtctcagggctactgtcagtttttttcttttttgtctttgctcctgctggaataccagggctcttcctttgctgatattcttttagctgtgggaaagaagagcagtaatactcatgagaactaccagcccttacagccacaccctccttacagtttttgcaaaatactcttatacaccatctgatttaatgccaccaacaactgtacaaggtgttgtcacaatcacttaagtgactgagagggatggatattatggctaaaaaaaaaagtgtgggggggcaataatggaacttaaactcagtcttctgactccaagctctggggttttgccatgaatcagcagctgccggggaccaaaaccagacgcagaggtagaaaagtaaacattacataggcatgaactacacgctgtgtggtttagagtcatacatcctcaaatgcctgttagtgtgaagaagtgcaccagtatctctcaaacttttatatcaatgtgtcctcatggcagaaggcagcttttttgttaaatctgggaatttatcagaaagaggacaacccaagtctcatttcagagagaagtctggtatactcttagaaacctatgtgagggtcacccctaagtacattaatgttttttctctctcaagagaatcaagggaaactgatgcttcagaaagatctcccacatttatcctgtggcactcaatgtaccctaagttgagatgatatgaggaagattcaagctgtcaagttcagtttcccaagacctattccacagaagatgagcaaatctcacttcagagaccactgactgaagggcagtctggtcccagaaccgtggagaattagaatatgaggtggagaactcggaaaaaaatgttaaagtctctctggagagtagaagcctgggagaaaaccaaaccaaacccattctcccattaccacccagagatactgtcaacgttttgagctcacaggggaagtgtaggcttttcacactgtcgatgtctatgtgaagggagtaaggcagcctgaaacctcttgctcctaggtcccatggtccccatttcccttctagctggaaatttgtgctgtgaccagaggaaccagaaatggggtgagaatgcttaggggactgggttataagatcaaaggccggtcttgcagcagtaatgacagttcctaggaggactgtgacatcactacattccactcctcctgggggtgggggaaacctcatcagtgcaatggctgagttgccgatccacgatgggggaggggggacgtggggctgggacccaggtccttggagatgccagtccagagagcccagggaggtcgggcttgggtcagcaggaggggagagcagagtctgctcagggaaccccaggagtcaccagcccaaagtcaccccgggatgactggcgatgctggggggttggggctgggggacccaggtccttggagaggtgagcccaaagaacccagggaggttgggcttggggtggcaggacgtgagggctgaatatggagcaggtatccccagtagtcatccgcccaaagtcaccgcagggtgattggcgagggcagaggctgggctgcttgctgaaggggcggggctgactgacaagacgttggtggggggagtccagaggcgccggggtaggggggcccagcccggtgtgcctcaggagtggtatggactctgggagtggtcttgtcatcagaggggatctctggctaggttggggggccatgacctttttcttggctttttacctttttcttggctgctgccaatttattctgtcgagattcttctaacatcatggggtggggagggaggtagggttggggccacatcagcgaacacctccagtcacctacaaggctgctgtgtgactgagccagaggaggcgtaaccagggccacactagaatgcagaataggggtgtggccttactgctccaatcccattggtcaatgagaaagatgaaagggaaaggaggcgtggccaggcagcagtgtgcccagaggaacctgtgacatcacaaggaaagctgcccatgcgactgctgtccctgcccacttggggagaggggcggggcctgcctactccgggagaggggagggctggtttttgctttaaaatgttaaaaataaactttaaaaaaatatgtatttatactttatatatatgtgtgtcagtgtgtgtgtgtctacatgttcctccagagctgtcttcattatccagcttctatgcatggtctatgattttggcctacatttttcatcttcagagggagtataagaattaccagtattaccccagttaagacacaaatcctataaaaatggaaaatccatagcatgtttgatgattaatgaatgaagtggactatattatccaacatcccaataaggtaaaataatcacaatgatttctcggctttggaaaaaacatttctcttattctcctacattattaagattttttaaaaaacaagaaacatgtctaatatctttaaaaacacaaagcttttgggccgggtgtggtggctcacacctgtaatcccagcactttgggaggcctaggtgggtggatcaccttaggtcaggagttcaagaccagcctggccaacatggtgaaaccctgtctctactcgaaatacaaaaactagccaggtgtggtggtgggtacccgtaatcccagctactggggaggctgaggcaggagaatcacttgaacccgggaggcggaagttgcagtgagccaaggtcacgccactgcactccagcctgggtgacagactgagactccatctcaaaaaaataaaataaaatagtcaaaaataaataaaaacacaaagctttccatttaataagcactcaaagctctttactggtttaaagcaaatacaaggcctatttttctagaatcacctggcctctctaagccttgcaaatgaaactgaatttctcacttgatacttggctatgacttgcaatcatgaaaaccaagaattgtgttatgtcactgtgtattgattgttacctgaattccacactaggctgggatcaagggttgaatctttcatgatttgctccataacctgtgagcttcttttcctacaccaaactaagctttgttctagagttctacaatttacagttagtagacaagagtggttctcaaaaatgtagtctctggactagcagcagcagcagaacctgagaaccttttataagtgcaaattctcaggccccaccctggacatggtgaatcagaaactctggagtagggctcagcaatctgtgctgcagtcatccctccaggtgttcaagaacctctggcatacagcaggcagaaaaatgtgtttccttctgtaggtccaaagccagggataccatatgttctgtcttgatatgaaacaatggcatgcaattaaaagacataaatctccttcctgctcctaccctccatccaatgtgttttatttttatgagttaaataagaaaacaaacggcaatcagagattcagcctaaaaagtatgtttacaagtgtcagttctcatccagcctgatctcacacaataccatttacaccctcttacctctcaagttttttaaaaagtgtcttcacaatgtaagtctcgggcacactagcagttctataataaaacaccaagtagatcagaatgtccaaacttactagagaagaaaagtggaatcactggctgtattttcaagttgcattcaacaggaaatgtaagtttttcattcttttcaccttcacacttcaatagcgttaaatcagaatactccattcttccaaagcctctagccaggcaaagttttactgtattacttcttgctttcaatagatataaagcagag

SEQ ID NO: 1242074 - DNA, 4001 bp, Homo sapiens
ttctttttggtgtcgcttgctgctgtaccaacactagggttggtctggggatgatggtctgtcaactgtggaaaggaagagcagtgatactcatgagaactacaagctcctacagtcacatcctgctttacagtttatactaaatactcttatagaccatctgatttaatgccaccaactgtaggaaatgttgtcacaatcacttagtgactgagagagattgataccatggctgaaaaaaaaggcagtaatggaacttaaactcagtcttctgactctgagctctgggattttgccctaaatcagcagctgccagggaccaaaaccagaggcagaggtagaaaagcaaatattaagtaggcaggaactgtgcactatgtggtttagggttattcaccctcacacgtctgttagtgttaaaaagtacaccagtacctctcaaacctttacatcaatgtctcctcatggcagaaggcagcctttctgctaaatctgggaatttaacagaaagaggacaacccaagcctcatttcagagagaagtcttgtatacgcttataaatctacgtgactttcatccctaagtacattaatgttttgcctctcaatagaatcaagggaaactgatgcttcagaaagatgccccatatttatcctgtggcactcaaagtaccccaggttgagatgagatgaggaagactcaagctaagttcagtttcccaagatctgttccacagaagataagcagatctcactccagaaccagtgactgaggggcactctggtcccagaacaatggagaattcaaatctgaggtgcagaactgagaaaaaatgttaaaatctctctggagagtagaagcctgggagaaaaccaaaccaaacccgttctcccattgccacccagagacactgtcaacgtgttgagctcatgggggaggtgtaggcttttcacactgtcaaggtctgtggtaaggaagtcaggcagcctgaaacctctctcttctaggtcccacagtccccattccccttccagctggaaacctgtgctgcaaccagaggaaacagaagtgggcaagaacacttaggggactgggtcctaagaccaaaggccggtcttgtggtagtaatgacagtttgtagcgggactgtgacatcactacattctactcctcggtggagtggttgggggggacacatgagtgcaatgcccaagttgccgctttgagactggggagggggtcacaaaattgggagccaggtccttggagacgtgaccccaaagagccccgggaggtcaggcttggggcggcaggaggtgagggccaattaaggagcaaggagctccaggagtcacatccccaaagtcaccctgtggcaactggtgagggcaggttctggggcacccaggtccttggagatgtgagctcaaggagcccagggaggtcgggtttggggtagcaggaggtaagggcggagtatggagttggaagccccaggagtcacctgctcaaagtcaccctggtgtgccgggcagagcaggggcaggacttatgagggggttgggctggctgacaagattttggtgtggggagcccagaggcactggggtggggggcccagcctggtgtccctcaggagtggcacagactctggcagcagttcggctgtcagagggggcctcgggttgggttggggtgttggtgcgtttacctgttccttggcctcggccaatttgctctgtctggtttctttggacatcataggatgggtagggaggtggggatgggtagggaggtggggatgggtagggaggtggggatgggtagggaggtggggatgggtagggaggtggggatgggtagggaggtggggatgggtagggaggtggggttggggccacatcagcatgatccaggtgaggacaagtatatacctccagtcacctctacgtcgctgtgtgactgagccagaggaggcgtaaccagggctgcactagaatgcagaataggggtgtggccttcatgcttgaagcccattggtcaatgagaaagatgaaaggaaaaggaggtgtggccagacagcagcgtgtcatcaaggacctgtgttgtcacaaggaaagctgcctatgcaaccgctgtccccgcccactccaggagaggggcggggctggctttcactttaaaaactttaaaactttattacctcaattgaggtacaagtcctattaaaatggaaattttatagtgtgcttgatgattgataaagcagactttattatccaacattccaataagataatcacaatgttttctcttttttggaaaaactttctcttattctcctacattagcgtttagtttttttaaaaaaaacaaacaaacaagaaacatgtctaatatctttaaaaatacaaagctttgagccaggcgtgatggctcatgcctgtaatcccagcactttgggaggctggggcgggtggatcacccgaattcaggagttcaagaccagcctggccaacatgatgaaatcctgtctctactaaaaatacaaaagtagctgggcatggtggcaggtgcctgtaatcctagctacttgggaggctgaggcaggagaatcccttgaacctgtgaggcagaggttgcagtgagccaaaatcatgccactgcacttcagcctgggctgctacagaatgtgactctgtctctaaatacacacacacacacacacacgcacagacacacacacacacacacacacacacacacacaaggctttccatttaataagcactcaaagttctttacaaggttaaagcaaatacaggacccttctaaagtaaggctaaatgctaagtgatgggggagagaaaaaggacataaataactcctactctcatgagttaatcactaaatccgatttttctagaatcacctggcctctaagccctgaaaatgaaactgaatttctcactcgatacttggctatgacttgcaatcatgaaaaccaagaattgtgttatgtcactgtgtattgcttgttacctgggatcaagggttgactttttcatgatttgctccattacctgtgtgcttcttctcccagtccaaactacgcttttttctagagttctacaatttacagttagtatgtaagggtggctctcaaacatgtagtctccggaccaggagcacctgggaacttcttataaatgtaaattctcaggccccaccctagacacgaatgaatcagaaactctgcagtagggcccagcaatccgtgctgcaataatccctccaggtgctcaggaacctctgccatacagcaggtagaaaaatgtgtttccttctgtaggtccaaagccagggatactatatgttctgtctcaatatgaaacaatgacatgcaattaaaagacataaatctccttcctacttccaccctccagccagtgtgttttatttttatgagttcaataagaaaacgtgtggcaatcagagatttcatctaaaaaatatatctacaggtatcagttctcatccagcctgatctcatccaatatcatttctatcctcttacatctaaagttttagaaaaggattttcacaacgtaagactcaggcgcactaggagttctatgataaaagaccaagtagatctgaatgtccaaacttactagagaagaaaagtggactcattggctatattttcaaattgcattcaacaggaaattaaagttttgaattttttccaccttcatccttccaagttaatagaattaaaccagaatactccattcttccaaagcctgtagccaggcaaacttttactgtattacttcttgcttttcaatggatataaagcagagtcctggtaggcacattttgtatacctgcaaagatgcaaaactaaacagttccctcggttcaatattaaaacaaaagtcctgtaaacctcagatggtgagtgtaatacttcagcactagcacgaaagcctcaaata

SEQ ID NO: 1242075 - DNA, 4001 bp, Homo sapiens
cctgtccccaggagcctggcccgccgagactcacatccccaggtgagtggtaaccaccagaagtggctgtgtcagggctactgccattgactttctttttcctgttagctcctgctggaatgccagggctcttcctctgccaatatgcttttaactgtgggaaagaagagcagtaacactcatgagaatgatcagcccctacagccacatcctcctttacagttttgacaaaatacccttatataccatctgatgtaatgccaccaacaaccgtacaaggtgttgtcacaatcagtgactgagagggattcatatcatggatagaaaaaaaaaaaaagaaagatcaaaaaaggcaatactggaacttaaactcagtcctctgactccacgctctggggttttgccatgaatcagcagcttccagggaccaaaaccaggggcagaggtagaaaagcacacattaagcaggcaggaactgtaggccgtgtggtttagagtcatacatcctcacaggtctgctagcgtgaagaagcgtaccagtacctctcacactttcatatcaatgtgtcctcatggcagaaggcagcttttctattaaatctgggaatttatcagaaagaggacaacccaagcctcatttcagagcaaagtctggtatacgcttggaaacctatgtgtctgtcatccccaagtacattaatgcattttctcaagagaatcaagggaaaatgatgcttcagaaagatgtcccgcatttatcctgtggcactcaaagtaccccaggttgagacgatatgaggaagattcaagctgtcaagttcagtttcccaagatctattccacagaagatgagcaaatctcacttcagaggccactgactgaagggcagtctggtcccagaaccgtggagaactcagaaaaaaatgttaaagtctctctggaaagtagaagcctgggaaaaaaccaaaccaaacccattctcccattgccacccagagatactgtgaacattttgagctcacaggggaagtgtaggcttttcccactgtcaatgtctatgttaagggagtaaggcagcctgaaacctcttgctcctaggtcccatagtctccactccccttccagctggaaatttgtgctgcaaccagaggaaccagaaatggggtgagaaaacttaggggactgggttgtaagatcaaaggctggtcttgcagcagtaatgacagttcctaggggcactgtgacatcattgcattccactcctcccaggggaggggaccacatcagcgcgatgcccgagtcgctgctccacgatgggggagggaaacacacggtttcgacccaggtcctcagagacgccagcccaagaagcctagggaggtcgagcttggggcagcaggaggggagggcagagtctgcagtagggagccccgggagtcaccagcccaaagccacccagggatgactggtgagggcagggcctggggctgggggacccaggtcctgggagacgcaagcccaaagagcccagggaggttgggcttggggtggcaggaggtgagggctgattatggagcagggagccccaggagtcacctgcccaaagtcaccctggggtgattggcaagggcagggactgggctgcttgctgaaggggtggggctgactgactaggctttggttgggggagcccagaggggctggggttggggggccccatctggtatgcctcaggagtggtatggactctggcacaggtcttgtcatcggaggggatctgtggctgggttgggggccatgacctggtgtgttttacctttttcttggctgcggccaatttcccctgttgtgttttttctgacatcgcggggtggggagggaggcggggttggggccacatcagcgaaataccagtgagcactgctcaatgcctccagtcacctaccaggcagctgtgcaactgagccacaggtggcgtaaccagggcaccaatggaacgcagaataggggcgtggccttaatgctccaagcccattggtcagtgagaaagatgaaagggaaaggaggcgtggccaggcgcagcatgtccagagggacctgtggcatcataaggaaagctgcccatgcaaccgctgtccccgcccactcagagaaaggggaggggccgcccactctgggagaggggaagggctgggttttgctttaaaacttttaaaactgtaaaaaataaactttaaaaaatatatgtgtatatactttatatatatgtgtgtctgtgtgtgtgtatctatgtgttcctccagagctgtcttcattatgcagcttctgtgcaaagtctgtgattttggcctatatttttcatcttcaaatggagtacaagaattaccagtattaccttaactgagatatagatcctataaaaatggaaaatccatagcatgcttgatgattaatgaagccgactatagtatccgacattccaataagacaaaataatcacaacaatttctcttttttggaaaaatgtttgtcttattctcctacattattgttaagatttcttttaaaaacaagaaacatgtctaatatctttaaaaacacaaagcttttgggccgggtgcggtggctcacgcctgtaatgccatcactttgggaggccgaggtgggtggattgcctgaggtcaggagttcgagaccagcctggccaacatgatgaaaccctgtctctactaaaaatacaaaaactagccaggcgtggttgcgggtgcctgtaatcccagctatttgggaggctgaggcaggagaatcactggaacccaggagatggaggttgcagtgagccaagctcacgccactgcactccagcctgggcgacagagcaagactccatctcaaaagaaataaaataaaatacaaaataagtaagaacacaaagctttcaatttaataaccacttaaagctctttactggtttaagagaattacaaggcccatttttctagaatcacctggcctctctaagccttgcaaatgaagctgaatttctcacttgatacttggctatcacttgcagtcatgaaaaccaagaatttgttatgtcactgtgtattgcttgttacctgaaatccacactaggctgggatcaagggttgaatctttcatgattttctccataacctgtgtgcttcttatcccacaccaaactaagctttttttctagagctctgcaacttacagttagtatatgagagcagttctcaaaaatgtagtctctggactagcagctccagcagcacctgggaacttcttataaatacacatcctccggccccaccctggacctgatgaatcagaaactctggagtagggctcagcaatctgtgctgcagtaatccctccaggtgttcaagaacctctggcatacagcaggtagaaaaatgtgtttccttctgtaggtccaaaaccagggatactatatgttctgtctctatatgaaacaatgacgtgcaattaaaagacataaatctccttcctgctcccaccttccagccaatgagttttatttttatgagttaaataagaaaacaatcagagatttcgtctaaatcgcatatttacaggtatcagttctcatccagcctgatcttatccaatatcatttatattctcttacatgtgaagttttagagaaggatcttcacaatgtaagactcaggcacactaggagttctgtaataaaacaccaagtagatcagaatgtccaaacttactggagaagaaaagtggaatcattggctatattttcaaatggcaataaacaggaaattaaagttttgaattttttttcaccttcatccttccacgttaatagaattaagccaaaatacttgtcttccaaagcctctagccaggcaaaattttactatattacttcttgcttttcaatggctataaagcagactcctggtaggcacatttggtatacctgcaaagatgaagaa

SEQ ID NO: 1242076 - DNA, 4001 bp, Homo sapiens
tccccaggagcccggccagccaagactcacatcctcaggcgagtggcaaccaccagaagtggttgtctcagggttagtgccattatttattttcttctttttggtgtcgcttgctgctgtaccaacactagggttggtctggggatgatggtctgtcaactgtggaaaggaagagcagtgatactcatgagaactacaagctcctacagtcacatcctgctttacagtttatactaaatacccttatagaccatctgatttaatgccaccaactgtaggaaatgttgtcacaatcacttagtgactgagagagattgataccatggctgaaaaaaaaggcagtaatggaacttaaactcagtcttctgactctgagctctgggattttgccctaaatcagcagctgccagggaccaaaaccagaggcagaggtagaaaagcaaatattaagtaggcaggaactgtgcactatgtggtttagggttattcaccctcacacgtctgttagtgttaaaaagtacaccagtacctctcaaacctttacatcaatgtctcctcatggcagaaggcagcctttctgctaaatctgggaatttaacagaaagaggacaacccaagcctcatttcagagagaagtcttgtatacgcttataaatctacgtgactttcatccctaagtacattaatgttttgcctctcaatagaatcaagggaaactgatgcttcagaaagatgccccatatttatcctgtggcactcaaagtaccccaggttgagatgagatgaggaagactcaagctaagttcagtttcccaagatctgttccacagaagataagcagatctcactccagaaccagtgactgaggggcactctggtcccagaacaatggagaattcaaatctgaggtgcagaactgagaaaaaatgttaaaatctctctggagagtagaagcctgggagaaaaccaaaccaaacccgttctcccattgccacccagagacactgtcaacgtgtcgagctcatgggggaggtgtaggcttttcacactgtcaaggtctgtggtaaggaagtcaggcagcctgaaacctctctcttctaggtcccacagtccccattccccttccagctggaaacctgtgctgcaaccagaggaaacagaagtgggcaagaacacttaggggactgggtcctaagaccaaaggccggtcttgtggtagtaatgacagtttgtagcgggactgtgacatcactacattctactcctcggtggagtggttgggggggacacatgagtgcaatgcccaagttgccgctttgagactggggagggggtcacaaaattgggagccaggtccttggagacgtgaccccaaagagccccgggaggtcaggcttggggcggcaggaggtgagggccaattaaggagcaaggagctccaggagtcacatccccaaagtcaccctgtggcaactggtgagggcaggttctggggcacccaggtccttggagatgtgagctcaaggagcccagggaggtcgggtttggggtagcaggaggtaagggcggagtatggagttggaagccccaggagtcacctgctcaaagtcaccctggtgtgccgggcagagcaggggcaggacttatgagggggttgggctggctgacaagattttggtgtggggagcccagaggcactggggtggggggcccagcctggtgtccctcaggagtggcacagactctggcagcagttcggctgtcagagggggcctcgggttgggttggggtgttggtgcgtttacctgttccttggcctcggccaatttgctctgtctggtttctttggacatcataggatgggtagggaggtggggatgggtagggaggtggggatgggtagggaggtggggttggggccacatcagcatgatccaggtgaggacaagtatatacctccagtcacctctacgtcgctgtgtgactgagccagaggaggcgtaaccagggctgcactagaatgcagaataggggtgtggccttcatgcttgaagcccattggtcaatgagaaagatgaaaggaaaaggaggtgtggccagacagcagcgtgtcatcaaggacctgtgttgtcacaaggaaagctgcctatgcaaccgctgtccccgcccactccaggagaggggcggggctggctttcactttaaaaactttaaaactttattacctcaattgaggtacaagtcctattaaaatggaaattttatagtgtgcttgatgattgataaagcagactttattatccaacattccaataagataatcacaatgttttctcttttttggaaaaactttctcttattctcctacattagcgtttagttttttttaaaaaaacaaacaaacaagaaacatgtctaatatctttaaaaatacaaagctttgagccaggcgtgatggctcatgcctgtaatcccagcactttgggaggctggggcgggtggatcacccgaattcaggagttcaagaccagcctggccaacatgatgaaatcctgtctctactaaaaatacaaaagtagctgggcatggtggcaggtgcctgtaatcctagctacttgggaggctgaggcaggagaatcccttgaacctgtgaggcagaggttgcagtgagccaaaatcatgccactgcacttcagcctgggctgctacagaatgtgactctgtctctaaatacacacacacacacacacacacgcacagacacacacacacacacacacacacacacacacacacacaaggctttccatttaataagcactcaaagttctttacaaggttaaagcaaatacaggacccttctaaagtaaggctaaatgctaagtgatgggggagagaaaaaggacataaataactcctactctcatgagttaatcactaaatccgatttttctagaatcacctggcctctaagccctgaaaatgaaactgaatttctcactcgatacttggctatgacttgcaatcatgaaaaccaagaattgtgttatgtcactgtgtattgcttgttacctgggatcaagggttgactttttcatgatttgctccattacctgtgtgcttcttctcccagtccaaactacgcttttttctagagttctacaatttacagttagtatgtaagggtggctctcaaacatgtagtctccggaccaggagcacctgggaacttcttataaatgtaaattctcaggccccaccctagacacgaatgaatcagaaactctgcagtagggcccagcaatccgtgctgcaataatccctccaggtgctcaggaacctctgccatacagcaggtagaaaaatgtgtttccttctgtaggtccaaagccagggatactatatgttctgtctcaatatgaaacaatgacatgcaattaaaagacataaatctccttcctacttccaccctccagccagtgtgttttatttttatgagttcaataagaaaacgtgtggcaatcagagatttcatctaaaaaatatatctacaggtatcagttctcatccagcctgatctcatccaatatcatttctatcctcttacatctaaagttttagaaaaggattttcacaacgtaagactcaggcgcactaggagttctatgataaaagaccaagtagatctgaatgtccaaacttactagagaagaaaagtggactcattggctatattttcaaattgcattcaacaggaaattaaagttttgaattttttccaccttcatccttccaagttaatagaattaaaccagaatactccattcttccaaagcctgtagccaggcaaacttttactgtattacttcttgcttttcaatggatataaagcagagtcctggtaggcacattttgtatacctgcaaagatgcaaaactaaacagttccctcggttcaatattaaaacaaaagtcctgtaaacctcagatggtgagtgtaat

SEQ ID NO: 1242077 - DNA, 4001 bp, Homo sapiens
tcttaacaattaccctctactgccccttgggccccctgtccccaggaccctggcccgccgagactcacatccccaggtgagtggtaaccaccagaagtggctgtgtcagggctactgccattgattttctttttcctgttagctcctgctggaatgccagggctcttcctctgccaatatgcttttaactgtgggaaagaagagcggtaacactcatgagaatgatcagcccctacagccacatcctcctttacagttttgacaaaatacccttatataccatctgatgtaatgccaccaacaactgtacaaggtgttgtcacaatcacttagtgactgagagggattgatatcatggatagaaaaaaaaaaaaaagaaagatcaaaaaaggcaatactggaacttaaactcagtcctctgactccaagctctggggttttgccatgaatcagcagcttccagggaccaaaaccaggggcagaggtagaaaagtaaacattaagcaggcaggaactgtaggccgtgtggtttagagtcatacatcctcacaggtctgctagcgtgaagaagcgtaccagtacctctcacactttcatatcaatgtgtcctcatggcagaaggcagcttttctattaaatctgggaatttatcagaaagaggacaacccaagcctcatttcagagcgaagtctggtatacgcttggaaacctatgtgtctgtcatccctaagtacattaatgcattttctcaagagaatcaagggaaaatgatgcttcagaaagatgtcccacatttatcctgtggcactcaaagtaccccaggttgagacgatatgaggaagattcaagctgtcaagttcagtttcccaagatctattccacagaagatgagcaaatctcacttcagaggccactgactgaagggcagtctggtcccagaaccgtggagaactcagaaaaaaatgttaaagtctctctggaaagtagaagcctgggaaaaaaccaaaccaaacccattctcccattgccacccagagatactgtgaacattttgagctcacaggggaagtgtaggcttttcccactgtcaatgtctatgttaagggagtaaggcagcctgaaacctcttgctcctaggtcccatagtctccactccccttccagctggaaatttgtgctgcaaccagaggaaccagaaatggggtgagaaaacttaggggactgggttgtaagatcaaaggccggtcttgcagcagtaatgacagttcctaggggcactgtgacatcattgcattccactcctcccaggggaggggaccacatcagcgcgatgcccgagtcgctgctccacgatgggggagggaaacacacggtttcgacccaggtcctcagagacgccagcccaagaagcctagggaggtcgagcttggggcagcaggaggggagggcagagtctgcagtagggagccccgggagtcaccagcccaaagccacccagggatgactggtgagggcagggcctggggctgggggacccaggtcctgggagacgcaagcccaaagagcccagggaggttgggcttggggtggcaggaggtgagggctgattatggagcagggagccccaggagtcacctgcccaaagtcaccctggggtgattggcaagggcagggactgggctgcttgctgaaggggtggggctgactgactaggctttggttgggggagcccagaggggctggggttggggggccccatctggtatgcctcaggagtggtatggactctggcacaggtcttgtcatcggaggggatctgtggctgggttgggggccatgacctggtgtgttttacctttttcttggctgcggccaatttcccctgttgtgttttttctgacatcgcggggtggggagggaagcggggttggggccacatcagcgaaataccagtgagcactgctcaatgcctccagtcacctaccaggcagctgtgcaactgagccacaggtggcgtaaccagggcaccaatggaacgcagaataggggcgcggccttaaggctccaagcccattggtcagtgagaaagatgaaagggaaaggaggcgtggccaggcagcagcatgtccagagggacctgtggcatcataaggaaagctgcccatgcaaccgctgtccccgcccactcagagaaaggggaggggccgcccactctgggagaggggaagggctgggttttgctttaaaacttttaaaactgtaaaaaataaactttaaaaaatatatgtgtatatactttatatatatgtgtgtctgtgtgtgtgtatctatgtgttcctccagagctgtcttcattatgcagcttctgtgcaaagtctgtgattttggcctatatttttcatcttcaaatggagtacaagaattaccagtattaccttaactgagatatagatcctataaaaatggaaaatccatagcatgcttgatgattaatgaagccgactatagtatccgacattccaataagacaaaataatcacaacaatttctcttttttggaaaaatgtttgtcttactctcctacattattgttaagatttcttttaaaaacaagaaacatgtctaatatctttaaaaacacaaagcttttgggccgggtgcagtggctcacgcctgtaatgccatcactttgggaggccgaggtgggtggattgcctgaggtcaggagttcgagaccagcctggccaacatgatgaaaccctgtctctactaaaaatacaaaaactagccaggcgtggttgcgggtgcctgtaatcccagctatttgggaggctgaggcaggagaatcactggaacccaggagatggaggttgcagtgagccaagctcacgccactgcactccagcctgggcgacagagcaagactccatctcaaaagaaataaaataaaatacaaaataagtaagaacacaaagctttcaatttaataaccacttaaagctctttactggtttaagagaattacaaggcccatttttctagaatcacctggcctctctaagccttgcaaatgaagctgaatttctcacttgatacttggctctcacttgcagtcatgaaaaccaagaatttgttatgtcactgtgtattgcttgttacctgaaatccacactaggctgggatcaagggttgaatctttcatgattttctccataacctgtgtgcttcttatcccacaccaaactaagctttttttctagagctctgcaacttacagttagtatatgagagcagttctcaaaaatgtagtctctggactagcagctccagcagcacctgggaacttcttataaatacacatcctccggccccaccctggacctgatgaatcagaaactctggagtagggctcagcaatctgtgctgcagtaatccctccaggtgttcaagaacctctggcatacagcaggtagaaaaatgtgtttccttctgtaggtccaaaaccagggatactatatgttttctctatatgaaacaatgacgtgcaattaaaagacataaatctccttcctgctcccaccttccagccaatgtgttttatttttatgagttaaataagaaaacaatcagagatttcgtctaaatcgcatatttacaggtatcagttctcatccagcctgatcttatccaatatcatttatattctcttacatgtgaagttttagagaaggatcttcacaatgtaagactcaggcacactagcagttctgtaataaaacaccaagtagatcagaatgtccaaacttactggagaagaaaagtggaatcattggctatattttcaaattgcaataaacaggatattaaagttttgaatttttttcaccttcatccttccacgttaatagaattaagccaaaatacttgtcttccaaagcctctagccaggcaaaattttactatattacttcttgcttttcaatggctataaagcagactcc

SEQ ID NO: 1242078 - DNA, 4001 bp, Homo sapiens
cttaacaattaccctctactgccccttgggccccctgtccccaggaccctggcccgccgagactcacatccccaggtgagtggtaaccaccagaagtggctgtgtcagggctactgccattgattttctttttcctgttagctcctgctggaatgccagggctcttcctctgccaatatgcttttaactgtgggaaagaagagcggtaacactcatgagaatgatcagcccctacagccacatcctcctttacagttttgacaaaatacccttatataccatctgatgtaatgccaccaacaactgtacaaggtgttgtcacaatcacttagtgactgagagggattgatatcatggatagaaaaaaaaaaaaaagaaagatcaaaaaaggcaatactggaacttaaactcagtcctctgactccaagctctggggttttgccatgaatcagcagcttccagggaccaaaaccaggggcagaggtagaaaagtaaacattaagcaggcaggaactgtaggccgtgtggtttagagtcatacatcctcacaggtctgctagcgtgaagaagcgtaccagtacctctcacactttcatatcaatgtgtcctcatggcagaaggcagcttttctattaaatctgggaatttatcagaaagaggacaacccaagcctcatttcagagcgaagtctggtatacgcttggaaacctatgtgtctgtcatccctaagtacattaatgcattttctcaagagaatcaagggaaaatgatgcttcagaaagatgtcccacatttatcctgtggcactcaaagtaccccaggttgagacgatatgaggaagattcaagctgtcaagttcagtttcccaagatctattccacagaagatgagcaaatctcacttcagaggccactgactgaagggcagtctggtcccagaaccgtggagaactcagaaaaaaatgttaaagtctctctggaaagtagaagcctgggaaaaaaccaaaccaaacccattctcccattgccacccagagatactgtgaacattttgagctcacaggggaagtgtaggcttttcccactgtcaatgtctatgttaagggagtaaggcagcctgaaacctcttgctcctaggtcccatagtctccactccccttccagctggaaatttgtgctgcaaccagaggaaccagaaatggggtgagaaaacttaggggactgggttgtaagatcaaaggccggtcttgcagcagtaatgacagttcctaggggcactgtgacatcattgcattccactcctcccaggggaggggaccacatcagcgcgatgcccgagtcgctgctccacgatgggggagggaaacacacggtttcgacccaggtcctcagagacgccagcccaagaagcctagggaggtcgagcttggggcagcaggaggggagggcagagtctgcagtagggagccccgggagtcaccagcccaaagccacccagggatgactggtgagggcagggcctggggctgggggacccaggtcctgggagacgcaagcccaaagagcccagggaggttgggcttggggtggcaggaggtgagggctgattatggagcagggagccccaggagtcacctgcccaaagtcaccctggggtgattggcaagggcagggactgggctgcttgctgaaggggtggggctgactgactaggctttggttgggggagcccagaggggctggggttggggggccccatctggtatgcctcaggagtggtatggactctggcaccggtcttgtcatcggaggggatctgtggctgggttgggggccatgacctggtgtgttttacctttttcttggctgcggccaatttcccctgttgtgttttttctgacatcgcggggtggggagggaggcggggttggggccacatcagcgaaataccagtgagcactgctcaatgcctccagtcacctaccaggcagctgtgcaactgagccacaggtggcgtaaccagggcaccaatggaacgcagaataggggcgtggccttaaggctccaagcccattggtcagtgagaaagatgaaagggaaaggaggcgtggccaggcagcagcatgtccagagggacctgtggcatcataaggaaagctgcccatgcaactgctgtccccgcccactaagaggggaggggccacccactctgggagaggggaagggctggcttttgctttaaaagctttaaaactgttaaaaataaactttaaaaaatatatgtgtgtatactttatatatgtgtgtctgtgtgtatctatgtgttcctccagagctgtcttcattatccagcttctatgcaaagtctatgattttggcctatatttttcatcttcaaatggagcacaagaattacaagtattaccttaactgagatatagatcctataaaaatggaaaatccatagcattcttgatgattaatgaagccgactatagtatccgacattccaataacagaatataatcacaatgatttctcttttttggaaaaatgtttgtcttattctcctacattattgttaagatttcttttaaaaacaagaaacatgtctaatatctttaaaaacacaaagcttttgggccaggtgcggtggctcacccctgtaatgccatcactttgggaggccgaggtgggtggatcgcctgaggtcaggagttcgagaccagcctggccaacatgaagaaaccctgtctctactaaaaatacaaaaactaaccaggtgtggtggtgggtgcttgtaatcccagctatttgggaggctgaggcaggagaatcacttgaacccaggagatggaggttgcagtgagccaagctcatgccactgcactccagcctgggtgacagagcaagactccatctcaaaagaaataaaataaaataaaataagatacaaaataagtaggaacacaaaacttccaatttaataagcacttaaagctctttattggtttaaaacaaatacaaggcccacttttctagaatcaccaggcctctctaggccttgcaaatgaaactgaatttctcacttgatacctggctatgacttgcagtcatgaaaaccaagaattgtgttatgtcactgtgtactgcttgttacctgaaatccacactaggctgggatcaagggttgaatctttcatgattttctccataacctgtgtgcttcttatcccagactgaactaagcttttttctagagttctacaatttacacttaatagacaagagtggttctcaaaatgtagtctatggactagcagcaccagcagcacctgagacctttttataagtgcaaattctcaggccccaccctggacctggtgaatcagaaactctggagtagggttcagcaatctgtgctgcagtaatccctccaagtgttcaagaacctctggcatacagcaggtagaaaaatgtgtttccttctgtaggtccaaagccagggttaccatatgttctgccttgttatgaaacaatgacatgcaattaaaagacaagaatctccttcctactcgcaccctccatccaatgtgttttatttgtatgagttccataagaaaaacaagcggcaatcagagatttagtctaaaaagtatgtttacaagtgtccgttctcatccagcctgatctcctacaaaaccatttacatcctcttacatctcaagttttaaaaaagtatcttcacaatgtaagactcacgcacactagcagttctataataaaacaccaagtagatcagaatgtccaaccttactagagaagaaaagtggaatcattggctatattttcaaattgcattcaacaggaaatttaagttttgaatttttttcacctttatacttccaaagtaatagaattaaaccagaatacgccattctttcaaagcctctagccaggcaaagttttactgtattatttcttgctttcaatggatataaa

SEQ ID NO: 1242079 - DNA, 4001 bp, Homo sapiens
gtggttgtctcagggttagtgccattatttattttcttctttttggtgtcgcttgctgctgtaccaacactagggttggtctggggatgatggtctgtcaactgtggaaaggaagagcagtgatactcatgagaactacaagctcctacagtcacatcctgctttacagtttatactaaatactcttatagaccatctgatttaatgccaccaactgtaggaaatgttgtcacaatcacttagtgactgagagagattgataccatggctgaaaaaaaaggcagtaatggaacttaaactcagtcttctgactctgagctctgggattttgccctaaatcagcagctgccagggaccaaaaccagaggcagaggtagaaaagcaaatattaagtaggcaggaactgtgcactatgtggtttagggttattcaccctcacacgtctgttagtgttaaaaagtacaccagtacctctcaaacctttacatcaatgtctcctcatggcagaaggcagcctttctgctaaatctgggaatttaacagaaagaggacaacccaagcctcatttcagagagaagtcttgtatacgcttataaatctatgtgactttcatccctaagtacattaatgttttgcctctcaatagaatcaagggaaactgatgcttcagaaagatgccccatatttatcctgtggcactcaaagtaccccaggttgagatgagatgaggaagactcaagctaagttcagtttcccaagatctgttccacagaagataagcagatctcactccagaaccagtgactgaggggcactctggtcccagaacaatggagaattcaaatctgaggtgcagaactgagaaaaaatgttaaagtctctctggagagtagaagcctgggagaaaaccaaaccaaacccattctcccattgccacccagagacactgtcaacgtgttgagctcatgggggaggtgtaggcttttcacactgtcaaggtctgtggtaaggaagtcaggcagcctgaaacctctctcttctaggtcccacagtccccattccccttccagctggaaacctgtgctgcaaccagaggaaacagaagtgggcaagaacacttaggggactgggtcctaagaccaaaggccggtcttgtggtagtaatgacagtttgtagcgggactgtgacatcactacattctactcctcggtggagtggttgggggggacacatgagtgcaatgcccaagttgccgctttgagactggggagggggtcacaaaattgggagccaggtccttggagacgtgaccccaaagagccccgggaggtcaggcttggggcggcaggaggtgagggccaattaaggagcaaggagctccaggagtcacatccccaaagtcaccctgtggcaactggtgagggcaggttctggggcacccaggtccttggagatgtgagctcaaggagcccagggaggtcgggtttggggtagcaggaggtaagggcggagtatggagttggaagccccaggagtcacctgctcaaagtcaccctggtgtgccgggcagagcaggggcaggacttatgagggggttgggctggctgacaagattttggtgtggggagcccagaggcactggggtggggggcccagcctggtgtccctcaggagtggcacagactctggcagcagttcggctgtcagagggggcctcgggttgggttggggtgttggtgcgtttacctgttccttggcctcggccaatttgctctgtctggtttctttggacatcataggatgggtagggaggtggggatgggtagggaggtggggatgggtagggaggtggggatgggtagggaggtggggatgggtagggaggtggggttggggccacatcagcatgatccaggtgaggacaagtatatacctccagtcacctctacgtcgctgtgtgactgagccagaggaggcgtaaccagggctgcactagaatgcagaataggggtgtggccttcatgcttgaagcccattggtcaatgagaaagatgaaaggaaaaggaggtgtggccagacagcagcgtgtcatgaaggacctgtgttgtcacaaggaaagctgcctatgcaaccgctgtccccgcccactccaggagaggggcggggctggctttcactttaaaaactttaaaactttattacctcaattgaggtacaagtcctattaaaatggaaattttatagtgtgcttgatgattgataaagcagactttattatccaacattccaataagataatcacaatgttttctcttttttggaaaaactttctcttattctcctacattagcgtttagtttttttaaaaaaaacaaacaaacaagaaacatgtctaatatctttaaaaatacaaagctttgagccaggcgtgatggctcatgcctgtaatcccagcactttgggaggctggggcgggtggatcacccgaattcaggagttcaagaccagcctggccaacatgatgaaatcctgtctctactaaaaatacaaaagtagctgggcatggtggcaggtgcctgtaatcctagctacttgggaggctgaggcaggagaatcccttgaacctgtgaggcagaggttgcagtgagccaaaatcatgccactgcacttcagcctgggctgctacagaacgtgactctgtctctaaatacacacacacacacacacacgcacagacacacacacacacacacgcacagacacacacacacacacacacacacacacacacacaaggctttccatttaataagcactcaaagttctttacaaggttaaagcaaatacaggacccttctaaagtaaggctaaatgctaagtgatgggggagagaaaaaggacataaataactcctactctcatgagttaatcactaaatccgatttttctagaatcacctggcctctaagccctgaaaatgaaactgaatttctcactcgatacttggctatgacttgcaatcatgaaaaccaagaattgtgttatgtcactgtgtattgcttgttacctgggatcaagggttgactttttcatgatttgctccattacctgtgtgcttcttctcccagtccaaactacgcttttttctagagttctacaatttacagttagtatgtaagggtggctctcaaacatgtagtctccggaccaggagcacctgggaacttcttataaatgtaaattctcaggccccaccctagacatgaatgaatcagaaactctgcagtagggcccagcaatccgtgctgcaataatccctccaggtgctcaggaacctctgccatacagcaggtagaaaaatgtgtttccttctgtaggtccaaagccagggatactatatgttctgtctcaatatgaaacaatgacatgcaattaaaagacataaatctccttcctacttccaccctccagccagtgtgttttatttttatgagttcaataagaaaacgtgtggcaatcagagatttcatctaaaaaatatatctacaggtatcagttctcatccagcctgatctcatccaatatcatttctatcctcttacatctaaagttttagaaaaggattttcacaacgtaagactcaggcgcactaggagttctatgataaaagaccaagtagatctgaatgtccaaacttactagagaagaaaagtggactcattggctatattttcaaattgcattcaacaggaaattaaagttttgaattttttccaccttcatccttccaagttaatagaattaaaccagaatactccattcttccaaagcctgtagccaggcaaacttttactgtattacttcttgcttttcaatggatataaagcagagtcctggtaggcacattttgtatacctgcaaagatgcaaaactaaacagttccctcggttcaatattaaaacaaaagtcctgtaaacctcagatggtgagtgtaatactt

SEQ ID NO: 1242080 - DNA, 4001 bp, Homo sapiens
agattgtggggaggggtagagagaataatcattagggctggtgggggtgtgtgggctgcctcagctggcagaggggcaacaagcccctgctgtgggaggaggttggagggctggcctgcagggtcactgcacctcggcccagggcctcttacctccagatcctgcagggtagtagaggatgcacggccctccccgtagatacctgttgctgactccaagagatgagagtgcacatggagatgttctgtcccccctcactgtctaagccctctgacttcctttcttcccccatcaactggcaaaagcttcttttctgcctatcttggaacctttttcccataactcctttgtgccaacttctctcgtggttcttatctccccaccatcccaccctggggccctttcagtgactcctaaagggacagcctgatggcaagtggctcttctcattggcctggcttccccttgagactggggatgaggaaaatcaaacagcaacgaccatttcctcggtgtcctgggtgtttgcagcaggccatgtactaaggattcacataaaagcaacaataacgaatctcatttaaacttcacaaatggaagtcaaaaaataccacctctattatacagatgtgaaaagagaggcccaaagacctcaagcaacttgccctaaatcatatgctaatcaatccctaatcaattcttagcagacggagaggcaggattcaaatccagaattcttaaccagtacccaacagtccatctacaatcttaacaattaccctctactgccccttgggctccctgtccccaggagcctggcccgccgagactcacatccccaggtgagtggtaaccaccagaagtgaatgtgtcagggctactgccattgattttctttttcctgttagctcctgctggaatgccagggctcttcctctgccaatatgcttttaactgtgggaaagaagagcagtaacactcatgagaatgatcagcccctacagccacatcctcctttacagttttgacaaaatacccttatataccatctgatgtaatgccaccaacaactgtacaaggtgttgtcacaatcacttagtgactgagagggattgatatcatggatagaaaaaaaaaaaaagaaagatcaaaaaaggcaatactggaacttaaactcagtcctctgactccaagctctggggttttgccatgaatcagcagcttccagggaccaaaaccaggggcagaggtagaaaagcacacattaagcaggcaggaactgtaggccgtgtggtttagagtcatacatcctcacaggtctgctagcgtgaagaagcgtaccagtacctctcacactttcatatcaatgtgtcctcatggcagaaggcagcttttctattaaatctgggaatttatcagaaagaggacaacccaagcctcatttcagagcgaagtctggtatacgcttggaaacctatgtgtctgtcatccctaagtacattaatgcattttctcaagagaatcaagggaaaatgatgcttcagaaagatgtcccgcatttatcctgtggcactcaaagtaccccaggttgagacgatatgaggaagattcaagctgtcaagttcagtttcccaagatctattccacagaagatgagcaaatctcacttcagaggccactgactgaagggcagtctggtcccagaaccgtggagaactcagaaaaaaatgttaaagtctctctggaaagtagaagcctgggaaaaaaccaaaccaaacccattctcccattgccacccagagatactgtgaacattttgagctcacaggggaagtgtaggcttttcccactgtcaatgtctatgttaagggagtaaggcagcctgaaacctcttgctcctaggtcccatagtctccactccccttccagctggaaatttgtgctgcaaccagaggaaccagaaatggggtgagaaaacttaggggactgggttgtaagatcaaaggccggtcttgcagcagtaatgacagttcctaggggcactgtgacatcattgcattccactcctcccaggggaggggaccacatcagcgcgatgcccgagtcgctgctccacgatgggggagggaaacacacggtttcgacccaggtcctcagagacgccagcccaagaagcctagggaggtcgagcttggggcagcaggaggggagggcagagtctgcagtagggagccccgggagtcaccagcccaaagccacccagggatgactggtgagggcagggcctggggctgggggacccaggtcctgggagacgcaagcccaaagagcccagggaggttgggcttggggtggcaggaggtgagggctgattatggagcagggagccccaggagtcacctgcccaaagtcaccctggggtgattggcaagggcagggactgggctgcttgctgaaggggtggggctgactgactaggctttggttgggggagcccagaggggctggggttggggggccccatctggtatgcctcaggagtggtatggactctggcaccggtcttgtcatcggaggggatctgtggctgggttgggggccatgacctggtgtgttttacctttttcttggctgcggccaatttcccctgttgtgttttttctgacatcgcggggtggggagggaggcggggttggggccacatcagcgaaataccagtgagcactgctcaatgcctccagtcacctaccaggcagctgtgcaactgagccacaggtggcgtaaccagggcaccaatggaacgcagaataggggcgtggccttaatgttccaagcccattggtcagtgagaaagatgaaagggaaaggaggcgtggccaggcgcagcatgtccagagggacctgtagcatcataaggaaagctgcccatgcaaccgctgtccccgcccactcagagagaggggagaggccgcccactctgggagaggggaggggctggcttttgctttaaaagctttaaaactgttaaaaataaactttaaaaaatatatgtgtatatactttatatatgtgtgtctgtgtgtatctatgtgttcctccagagctgtcttcattatgcagcttctatgcaaagtctatgattttggcctatatttttcatcttcaaatggagcacaagaattacaagtattaccttaactgagatatagaccctataaaaatggaaaatccatagcattcttgatgattaatgaagctgactatagtatccgacattccaataacagagaataatcacaacaatttctcttttttggaaaaatgtttgtcttattctcctacattattgttaagatttcttttaaaaacaagaaacatgtctaatatctttaaaaacacaaagcttttgggccaggtgcggtggctcacccctgtaatgccatcactttgggaggccgaggtgggtggatgacctgaggtcaggagttcgagaccagcctggccaacatgaagaaaccctgtctctactaaaaatacaaaaactaaccaggtgtggtggtgggtgcttgtaatcccagctatttgggaggctgaggcaggagaatcacttgaacccaggagatggaggttgcagtgagccaagctcatgccactgcactccagcctgggtgacagagcaagactccatctcaaaagaaataaaataaaataaaataagatacaaaataagtaggaacacaaaacttacaatttaataagcacttaaagctctttactggtttaaaacaaatacaaggcccatttttctagaatcaccaggccactctaggccttgcaaatgaaactgaatttctcacttgatacctggctatgacttgcaatcatgaaaaccaagaattgtgttatgtcactgtgtactgcttgttacctgaaatccacactaggctgggatcaagggttgaatctttcatgatttttctccataacctgtgtgcttctta

SEQ ID NO: 1242081 - DNA, 4001 bp, Homo sapiens
gtccccaggagcctggcccgccgagactcacatccccaggtgagtggtaaccaccagaagtgaatgtgtcagggctactgccattgattttctttttcctgttagctcctgctggaatgccagggctcttcctctgccaatatgcttttaactgtgggaaagaagagcagtaacactcatgagaatgatcagcccctacagccacatcctcctttacagttttgacaaaatacccttatataccatctgatgtaatgccaccaacaactgtacaaggtgttgtcacaatcacttagtgactgagagggattgatatcatggatagaaaaaaaaaaaaagaaagatcaaaaaaggcaatactggaacttaaactcagtcctctgactccaagctctggggttttgccatgaatcagcagcttccagggaccaaaaccaggggcagaggtagaaaagcacacattaagcaggcaggaactgtaggccgtgtggtttagagtcatacatcctcacaggtctgctagcgtgaagaagcgtaccagtacctctcacactttcatatcaatgtgtcctcatggcagaaggcagcttttctattaaatctgggaatttatcagaaagaggacaacccaagcctcatttcagagcgaagtctggtatacgcttggaaacctatgtgtctgtcatccctaagtacattaatgcattttctcaagagaatcaagggaaaatgatgcttcagaaagatgtcccgcatttatcctgtggcactcaaagtaccccaggttgagacgatatgaggaagattcaagctgtcaagttcagtttcccaagatctattccacagaagatgagcaaatctcacttcagaggccactgactgaagggcagtctggtcccagaaccgtggagaactcagaaaaaaatgttaaagtctctctggaaagtagaagcctgggaaaaaaccaaaccaaacccattctcccattgccacccagagatactgtgaacattttgagctcacaggggaagtgtaggcttttcccactgtcaatgtctatgttaagggagtaaggcagcctgaaacctcttgctcctaggtcccatagtctccactccccttccagctggaaatttgtgctgcaaccagaggaaccagaaatggggtgagaaaacttaggggactgggttgtaagatcaaaggccggtcttgcagcagtaatgacagttcctaggggcactgtgacatcattgcattccactcctcccaggggaggggaccacatcagcgcgatgcccgagtcgctgctccacgatgggggagggaaacacacggtttcgacccaggtcctcagagacgccagcccaagaagcctagggaggtcgagcttggggcagcaggaggggagggcagagtctgcagtagggagccccgggagtcaccagcccaaagccacccagggatgactggtgagggcagggcctggggctgggggacccaggtcctgggagacgcaagcccaaagagcccagggaggttgggcttggggtggcaggaggtgagggctgattatggagcagggagccccaggagtcacctgcccaaagtcaccctggggtgattggcaagggcagggactgggctgcttgctgaaggggtggggctgactgactaggctttggttgggggagcccagaggggctggggttggggggccccatctggtatgcctcaggagtggtatggactctggcaccggtcttgtcatcggaggggatctgtggctgggttgggggccatgacctggtgtgttttacctttttcttggctgcggccaatttcccctgttgtgttttttctgacatcgcggggtggggagggaggcggggttggggccacatcagcgaaataccagtgagcactgctcaatgcctccagtcacctaccaggcagctgtgcaactgagccacaggtggcgtaaccagggcaccaatggaacgcagaataggggcgtggccttaatgttccaagcccattggtcagtgagaaagatgaaagggaaaggaggcgtggccaggcgcagcatgtccagagggacctgtagcatcataaggaaagctgcccatgcaaccgctgtccccgcccactcagagagaggggagaggccgcccactctgggagaggggaggggctggcttttgctttaaaagctttaaaactgttaaaaataaactttaaaaaatatatgtgtatatactttatatatgtgtgtctgtgtgtatctatgtgttcctccagagctgtcttcattatgcagcttctatgcaaagtctatgattttggcctatatttttcatcttcaaatggagcacaagaattacaagtattaccttaactgagatatagaccctataaaaatggaaaatccatagcattcttgatgattaatgaagctgactatagtatccgacattccaataacagagaataatcacaacaatttctcttttttggaaaaatgtttgtcttattctcctacattattgttaagatttcttttaaaaacaagaaacatgtctaatatctttaaaaacacaaagcttttgggccaggtgcggtggctcacccctgtaatgccatcactttgggaggccgaggtgggtggatgacctgaggtcaggagttcgagaccagcctggccaacatgaagaaaccctgtctctactaaaaatacaaaaactaaccaggtgtggtggtgggtgcttgtaatcccagctatttgggaggctgaggcaggagaatcacttgaacccaggagatggaggttgcagtgagccaagctcatgccactgcactccagcctgggtgacagagcaagactccatctcaaaagaaataaaataaaataaaataagatacaaaataagtaggaacacaaaacttacaatttaataagcacttaaagctctttactggtttaaaacaaatacaaggcccatttttctagaatcaccaggccactctaggccttgcaaatgaaactgaatttctcacttgatacctggctatgacttgcaatcatgaaaaccaagaattgtgttatgtcactgtgtactgcttgttacctgaaatccacactaggctgggatcaagggttgaatctttcatgatttttctccataacctgtgtgcttcttatcccagactgaactaagcttttttctagagttctacaatttacacttaatagacaagagtggttctcaaaatgtagtctatggactagcagcaccagcagcacctgagacctttttataagtgcaaattctcaggccccaccctggacctggtgaatcagaaactctggagtagggttcagcaatctgtgctgcagtaatccctccaagtgttcaagaacctctggcatacagcaggtagaaaaatgtgtttccttctgtaggtccaaagccagggttaccatatgttctgccttgttatgaaacaatgacatgcaattaaaagacaagaatctccttcctactcgcaccctccatccaatgtgttttatttgtatgagttccataagaaaaacaagcggcaatcagagatttagtctaaaaagtatgtttacaagtgtccgttctcatccagcctgatctcctacaaaaccgtttacatcctcttacatctcaagttttaaaaaagtatcttcacaatgtaagactcacgcacactagcagttctataataaaacaccaagtagatcagaatgtccaaccttactagagaagaaaagtggaatcattggctatattttcaaattgcattcaacaggaaatttaagttttgaatttttttcacctttatacttccaaagtaatagaattaaaccagaatacgccattctttcaaagcctctagccaggcaaagttttactgtattatttcttgctttcaatggatataaagcagattcctggtaggcacattctgtatacctg

SEQ ID NO: 1242082 - DNA, 4001 bp, Homo sapiens
tgtccccaaaagcctgtccaggcaagactcacagcctcagatgagtggcaaccaccagaagcggccgtctcagggctactgccatttgctttcgtgttcctcttcgctgctgctggaacaccagggcggtttctctgccaatattctttgaactgtgggaaagaagagcagtaatactcatgagaactatcagcccctacagccacatcctcctttatagtttttataaaatactcttatataccatctgatttaatgacaccaacaactctataaggtgtcacaatcatttagggactgagagggatcgacatcatggctagaaaaaaagaaaaaagaaaaaagcgatactggaacttggaaactcagtcttcccactctaagctctggggttttgccaggcaccaaacccagaggcagaggtagaaaagtaaacattaagtaggcaggagctgtatgtcatgtggtttagagtcgtacatcttcacacgtctgttattgggaagaagtgcaccagtacctctcaaacttttatatcaatgtgtcctcatggcagaaggcagcctttctgtgaaatctgggaatttatcagaaagaggacaacccaagcctcatttcagagagaagtctggtatactcttagaaacctatgggactgccatccctaagtacattcatgttttttctcttatctcaagatatctcaagagaatcaaaggaaactgatgcttcagaaagatgtcccacatttatcctgtggtactcaaagcaccccagcttgagataatatgaggaagattcaaactgtcaagttcagtctcccaagatctattccacagaagatgaggaaatctcacttcagagaccactgactgaaggtcccagactgaagtctggtcccagaaccatggagaattagaatatgaggtggagaactcggaaaaaaatgttaaaatctctttggaaagtagaagcttgggagaaaaaccaaaccaaacccattctcccatcgccacccagagacactgtcaacgttttgagctcacgggggaagtgtaggcttttcccactgtcaatgtctatggtaagggagtaaggcagcctgaaacctcttgctcccaggtcccatagtctccatttcccttccagctggaaatttctgctgtgaccagaagaaccagaaacggggtgacaacgtttaggggactgggtcataagaccagggccagtcttccagtaatgacagttagtaggcagactgtgacatcactacattccactcctcctagtgcgggggagggaccacatcagcgcgatgtccgagtctccactccacaacgcgggagggaaacacagggttgtgacccaggtccttggagacgccagcacaaagagctcagggaggtcgaccttgaggcagcaggaggggagggcagagtctgcagcagggagccccaggagtcaccagcccaaagtcacccagggacaactggcgagggcggggcctggggctggggggcccaggtccttggatatgcgagcccaaagagcccagggaggtccaacttggggcggcaagaggtgagggcccagtaatggagtggggcgccccaggagtcacccgcccaacgtcaccccggggtgatcggcgagggcagggactgagctgtttgctgaaggggcagggctgactgacaagacttttgtagggggagcccagaagcgccggggttggggggcaaagtccggtgtgcgtcaggagtagtatggactgtggcagcggtcttgtcgtcggaggggatctgtggctgggttagcgggccatgacccggtacgtctttacctttttcttggctgcagctaatttactctgtccagtttcttctgccattgtggggtggggagggaggcggggctggggccacgtcagccaaatcccagcgagcgctgatcaacacatccagtcacctggaagacagctgcgtaactgacccagaggcagcgtaaccagggccacagtagaatgcagaataggggcgtggccttaatgcttcaagcccattggccaacgagaaagatgacagggaaagggggcgtggccaggcggcagtgtgtccagagggacctgtggctcatcaggaaagctgcccatgcaaccgctgtccccacccactctgagagaggggaggggccgcccgctctgggagagtggaggggctggcttttgctttaaaacccttaaaactttaaaaatcatatgtgtgtatactttatatatatgtgtgtgtctctctgtgtgtatccatgtgttcctccagagctgtcttcattaaccagcttctatgcaaggtctgtcattttggcctatatttttcatcttcaaatactgtataaaaattaccagtattacctgaactgagatacagatcctataaaagtgggaaatccacagcatgcttgatgattaatgaagcagactatattatccaacattccaatgagataaaataatcaaaatgatttcttttttggaaaaatgtttctcttattctcctacattgttgctgttttttctttttaaacaggaaacatggttaatatccgtaaaaacacaaagcttttgggctgggtgcggtggctcacacctgtaatcccagcactttggggagcccgagtctggtggatcacctgaggtcaggtagtggaagtgtgagccatcacacccggccggcttcatttcagaactctttccccagcactccatatactatgaataattcctttcttcttctttggatagcattttagtcatatctctattaccccacttgtcacatgataatcagtggctcacccatccatctcccttgattgctcatgagctccttgagaagagtctgattttcagcaccttgaacagtgtgccacacatacatgcttcatacgcagagaaggaaatgatttcactacagtgtaattattcccagaattcaatatctgtatttctaaattgttctagatactctgccaacaacctgagaatgttatgttttttccccaaaacttccatccattattgtgtgtctatggtcatagttaactcaattgtgacgtcacctttggacaagcccattaacagtttctttttttttaggtgatttttaattttaatttttgattttgattgtttcttttctgttttttaaatctagcagtgtttggtaaacttcaacatctctatatccccgtgtctctgccccgctggtctctgcttggaataatgtctcaaggttttagtcacctggaaaaaatttctactcacccttaaagaatcagaaataaataggctgggcatggtggctcatgactgtaatcccagcactttcgggaggccaaagtgggcggatcacctgaggtcagtagttccaagactagcctgcccaacatggtgaaaccccgtctctactaaaaatacaaaaaatagctgagcatggtggcagaggcctgtaatctcagctactcgggtggctgaggcaggataattgcttgaacctgggaggcagaggttgcagtgagctgagatcgtgccattgcactccatcttgggtgacagagtgagacatcatctgaaaaagaaaaagaaaaagaaaaagaaaagcttaaataataccttctctgagaagcctttatatcttcctattctttcaggaagtgttgaaaattcctcaacttttgaaacatttgtgcctctattactgtgtatcaggcagtgaactgagtgcccaggatagaaagatgaaactgtagatcctgcccttacggagctcatggtctagtatggaaaacagccatatgaacaaataaccacactataggtcttcagagctcaagtcctatcctaaatactgtgaaattaatgttctgtgaggttttgaaagtactagggccagagacaatatggctgcttggatgactttccatccaagttaacattcggccct

SEQ ID NO: 1242083 - DNA, 4001 bp, Homo sapiens; identical to SEQ ID NO: 1242082

SEQ ID NO: 1242084 - DNA, 4001 bp, Homo sapiens
tcttaagaattaccctctattgccccttgggccccctgtccccagaagcctggtcagccaagactcacatccccaggtggctggcaaccaccagaagtggctttctcagggacactgccatttgttttcctgttcctgttcgctcctgctggaactctagggctgtttttctgccaatattcttttaactgttggaaagaagagcagtaatactcatgagaaccgtcagcccctgcagccacatcctcctttacagtttttacaaaatacacttacacaccatctgatttaatgacaccaacaaccgtacaaggtgttgtcacactcatttagtgactgagaaggattgatatcatggctagaaaaaaaaaagaaaaaggcaatactggaactttgaaactcagtcttctgactccaagctctgaggttttgccaagaatcagcagctgccagggaccaaaaccagaggcagaggtagaaaagtaaacattaagtaggcaggaactgtatgccatgtggtttagagtcatacatcctcacacgtctgttagtgtgaagaagtgcaccagtacctctcaaactcttatatcaatgtgtcctcatggcagaaggcagcctttctcttaaatcagaatttatcagaaagaggacaacccaagcctcatttcagagagagggctggtatactcttagaaacctatgtgactgtcatccctaagtacattcatgttttttctcttgatctcaagagaatcaagggaaactgatgcttcagaaagatgtcccacatttatcctgtggcactcaaagtacccaaggttgagataatatgaggaagattcaaggtgtcaagttcagtttcccaagatctattccacagaagatgagcaaatgtcacttcagagaccactgactgaaggagagtctggtcccagaaccatggagaattagaatatgaggtggagaactcagaaaaaaatgttaaaatctctctggaaagtagaagcctgggagaaaaccaaatcaaacccattctctcattgccacccagagatactgtcaacgttttgagttcatgggggaagtgtaggcttttcccaccgtcaacatctgtaagggagtgaggcagcctggaacctcttgctcctaggtcccatagtctccattccccttccagctggaaatttgtgctgtgaccagaggaaccagaaacggggtgagaacgcttaggggactgggtcgtaagatcaaaggccagtcttgcagtaacagcagttactaggtggactgtgacatcacaacattccactcctcctggtcggggggagggaccatgtcagcaccatgtccaagtcgctgctccacgatgggggagggaagcacagggttgggacccagctccttggagacgccagcacaaagaacccagggaggtcgaccttgaggcagcaggaggggagggcacagtctgcagcagggagtcccaggagtcaccagtccaaagtcacccagggatgactggcgagggtggggcctggctccttggagatgagagcccaaagagcccagggagatcaagcttggggcggcaggagatgagggcccagtaatggagcgggaagccccaggactcacccacccaaagtcaccctggggtgattggcgagggcaaggactgggctgcttgctgaaggggtggggctgactgacaaaactttgatgggggtagcccagaggcaccggggtaggggggaccagtccagtgtgcctcaggagtcgtatagactctggcaggggtcttgtcatcagaggggatctgtggctgggttgagggtctatgacctagtgcgtttttacctttttcttggctgcagccaatttgttgtgttgagtttcttctgccatcgcagggtggggagggaggcagggttggggtcacagcagcaaaatctcaatgagaaccaatcaaggcctccagtcacctaccaggcagctgtgtgagtgagccagaggaggcgtaaccagggccccagtagaatgcggaataggggcgtggccttaatgctccaagcccattggtcaatgagaaagatgaaaaggaaagggggcgtggccagaaagcagtgtgtccagagggccctgtggctcacaaggaaagctgcccatggcaaccgctctccccacccactctaagagaggggagaggcctcccactctggaagagaagaggggccggcttttgctttaaaagctttaaaactttaaaaaatatatgtgtgtatactttatatatatgtgtgtctgtgtgtgtgtatctatgtttttctccttagctgtcttcattatccagcttctatgcaaggtctatgattttggcctatatttttcatctttgattacagtacaaaaattaccagtattaccttaactgagatacagatcctataaaaatggaaaatgcatagcatgcttgatgattaatgaagcagactatattatccaacattctaataagataaaataatcacaatgatttctcttttttggaaaaatgtttctcttattctcctgcgttttcgttaagattttttttcttaaacaagaaacatgtctaatatctgtaaaaacacaaagctttttgggcagggtgcagtggctcatgcctgtaattccaggactttgagagccccaggtgggtggatcatgaggtcaggagatcgagaccatcctggctaacacggtgaaatcccatctctactaaaaatacaaaaaaggccggatggggtggcaggcaactgtagtctcagctacttgggaggctgaggcaggagaatgacatgaaaccccgaggtggagcttgcagtgagccaagatcatgccgctgcactccagcctggctacagagcaagactccatctcaataaataaataaattaattaattaattaataaaaataaaaaattaatagtaagagcaatgtgaacaaaagttgtaataaaataatttagaaaatacaaactattaaaaaatagattttaaaacttgtgcaacaaagtcaaacagcacccaacgaaaatgtatacccttatatgtttgtttaaaaagcaatttaaattacattgatccactaaactgggaaaagcaaaacaaacaaaaagggggaaataattaagacataaggaaaaaggaaaaagaaaaaccactagatttaaaaaataaaactaaaggaggattctttcaaaagactgagataataaaacagtcaagcctctgataagtaatcaagataaagaaaactttgaagagaaaagggcatatagccacatgtgaatatgatgcaaaaagtgaaaactttacacatctttacaacaccttagaagtatggatgacatgttcatttttttttttttttttgagacggagtcttgctctgtcacccacgctggagtgcagtggcgtgatcttggctcactgcaagctccgcctcccgggttcacaacattctcctgcctcaacctcccgagtagctgggactacaggcgcccgccaccacgcctggctgattttttgtattttggcttagtagagacggggtttcaccatgttagccaggatggtctcgatctcctgacctcgtgatccacccgcctcggcctcccaaagtgctgggattacaggcatgagccatcgcacccggccaaagtgttcatttttttttttttaagaacctacagttatgaaaactaactggaaagaaatgggttttgggaaagattgagtacatttttgtgatgttcaacattattttttcttacagttttaaaaacacaattgatgtttctatcaatttgacttaaaaaaattaagaactatattaaaatttaccagcagaggggagtgaaggaacacaaagcaactttcagtttagggtaatttttgggcataaacagggcagcaatgtcctcaactctattcttctttattagccagtgaatccatg

SEQ ID NO: 1242085 - DNA, 4001 bp, Homo sapiens
taagaattaccctctattgccccttgggccccctgtccccagaagcctggtcagccaagactcacatccctaggtggctggcaaccaccagaagtggctttctcagggatactgccatttgttttcctgttcctgttcgctcctgctggaactctagggctgtttttctgccaatattcttttaactgttggaaagaagagcagtaatactcatgagaaccatcagcccctacagccacatcctcctttacagtttttacaaaatacacttacacaccatctgatttaatgacaccaacaactgtacaaggtgttgtcacactcatttagtgactgagaaggattgatatcatggctagaaaaaaaaaaaagaaaaaggcaatactggaactttgaaactcagtcttctgactccaagctctgaggttttgccaagaatcagcagctgccagggaccaaaaccagaggcagaggtagaaaagtaaacattaagtaggcaggaactgtatgccatgtggtttagagtcatacatcctcacacgtctgttagtgtgaagaagtgcaccagtacctctcaaactcttatatcaatgtgtcctcatggcagaaggcagcctttctcttaaatcagaatttatcagaaagaggataacccaagcctcatttcagagagaggtctggtatactcttagaaacctatgtgactgtcatccctaagtacattcatgttttttctcttgatctcaagagaatcaagggaaactgatgcttcagaaagatgtcccacatttatcctgtggcactcaaagtacccaaggttgagataatatgaggaagattcaaggtgtcaagttcagtttcccaagatctattccacagaagatgagcaaatgtcacttcagagaccactgactgaaggagagtctggtcccagaaccatggagaattagaatatgaggtggagaactcagaaaaaaatgttaaaatctctctggaaagtagaagcctgggagaaaaccaaaccaaacccattctctcattgccacccagagatactgtcaacgttttgagttcatgggggaagtgtaggcttttcccaccgtcaacatctgtaagggagtgaggcagcctggaacctcttcctcctaggtcccatagtctccattccccttccagctggaaatttgtgctgtgaccagaggaaccagaaacggggtgagaacgcttaggggactgggtcgtaagatcaaaggccagtcttgcagtaacggcagttactaggtggactgtgacatcacaacattccactcctcctggtcggggggagggaccatgtcagcaccatgtccaagtcgctgctccacgatgggggagggaagcacagggttgggacccagctccttggagacgccagcacaaagaacccagggaggtcgaccttgaggcagcaggaggggagggcacagtctgcagcagggagtcccaggagtcaccagtccaaagtcacccagggatgactggcgagggtggggcctggctccttggagatgagagcccaaagagcccagggagatcaagcttggggcggcaggagatgagggcccagtaatggagcgggaagccccaggactcacccacccaaagtcaccctggggtgattggcgagggcaaggactgggctgcttgctgaaggggtggggctgactgacaaaactttggtgggggtagcccagaggcaccggggtaggggggacgagtccagtgtgcctcaggagtcgtatagactctggcaggggtcttgtcatcagaggggatctgtggctgggttgaggggctatgacctagtgcgtttttacctttttcttggctgcagccaatttgttgtgttgagtttcttctgccatcgcagggtggggagggaggcagggttggggtcacagcagcaaaatctcaatgagaaccgatcaaggcctccagtcacctaccaggcagctgtgtgactgagccagaggaggcgtaaccagggccccagtagaatgcggaataggggcgtggccttaatgctccaagcccattggtcaatgagaaagatgaaaaggaaagggggcgtggccagaaagcagtgtgtccagagggacctgtggctcacaaggaaagctgcccatggcaaccgctctccccacccactctaagagaggggagaggcctcccactctggaagagaagaggggccggcttttgctttaaaagctttaaaactttaaaaaatatatgtgtgtatactttatatatatgtgtgtccgtgtgtgtgtatctatgtttttctccatagctgtcttcattatccagcttctatgcaaggtctatgattttggcctatattcttcatctttgattacagtacaaaaattaccagtattaccttaactgagatacagatcctataaaaatggaaaatgcatagcatgcttgatgattaatgaagcagactatattatccaacattctaataagataaaataatcacaatgatttctcttttttggaaaaatgtttcttttattctcctacgttttcattaagatttttttttcttaaacaagaaacatgtctaatatctgtaaaaacacaaagcttttgggccgggtgcagtggctcatgcctgtaattccaggactttgagagcccaaggtgggtggatcatgaggtcaggagatcgagaccatcctggctaacacggtgaaatcccatctctactaaaaatacaaaaaaggccggatgtggtggcaggcaactgtagtctcagctacttgggaggctgaggcaggagaatgacatgaacccccgaggtggagcttgcagtgagccaagatcatgccgctgcactccagcctggctacagagcaagactccatctcaataaataaataaattaattaattaattaataaaaataaaaaattaatagtaagagcaatgtgaacaaaagttgtaataaaataatttagaaaatacaaactattaaaaaatagattttaaaacttgtgcaacaaagtcaaacagcacccaacgaaaatgtatacccttacatgtttgtttaaaaagcaatttaaattacattgatccactaaactgggaaaagcaaaacaaacaaaaagggggaaataattaagacataaggaaaaaggaaaaagaaaaaccactagatttaaaaaataaaactgaaggaggattctttcaaaagactgagataataaaacagtcaagcctctgataagtaatcaagataaagaaaactttgaagagaaaagggcatatagccacatgtgaatatgatgcaaaaagtgaaaactttacacatctttacaacaccttagaagtatggatgacatgttcattttttttttttttttttttgagacggagtcttgctctgtcacccacgctggagtgcagtggcgtgatcttggctcactgcaagctccgcctcccgggttcacaacattctcctgcctcaacctcccgagtagctgggactacaggcgcccgccaccacgcctggctaattttttgtattttggcttagtagagacggggtttcaccatgttagtcaggatggtctcgatctcctgacctcgtgatccacccgcctcggcctcccaaagtgctgggattacaggcatgagccatcgcacccggccaaagtgttcattttttttttttttaagaacctacagttatgaaaactaactggaaagaaatgggttttgggaaagattgagtacatttttgtgatgttcaacattattttttcttacagttttaaaaacacaattgatatttctatcaatttgacttaaaaaaattaagaactatattaaaatttaccagcagaggggagtgaaggaacacaaagcaactttcagtttagggtaatttttgggcataaacagggcagcactgtcctcaactctattcttctttattagccagtgaatcc

SEQ ID NO: 1242086 - DNA, 4001 bp, Homo sapiens
aacaattaccctctattgccccttgggccccctgtccccagaagcctggtcagccaagactcacatccccaggtggctggcaaccaccagaagtggctgtctgagggatactgccatttgttttcctgttcctgttcgctcctgctggaactctagggctgtttttctgccaatattcttttaactgttggaaagaagagcagtaatactcatgagaaccgtcagcccctacagccacatcctcctttacagtttttacaaaatacacttacacactatctgatttaatgacaccaacaactgtacaaggtgttgtcacactcatttagtgactgagaaggattgatatcatggctagaaaaaaaaaaagaaaaaggcaatactggcactttgaaactcagtcttctgactccaagctctgaggttttgccaagaatcagcagctgccagggaccaaaaccagaggcagaggtagaaaagtaaacattaagtaggcaggaactgtatgccatgtggtttagagtcatacatcctcacacgtctgttagtgtgaagaagtgcaccagtacctctcaaacttttatatcaatgtgtcctcacggcagaaggcagcctttctcttaaatcagaattcatcagaaagaggacaacccaagcctcatttcagagagagggctggtatactcttagaaacctatgtgactgtcatccctaagtatattcatgttttttctcttgatctcaagagaatcaagggaaactgatgcttcagaaagatgtcccacatttatcctgtggcactcaaagtacccaaggttgagataatatgaggaagattcaaggtgtcaagttcagtttcccaagatctattccacagaagatgagcaaatgtcacttcagagaccactgactgaaggagagtctggtcccagaaccatggagaattagaatatgaggtggagaactcagaaaaaaaatgttaaaatctctctggaaagtagaagcctgggagaaaaccaaaccaaacccattctctcattgccacccagagatactgtcaatgttttgagttcatgggggaagtgtaggcttttcccaccgtcaacatctgtaagggagtgaggcagcctggaacctcttgctcctaggtcccatagtctccattccccttccagctggaaatttgtcctgtgaccagaggaaccagaaacggggtgagaacgcttaggggactgggtcataagatcaaaggccagtcttgcagtaacggcagttactaggtgggctgtgacatcacaacattccaatcctcctggtcagggggagggaccgtgtcagcaccatgtctaagtcgccgctccacgatgggggagggaagcacagggttgggacccagctccttggagacgccagcacaaagaacccagggaggtcgaccttgaggcagcaggaggggagggcagagtctgcagcagggagtcccaggagtcaccagcccaaagtcacccagggatgattggcgagggtggggcctggctccttggagatgagagcccaaagagcccagggagatcaagcttggggcggcaggagatgagggcccagtaacggagcgggaagtcccaggagtcacccacccaaagtcaccctggggtgattggcgagggcaaggactgggctgctttctgaaggggtggggctgactgacaaaactttgatgggggtagcccaaggcaccggggttggggggaacagtccagtgtgcctcaggagtcgtatagactctggcaggggtcttgtcatcagaggggatctgtggctgggttgaggggctatgacctagtgcgtttttacctttttcttggctgcagccaatttgttgtgttgagtttcttctgccatcgcagggtggggagggaggcagggttggggccacagcagcaaaatcgcaatgagaaccgatcaaggcctccagtcaccttccaggcagctgtgtgactgagccagaggaggcgtaaccagggccccagtagaatgcggaataggggcgtggccttaatgctccaagcccattggtcaatgagaaagatgaaagggaaagggggcgtggccagacagcagcgtgtccagagggccctgtggctcacaaggaaagctgcccatgcgaccgctctccgcacccactctaagagaggggagaggcctcccactctggaagagaagaggggccagcttttgctttaacagctttaaaactttaaaaaatatatgtgtgtatactttatatatatatgtgtgtccgtgtgtgtgtatctgtgtttttctctatagctgtcttcattatccagcttctatgcaaggtctatgattttggcctacatttttcatctttgattacagtataaaaattaccagtattatcttaactgagatacagatcctataaaaatggaaaatgcatagcatgcttgatgattaatgaagcagactatattatccaacattctaataagataaaataatcacaatgatttctcttttttggaaaaatgtttctcttattctcctacgttttcgttaagattttttttcttaaacaagaaacatgtctaatatctgtaaaaacacaaagcttttgggccgggtgcagtggctcatgcctgtaattccaggactttgagagcccaaggtgggtggatcatgacgtcaggagatcgagaccatcctggctaacacggtgaaaccccatctctactaaaaatacaaaaaaggccggatgtggtggcaggcagctgtagtctcagctacttgggaggctgaggcaggagaatgacatgaacccccgaggtggagcttgcagtgagccaagatcatgctgctgcactccagcctgggctacagagcaagactccatctcaattaattaattaatttatttatttattaataaaaataaaaaattaatagtaagagcaatgtgaacaaaagatgcaataaaataatttagaaaatacaaactattaaaaaatagattttaaaacttgtgcaacaaagtcaaacagcacccaacgaaaatgtatacccttacatgtttgtttaaaaagcaatttaaattacattgatccactaaactaggaaaagcaaaacaaacaaaaagggggaaataattaagacataaggaaaaaggaaaaagaaaaaccactagatttaaaaaataaaactgaaggaggattctttcaaaagactgaggaaaataaaacagtcaaacctctgataagtaatcaagataaagaaaactttgaagagaaaagggcatatagccacatgtgaatatgatgcaaaaagtgaaaactttacacatctttacaacaccttagaagtatggatgacatgttcattttttttttttttttttttttgagacggagtctcgctctgtcacccacgctggagtgcagtggcgtgatcttggctcactgcaagctccacctcccgggttcacaacattctcctgcctcaacctcctgagtagctgggactacaggcgcccgccaccacgcctggctaattttttgtattttggcttagtagagacggggtttcaccatgttagccaggatggtctcaatctcctgacctcgtgatccacccgcctcggcctcccaaagtgctgggattacaggcatgagccgtcgcacccggccaaagtgctcatttttttttaagaacctacagttacgaaaactaactgaagaagtgggaaatctggagaccaatatgcagaagaaggaaaaagacaaagactcatcctccaaattggatatttatttaaaccagaatttgtcagcctcagcaatattgatatattgggccagataattctttgtggagggttctcctggtgtgttgtcgggcatttagtaacattccctctacccacagaatgccaataagacctcccgaccatgaccagttgtgaccacaaaaatgtctccagatat

SEQ ID NO: 1242087 - DNA, 4001 bp, Homo sapiens
taacaattaccctctactgccccttgggccccctgtccccagaagcctggtcagccaagactcacatccctaggtggctggcaaccaccagaagtggctttctcagggatactgccatttgttttcctgttcctgttcgctcctgctggaactctagggctgtttttctgccaatattcttttaactgttggaaagaagagcagtaatactcatgagaaccgtcagcccctacagccacatcctcctttacagtttttacaaaatacacttacacaccatctgatttaatgacaccaacaactgtacaaggtgttgtcacactcatttagtgactgagaaggattgatatcatggctagaaaaaaaaaaagaaaaaggcaatactggaactttgaaactcagtcttctgactccaagctctgaggttttgccaagaatcagcagctgccagggaccaaaaccagaggcagaggtagaaaagtaaacattaagtaggcaggaactgtatgccatgtggtttagagtcatacatcctcacacgtctgttagtgtgaagaagtgcaccagtacctctcaaactcttatatcaatgtgtcctcatggcagaaggcagcctttctcttaaatcagaatttatcagaaagaggacaacccaagcctcatttcagagagaggtctggtatactcttagaaacctatgtgactgtcatccctaagtacattcatgttttttctcttgatctcaagagaatcaagggaaactgatgcttcagaaagatgtcccacatttatcctgtggcactcaaagtacccaaggttgagataatatgaggaagattcaaggtgtcaagttcagtttcccaagatctattccacagaagatgagcaaatgtcacttcagagaccactgactgaaggagagtctggtcccagaaccatggagaattagaatatgaggtggagaactcagaaaaaaatgttaaaatctctctggaaagtagaagcctgggagaaaaccaaaccaaacgcattctctcattgccacccagagatactgtcaacgttttgagttcatgggggaagtgtaggcttttcccaccgtcaacatctgtaagggagtgaggcagcctggaacctcttgctcctaggtcccatagtctccattccccttccagctggaaatttgtgctgtgaccagaggaaccagaaacggggtgagaacgcttaggggactgggtcgtaagatcaaaggccagtcttgcagtaacagcagttactaggtggactgtgacatcacaacattccactcctcctggtcggggggagggaccatgtcagcaccatgtccaagtcgctgctccacgatgggggagggaagcacagggttgggacccagctccttggagacgccagcacaaagaacccagggaggtcgaccttgaggcagcaggaggggagggcacagtctgcagcagggagtcccaggagtcaccagtccaaagtcacccagggatgactggcgagggtggggcctggctccttggagatgagagcccaaagagcccagggagatcaagcttggggcggcaggagatgagggcccagtaatggagcgggaagccccaggactcacccacccaaagtcaccctggggtgattggcgagggcaaggactgggctgcttgctgaaggggtggggctgactgacaaaactttggtgggggtagcccagaggcaccggggtaggggggaccagtccagtgtgcctcaggagtcgtatagactctggcaggggtcttgtcatcagaggggatctgtggctgggttgaggggctatgacctagtgcgtttttacctttttcttggctgcagccaatttgttgtgttgagtttcttctgccatcgcagggtggggagggaggcagggttggggtcacagcagcaaaatctcaatgagaaccgatcaaggcctccagtcacctaccaggcagctgtgtgactgagccagaggaggcgtaaccagggccccagtagaatgcggaataggggcgtggccttaatgctccaagcccattggtcaatgagaaagatgaaaaggaaagggggcgtggccagaaagcagtgtgtccagagggacctgtggctcacaaggaaagctgcccatggcaactgctctccccacccactctaagagaggggagaggcctcccactctggaagagaagaggggccggcttttgctttaaaagctttaaaactttaaaaaatatatgtgtgtatactttatatatatgtgtgtccgtgtgtgtgtatctatgtttttctccatagctgtcttcattatccagcttctatgcaaggtccatgattttggcctatatttttcatctttgattacagtacaaaaattaccagtattaccttaactgagatacagatcctataaaaatggaaaatgcatagcatgcttgatgattaatgaagcagactatattatccaacattctaataagataaaataatcacaatgatttctcttttttggaaaaatgtttctcttattctcctacgttttcgttaagattttttttcttaaacaagaaacatgtctaatatctgtaaaaacacaaagctttttgggcagggtgcagtggctcatgcctgtaattccaggactttgagagcccaaggtgggtggatcatgaggtcaggaaatcgagaccatcctggctaacacggtgaaaccccatctctactaaaaatacaaaaaaggccggacatggtggcaggcacctgtagtctcagctacttgggaggctgaggcaggagaatgacatgaacctctgaggtggagcttgcagtgagccaagatcatgccgctgctctccagcctggctacagagcaagactccatctaataattaaataaataaattaattaattaataaaaataaaaaattaatagtaagagcaatgtgaacaaaagatgcaataaaataatttagaaaatacaagctattaaaaaaaagattttaaaacttgtgcaacaaagtcaaacagcacccaacgaaaatgtatacccttacatgtttgtttaaaaagcaatttaaattacattgatccactaaactaggaaaagcaaagcaaacaaaaagggggaaataattaagacctaaggaaaaaggaaaaagaaaaaccactagatttaaaaaataaaactaaaggaggattctttcaaaagactgagataataaaacagtcaagcctctgataagtaatcaagataaagaaaactttgaagagaaaagggcatatagccacatgtgaatatgatgcaaaaagtgaaaactttacacatctttacaacaccttagaagtatggatgacatgttcatttttttttttttttttttttgtttgagatggagtctcgctctgtcacccacgctggagtgcagtggcgcgatcttggctcactgcaagctccgcctcccgggttcacaacattctcctgcctcaacctcctgagtagctgggactacaggcgcccgccaccacgcctggctaattttttgtattttggcttagtagagacagggtttcaccatgttagccaggatggtctttatctcctgatctcgtgatccacctgcctcggcctcccaaagtgctgggattacaggcatgagccattgcacccggccaaagttttcatttttttttttaagattctacagtcacaaaaactaactgaagaagtggaaaatctggagaccaatacgcagaagaaggaaaaagacaaagactcatcctccaaattggatatttatttaaaccagaatttgtcagcctcagcaatactgatatatttggccagataattctttgtggagggttctcctggtgtgttgtcggacatttagtaacattccctctacccacagaatgccaataagacctcccgaccttgaccagttgtaaccacaaaaatgtctccaga

SEQ ID NO: 1242088 - DNA, 4001 bp, Homo sapiens
agaattaccctctattgccccttgggccccctgtccccagaagcctggtcagccaagactcacatccctaggtggctggcaaccaccagaagtggctttctcagggatactgccatttgttttcctgttcctgttcgctcctgctggaactctagggctgtttttctgccaatattcttttaactgttggaaagaagagcagtaatactcatgagaaccatcagcccctacagccacatcctcctttacagtttttacaaaatacacttacacaccatctgatttaatgacaccaacaactgtacaaggtgttgtcacactcatttagtgactgagaaggattgatatcatggctagaaaaaaaaaaaagaaaaaggcaatactggaactttgaaactcagtcttctgactccaagctctgaggttttgccaagaatcagcagctgccagggaccaaaaccagaggcagaggtagaaaagtaaacattaagtaggcaggaactgtatgccatgtggtttagagtcatacatcctcacacgtctgttagtgtgaagaagtgcaccagtacctctcaaactcttatatcaatgtgtcctcatggcagaaggcagcctttctcttaaatcagaatttatcagaaagaggataacccaagcctcatttcagagagaggtctggtatactcttagaaacctatgtgactgtcatccctaagtacattcatgttttttctcttgatctcaagagaatcaagggaaactgatgcttcagaaagatgtcccacatttatcctgtggcactcaaagtacccaaggttgagataatatgaggaagattcaaggtgtcaagttcagtttcccaagatctattccacagaagatgagcaaatgtcacttcagagaccactgactgaaggagagtctggtcccagaaccatggagaattagaatatgaggtggagaactcagaaaaaaatgttaaaatctctctggaaagtagaagcctgggagaaaaccaaaccaaacccattctctcattgccacccagagatactgtcaacgttttgagttcatgggggaagtgtaggcttttcccaccgtcaacatctgtaagggagtgaggcagcctggaacctcttcctcctaggtcccatagtctccattccccttccagctggaaatttgtgctgtgaccagaggaaccagaaacggggtgagaacgcttaggggactgggtcgtaagatcaaaggccagtcttgcagtaacggcagttactaggtggactgtgacatcacaacattccactcctcctggtcggggggagggaccatgtcagcaccatgtccaagtcgctgctccacgatgggggagggaagcacagggttgggacccagctccttggagacgccagcacaaagaacccagggaggtcgaccttgaggcagcaggaggggagggcacagtctgcagcagggagtcccaggagtcaccagtccaaagtcacccagggatgactggcgagggtggggcctggctccttggagatgagagcccaaagagcccagggagatcaagcttggggcggcaggagatgagggcccagtaatggagcgggaagccccaggactcacccacccaaagtcaccctggggtgattggcgagggcaaggactgggctgcttgctgaaggggtggggctgactgacaaaactttggtgggggtagcccagaggcaccggggtaggggggacgagtccagtgtgcctcaggagtcgtatagactctggcaggggtcttgtcatcagaggggatctgtggctgggttgaggggctatgacctagtgcgtttttacctttttcttggctgcagccaatttgttgtgttgagtttcttctgccatcgcagggtggggagggaggcagggttggggtcacagcagcaaaatctcaatgagaaccgatcaaggcctccagtcacctaccaggcagctgtgtgactgagccagaggaggcgtaaccagggccccagtagaatgcggaataggggcgtggccttaatgctccaagcccattggtcaatgagaaagatgaaaaggaaagggggcgtggccagaaagcagtgtgtccagagggacctgtggctcacaaggaaagctgcccatggcaaccgctctccccacccactctaagagaggggagaggcctcccactctggaagagaagaggggccggcttttgctttaaaagctttaaaactttaaaaaatatatgtgtgtatactttatatatatgtgtgtccgtgtgtgtgtatctatgtttttctccatagctgtcttcattatccagcttctatgcaaggtctatgattttggcctatattcttcatctttgattacagtacaaaaattaccagtattaccttaactgagatacagatcctataaaaatggaaaatgcatagcatgcttgatgattaatgaagcagactatattatccaacattctaataagataaaataatcacaatgatttctcttttttggaaaaatgtttcttttattctcctacgttttcattaagatttttttttcttaaacaagaaacatgtctaatatctgtaaaaacacaaagcttttgggccgggtgcagtggctcatgcctgtaattccaggactttgagagcccaaggtgggtggatcatgaggtcaggagatcgagaccatcctggctaacacggtgaaatcccatctctactaaaaatacaaaaaaggccggatgtggtggcaggcaactgtagtctcagctacttgggaggctgaggcaggagaatgacatgaacccccgaggtggagcttgcagtgagccaagatcatgccgctgcactccagcctggctacagagcaagactccatctcaataaataaataaattaattaattaattaataaaaataaaaaattaatagtaagagcaatgtgaacaaaagttgtaataaaataatttagaaaatacaaactattaaaaaatagattttaaaacttgtgcaacaaagtcaaacagcacccaacgaaaatgtatacccttacatgtttgtttaaaaagcaatttaaattacattgatccactaaactgggaaaagcaaaacaaacaaaaagggggaaataattaagacataaggaaaaaggaaaaagaaaaaccactagatttaaaaaataaaactgaaggaggattctttcaaaagactgagataataaaacagtcaagcctctgataagtaatcaagataaagaaaactttgaagagaaaagggcatatagccacatgtgaatatgatgcaaaaagtgaaaactttacacatctttacaacaccttagaagtatggatgacatgttcattttttttttttttttttttgagacggagtcttgctctgtcacccacgctggagtgcagtggcgtgatcttggctcactgcaagctccgcctcccgggttcacaacattctcctgcctcaacctcccgagtagctgggactacaggcgcccgccaccacgcctggctaattttttgtattttggcttagtagagacggggtttcaccatgttagtcaggatggtctcgatctcctgacctcgtgatccacccgcctcggcctcccaaagtgctgggattacaggcatgagccatcgcacccggccaaagtgttcattttttttttttttaagaacctacagttatgaaaactaactggaaagaaatgggttttgggaaagattgagtacatttttgtgatgttcaacattattttttcttacagttttaaaaacacaattgatatttctatcaatttgacttaaaaaaattaagaactatattaaaatttaccagcagaggggagtgaaggaacacaaagcaactttcagtttagggtaatttttgggcataaacagggcagcactgtcctcaactctattcttctttattagccagtgaatccat

SEQ ID NO: 1242089 - DNA, 4001 bp, Homo sapiens
taacaattaccctctattgccccttgggccccctgtccccagaagcctggtcagccaagactcacatccccaggtggctggcaaccaccagaagtggctgtctgagggatactgccatttgttttcctgttcctgttcgctcctgctggaactctagggctgtttttctgccaatattcttttaactgttggaaagaagagcagtaatactcatgagaaccgtcagcccctacagccacatcctcctttacagtttttacaaaatacacttacacaccatctgatttaatgacaccaacaactgtacaaggtgttgtcacactcatttagtgactgagaaggattgatatcatggctagaaaaaaaaaaagaaaaaggcaatactggaactttgaaactcagtcttctgactccaagctctgaggttttgccaagaatcagcagctgccagggaccaaaaccagaggcagaggtagaaaagtaaacattaagtaggcaggaactgtatgccatgtggtttagagtcatacatcctcacacgtctgttagtgtgaagaagtgcaccagtacctctcaaacttttatatcaatgtgtcctcacggcagaaggcagcctttctcttaaatcagaattcatcagaaagaggacaacccaagcctcatttcagagagagggctggtatactcttagaaacctatgtgactgtcatccctaagtatattcatgttttttctcttgatctcaagagaatcaagggaaactgatgcttcagaaagatgtcccacatttatcctgtggcactcaaagtacccaaagttgagataatatgaggaagattcaaggtgtcaagttcagtttcccaagatctattccacagaagatgagcaaatgtcacttcagagaccactgactgaaggagagtctggtcccagaaccatggagaattagaatatgaggtggagaactcagaaaaaaatgttaaaatctctctggaaagtagaagcctgggagaaaaccaaaccaaacccattctctcattgccacccagagataccgtcaatgttttgagttcatgggggaagtgtaggcttttcccaccgtcaacatctgtaagggagtgaggcagcctggaacctcttgctcctaggtcccatagtctccattccccttccagctggaaatttgtcctgtgaccagaggaaccagaaacgaggtgagaacgcttaggggactgggtcataagatcaaaggccagtcttgcagtaacggcagttactaggtgggctgtgacatcacaacattccactcctcctggtcggggggagggaccatgtcagcaccatgtctaagtcgctgctccacgatgggggagggaagcacagggttgggacccagctccttggagacgccagcacaaagaacccagggaggtcgaccttgaggcagcaggaggggagggcagagtctgcagcagggagccccaggagtcaccagcccaaagtcacccagggatgattggcgagggtggggcctggctcctcagagatgagagcccaaagagcccagggagatcaagcttggggcggcaggagatgagggcccagtaacggagcgggaagccccaggagtcacccacccaaagtcaccctggggtgattggcgagggcaaggactgggctgctttctgaaggggtggggctgactgacaaaactttgatgggggtagcccaaggcaccggggttggggggaccagtccagtgtgcctcaggagtcgtatagactctggcaggggtcttgtcatcagaggggatctgtggctgggttgaggggctatgacctagtgcgtttttacctttttcttggctgcagccaatttgttgtgttgagtttcttctgccatcgcagggtggggagggaggcagggttggggccacagcagcaaaatcgcaatgagaaccgatcaaggcctccagtcaccttccaggcagctgtgtgactgagccagaggaggcgtaaccagggccccagtagaatgcggaataggggtgtggccttaatgctccaagcccattggtcaatgagaaagatgaaagggaaagggggcgtggccagacagcagcgtgtccagagggccctgtggctcacaaggaaagctgcccatgcgaccgctctccgcacccactctaagagaggggagaggcctcccactctggaagagaagaggggccagcttttgctttaacagctttaaaactttaaaaaatatatgtgtgtatactttatatatatgtgtgtccgtgtgtgcgtatctatgtttttctccatagctgtcttcattatccagcttctatgcaaggtctatgattttggcctacatttttcatctttgattacagtacaaaaattaccagtattatcttaactgagatacagatcctataaaaatggaaaatgcatagcatgcttgatgattaatgaagcagactatattatccaacattctaataagataaaataatcacaatgatttctcttttttggaaaaatgtttctcttattctcctatgttttcgttaagattttttttcttaaacaagaaacatgtctaatatctgtaaaaacacaaagcttttgggccgggtgcagtggctcatgcctgtaattccaggactttgagagcccaaggtgggtggatcatgaggtcaggagatcgagaccatcctggctaacacggtgaaaccccatctctactaaaaatacaaaaaaggccggatgtggtggcaggcagctgtagtctcagctacttgggaggctgaggcaggagaatgacatgaacccccgaggtggagcttgcagtgagccaagatcatgccgctgtactccagcctgggctacagagcaagactccatctcaattaattaattaatttatttatttattaataaaaataaaaaattaatagtaagagcaatgtgaacaaaagatgcaataaaataatttagaaaatacaagctattaaaaaatagattttaaaacttgtgcaacaaagtcaaacagcacccaacgaaaatgtatacccttacatgtttgtttaaaaagcaatttaaattacattgatccactaaactaggaaaagcaaagcaaacaaaaagggagaaataattaagacgtcaggaaaaaggaaaaagaaaaaccactagatttaaaaaacaaaactgaaggaggattctttcaaaagactgagataataaaacagtcaagcctctgataagtaatcaagataaagaaaactttgaagagaaaagggcatatagccacatgtgaatatgatgcaaaaagtgaaaactttacacatctttacaacaccttagaagtatggatgacatgttctttttttttttttttttttttgagacggagtcttgctctgtcacccacgctggagtgcagtggcgtgatcttggctcacttgcaagctccacctcccgggttcacaacattctcctgcctcaacctcccgagtagctgtgactacaggcgcccgccaccacgcctggctaattttttgtattttggcttagtagagacggggtttcaccatgttagccaggatggtctcgatctcctgacctcgtgatccacccgcctcggcctcccaaagtgctgggattacaggcatgagccatcgcacccggccaaagtgttcatttttttttaagaacctacagttacgaaaactaactgaagaagtgggaaatctggagaccaatatgcagaagaaggaaaaagacaaagactcatcccccaaattgggtatttatttaaaccagaatttgtcagcctcagcaatattgatatattgggccagataattctttgtggagggttctcctggtgtgttgtcgggcatttagtaacattccgtctacccacagaatgccaataagacctcccgaccatgaccagtggtgaccacaaaaatgtctccagatatttcc

SEQ ID NO: 1242090 - DNA, 4001 bp, Homo sapiens; identical to SEQ ID NO: 1242084

SEQ ID NO: 1242091 - DNA, 4001 bp, Homo sapiens
atcttaagaattaccctctattgccccttgggccccctgtccccagaagcctggtcagccaagactcacatccccaggtggctggcaaccaccggaagtggctgtctcagggatactgccatttgttttcctgttcctgttcactcctgctggaactctaggtctgtttttctgccaatattcttttaactgttggaaagaagagcagtaatattcatgagaaccgtcagcccctacagccacaacctcctttacagtttttacaaaatacacttacacaccgtctgatttaatgacaccaacaactgtacaaggtgttgtcacactcatttagtgactgagaaggattgatatcatggctagaaaaaaaaaagaaaaaggcaatactggaactttgagactcagtcttctgactccaagctctgaggttttgccaagaatcagcagctgccagggaccaaaaccagaggcagaggtagaaaagtaaacattaagtaggcaggaactgtatgccatgtggtttagtcatacatcctcacacgtctgttagtgtgaagaagtgcaccagtacctctcaaacttttatatcaatgtgtcctcatggcagaaggcagcctttctcttaaatcagaatttatcagaaagaggacaacccaagcctcatttcagagagaggtctggtatactcttagaaacctatgtgactgtcatccctaagtacattcatgttttttctcttgatctcaagagaatcaagggaaactgatgcttcagaaagatgtcccacatttatcctgtggcactcaaagtacccaaggttgagataatatgaggaagattcaaggtgtcaagttcagtttcccaagatctattccacagaagatgagcaaatctcacttcagagaccactgactgaaggagagtctggtcccagaaccatggagaattagaatatgaggtggagaactcagaaaaaaatgttaaaatctctctggaaagtagaagcctgggagaaaaccaaatcaaacccattctctcattgccacccagagatactgtcattgttttgagttcatgggggaagtgtaggcttttcccaccgtcaacatctgtaagggagtgaggcagcctggaacctcttgctcctaggtcccatagtctccattccccttccagctggaaatttgtgctgtgaccagaggaaccagaaacggggtgagaacgcttaggggactgggtcgtaaggtcaaaggccagtcttgcagtaacggcagttactaggtggactgtgacatcacaacattccactcctcctggtcggggggagggaccatgtcagcaccatgtccaagtcgctgctccacgatgggggagggaagcacagggttgggacccagctccttggagacgccagcacaaagaacccagggaggtcgaccttgaggcagcaggaggggagggcacagtctgcagcagggagtcccaggagtcaccagcccaaagtcacccaaggatgactggcgagggtggggcctggctccttggagatgagagcccaaagagcccacggagatcaagcttggggcggcaggagatgacggcccagtaatggagcgggaagccccaggagtcacccacccaaagtcaccctggggtgattggcgagggcaaggactgggctgctttctgaaggggtggggctgactgacaaaactttggtgggggtagcccaaggcaccggggttggggggaccagtccagtgtgcctcaggagtcgtatagactctggcaggggtcttgtcatcagaggggatctgtggctgggttgaggggctatgacctagtgcgtttttacctttttcttggctgcagccaatttgttgtgttgagtttcttctgccatcgcagggtggggagggaggaagggttggggccacagcagcaaaatcccaataagaaccgatcaaggcctccagtcacctaccaggcagctgtgtgactgagccagaggaggcgtaaccagggccccagtagaatgcggaataggggcgtggccttaatgctccaagcccattggtcaatgagaaagatgaaagggaaagggcgtggccagacagcagcgtgtccagagggccctgtggctcacaaggaaagctgcccatggcaaccgctctccccacccactctaagagaggggagaggcctcccactctggaagagaagaggggctggcttttgctttaaaagctttaaaactttaaaaaatatatgtgtgtatactttatatatatatgtgtgtccgtgtgtgtatctatgtttttctccatagctgtcttcattatccagcttctatgcaaggtctatgattttggcctatatttttcatctttgattacagtacaaaaattaccagtattaccttaactgagatacagatcctataaaaatggaaaatgcatagcatgcttgatgattaatgaagcagactatattatccaacattctaataagataaaataatcacaatgatttctcttttttggaaaaatgtttctcttattctcctacgttttcgttaagattttttttcttaaacaagaaacatgtctaatatctgtaaaagcacaaagcttttgggctgggtgcagtggctcatgcctgtaattccaggactttgagagcccaaggtgggtggatcatgaggtcaggagatcgagaccatcctggctaacacggtgaaaccccatctctactaaaaatacaaaaaaggctggatgtggtggcaggcagctgtagtctcagctacttgggaggctgaggcaggagaatgacatgaacccccgaggtggagcttgcagtgagccaagatcatgccactgcactccagcctgggctacagagcaagactccatctcaattaattaattaattaattaaaataaaaaattaatagtaagagcaatgtgaacaaaagatgcaataaaataatttagaaaatacaaactattaaaaaatagattttaaaacttgtgcaacgaagtcaaacagcagccaacgaaaatgtatacccttacacgtttgtttaaaaagcaatttaaattacattgatccactaaactaggaaaagcaaaacaaacaaaaagggggaaataattaagacctaaggaaaaaggaaaaagaaaaaccactagatttaaaaaataaaactaaaggaggattctttcaaaagactgagataataaaacagtcaagcctctgataagtaatcaagataaagaaaactttgaagagaaaagggcatatagccacatgtgaatatgatgcaaaaagtgaaaactttacacatctttacaacaccttagaagtatggatgacatgttcatttttttttttttttttttttgagacggagtctcgctctgtcacccacgctggagtgcagtggcgtgatcttggctcactgcaagctccgcctcccgggttcacaacattctcctgcctcaacctcccgagtagctgggactacaggcgcccgccaccacgcctggctaattttttgtattttggcttagtagagacagggtttcaccatgttagccaggatggtctcgatctcctgacctcgtgatccacccgcctcggcctcccaaagtgctgggattacaggcatgagccatcgcacccatccaaagtgttcatttttttttaagaacctacagttacgagaagtaactgaagaagtgggaaatctggagaccaatatgcagaagaaggaaaaagacaaagactcatcctccaaattggatatttaaaccagaatttgtcatcctcagcaatattgatatattgggccagataattctttgtggagggttctcttggtgtgttgtcgggcatttagtaacattccctctacccacagaatgccaatgagacctcccgaccatgaccagttgtgaccacaaaaatgtctccagatatttccaaacgtcccataggag

SEQ ID NO: 1242092 - DNA, 4001 bp, Homo sapiens
tcttaagaattaccctctattgccccttgggccccctgtccccagaagcctggtcagccaagactcacatccccaggtggctggcaaccaccggaagtggctgtctcagggatactgccatttgttttcctgttcctgttcactcctgctggaactctaggtctgtttttctgccaatattcttttaactgttggaaagaagagcagtaatattcatgagaaccgtcagcccctacagccacaacctcctttacagtttttacaaaatacacttacacaccatctgatttaatgacaccaacaactgtacaaggtgttgtcacactcatttagtgactgagaaggattgatatcatggctagaaaaaaaaaagaaaaaggcaatactggaactttgagactcagtcttctgactccaagctctgaggttttgccaagaatcagcagctgccagggaccaaaaccagaggcagaggtagaaaagtaaacattaagtaggcaggaactgtatgccatgtggtttagtcatacatcctcacacgtctgttagtgtgaagaagtgcaccagtacctctcaaacttttatatcaatgtgtcctcatggcagaaggcagcctttctcttaaatcagaatttatcagaaagaggacaacccaagcctcatttcagagagaggtctggtatactcttagaaacctatgtgactgtcctccctaagtacattcatgttttttctcttgatctcaagagaatcaagggaaactgatgcttcagaaagatgtcccacatttatcctgtggcactcaaagtacccaaggttgagataatatgaggaagattcaaggtgtcaagttcagtttcccaagttctattccacagaagatgagcaaatctcacttcagagaccactgactgaaggagagtctggtcccagaaccatggagaattagaatatgaggtggagaactcagaaaaaaatgttaaaatctctctggaaagtagaagcctgggagaaaaccaaatcaaacccattctctcattgccacccagagatactgtcaatgttttgagttcatgggggaagtgtaggcttttcccaccgtcaacatctgtaagggagtgaggcagcctggaacctcttgctcctaggtcccatagtctccattccccttccagctggaaatttgtgctgtgaccagaggaaccagaaacggggtgagaacgcttaggggactgggtcgtaaggtcaaaggccagtcttgcagtaacggcagttactaggtggactgtgacatcacaacattccactcctcctggtcggggggagggaccatgtcagcaccatgtccaagtcgctgctccacgatgggggagggaagcacagggttgggacccagctccttggagacgccagcacaaagaacccagggaggtcgaccttgaggcagcaggaggggagggcacagtctgcagcagggagtcccaggagtcaccagcccaaagtcacccaaggatgactggcgagggtggggcctggctccttggagatgagagcccaaagagcccacggagatcaagcttggggcggcaggagatgacagcccagtaatggagcgggaagccccaggagtcacccacccaaagtcaccctggggtgattggcgagggcaaggactgggctgctttctgaaggggtggggctgactgacaaaactttggtgggggtagcccaaggcaccggggttggggggaccagtccagtgtgcctcaggagtcatatagactctggcaggggtcttgtcatcagaggggatctgtggctgggttgaggggctatgacctagtgcgtttttacctttttcttggctgcagccaatttgttgtgttgagtttcttctgccattgcagggtggggagggaggaagggttggggccacagcagcaaaatcccaataagaaccgatcaaggcctccagtcacctaccaggcagctgtgtgactgagccagaggaggcgtaaccagggccccagtagaatgcggaataggggcgtggccttaatgctccaagcccattggtcaatgagaaagatgaaagggaaagggggcgtggccagacagcagcgtgtccagagggccctgtggctcacaaggaaagctgcccatggcaaccgctctccccacccactctaagagaggggagaggcctcccactctggaagagaagaggggctggcttttgctttaaaagctttaaaactttaaaaaatatatgtgtgtatactttatatatatgtgtgtccatgtgtgtgtatctatgtttttctccatagctgtcttcattatccagcttctatgcaaggtctatgattttggcctatatttttcatctttgattacagtacaaaaattaccagtattaccttaactgagatacagatcctataaaaatggaaaatgcatagcatgcttgatgattaatgaagcagactatattatccaacattctaataagataaaataatcacaatgatttctcttttttggaaaaatgtttctcttattctcctacgttttcgttaagattttttttcttaaacaagaaacatgtctaatatctgtaaaagcacaaagcttttgggctgggtgcagtggctcatgcctgtaattccaggactttgagagcccaaggtgggtggatcatgaggtcaggagatcgagaccatcctggctaacacggtgaaaccccatctctactaaaaatacaaaaaaggccggatgtggtggcaggcagctgtagtctcagctacttgggaggctgaggcaggagaatgacatgaacccccgaggtggagcttgcagtgagccaagatcatgccactgcactccagcctgggctacagagcaagactccatctcaattaattaattaattaattaattaattaaaataaaaaattaatagtaagagcaatgtgaacaaaagatgcaataaaataatttagaaaatacaaactattaaaaaatagattttaaaacttgtgcaacgaagtcaaacagcagccaacgaaaatgtatacccttacacgtttgtttaaaaagcaatttaaattacattgatccactaaactaggaaaagcaaaacaaacaaaaagggggaaataattaagacctaaggaaaaagaaaaaccactagatttaaaaaataaaactaaaggaggattctttcaaaagactgagataataaaacagtcaagcctctgataagtaatcaagataaagaaaactttgaagagaaaagggcatatagccacatgtgaatatgatgcaaaaagtgaaaactttacacatctttacaacaccttagaagtatggatgacatgttcatttttttttttttttttttttgagacggagtctcgctctgtcacccacgctggagtgcagtggcgtgatcttggctcactgcaagctccgcctcctgggttcacaacattctcctgcctcaacctcccgagtagctgggactacaagcgcccgccaccacgcctggctaattttttgtattttggcttagtagagacagggtttcaccatgttagccaggatggtctctatctcctgacctcgtgatccacccgcctcggcctcccaaagtgctgggattacagacatgagccatcgcacccatccaaagtgttcatttttttttaagaacctacagttacgaaaagtaactgaagaagtgggaaatctggagaccaatatgcagaagaaggaaaaagacaaagactcatcctccaaattggatatttaaaccagaatttgtcatcctcagcaatattgatatattgggccagataattctttgtggagggttctcttggtgtgttgtcgggcatttagtaacattccctctacccacagaatgccaatgagacctcccgaccatgaccagttgtgaccacaaaaatgtctccagatatttccaaacgtcccatagg

SEQ ID NO: 1242093 - DNA, 4001 bp, Homo sapiens
tcttaagaattaccctctattgccccttgggccccctgtccccagaagcctggtcagccaagactcacatccccaggtggctggcaaccaccggaagtggctgtctcagggatactgccatttgttttcctgttcctgttcactcctgctggaactctaggtctgtttttctgccaatattcttttaactgttggaaagaagagcagtaatattcatgagaaccgtcagcccctacagccacaacctcctttacagtttttacaaaatacacttacacaccatctgatttaatgacaccaacaactgtacaaggtgttgtcacactcatttagtgactgagaaggattgatatcatggctagaaaaaaaaaagaaaaaggcaatactggaactttgagactcagtcttctgactccaagctctgaggttttgccaagaatcagcagctgccagggaccaaaaccagaggcagaggtagaaaagtaaacattaagtaggcaggaaatgtatgccatgtggtttagtcatacatcctcacacgtctgttagtgtgaagaagtgcaccagtacctctcaaacttttatatcaatgtgtcctcatggcagaaggcagcctttctcttaaatcagaatttatcagaaagaggacaacccaagcctcatttcagagagaggtctggtatactcttagaaacctatgtgactgtcctccctaagtacattcatgttttttctcttgatctcaagagaatcaagggaaactgatgcttcagaaagatgtcccacatttatcctgtggcactcaaagtacccaaggttgagataatatgaggaagattcaaggtgtcaagttcagtttcccaagatctattccacagaagatgagcaaatctcacttcagagaccactgactgaaggagagtctggtcccagaaccatggagaattagaatatgaggtggagaactcagaaaaaattgttaaaatctctctggaaagtagaagcctgggagaaaaccaaatcaaacccattctctcattgccacccagagatactgtcaatgttttgagttcatgggggaagtgtaggcttttcccaccgtcaacatctgtaagggagtgaggcagcctggaacctcttgctcctaggtcccatagtctccattccccttccagctggaaatttgtgctgtgaccagaggaaccagaaacggggtgagaacgcttaggggactgggtcgtaaggtcaaaggccagtcttgcagtaacggcagttactaggtggactgtgacatcacaacattccactcctcctggtcggggggagggaccatgtcagcaccatgtccaagtcgctgctccacgatgggggagggaagcacagggttgggacccagctccttggagacgccagcacaaagaacccagggaggtcgaccttgaggcagcaggaggggagggcacagtctgcagcagggagtcccaggagtcaccagcccaaagtcacccaaggatgactggcgagggtggggcctggctccttggagatgagagcccaaagagcccacggagatcaagcttggggcggcaggagatgagggcccagtaatggagcgggaagccccaggagtcacccacccaaagtcaccctggggtgattggcgagggcaaggactgggctgcttgctgaaggggtggggctgactgacaaaactttggtgggggtagcccaaggcaccggggttggggggaccagtccagtgtgcctcaggagtcatatagactctggcaggggtcttgtcatcagaggggatctgtggctgggttgaggggctatgacctagtgcgtttttacctttttcttggctgcagccaatttgttgtgttgagtttcttctgccattgcagggtggggagggaggaagggttggggccacagcagcaaaatcccaataagaaccgatcaaggcctccagtcacctaccaggcagctgtgtgactgagccagaggaggcgtaaccagggacccagtagaatgcggaataggggcgtggccttaatgctccaagcccattggtcaatgagaaagatgaaagggaaagggggcgtggccagacagcagcgtgtccagagggccctgtggctcacaaggaaagctgcccatggcaaccgctctccccacccactctaagagaggggagaggcctcccactctggaagagaagaggggctggcttttgctttaaaagctttaaaactttaaaaaatatatgtgtgtatactttatatatatgtgtgtccatgtgtgtgtatctatgtttttctccatagctgtcttcattatccagcttctatgcaaggtctatgattttggcctatatttttcatctttgattacagtacaaaaattaccagtattaccttaactgagatacagatcctataaaaatggaaaatgcatagcatgcttgatgattaatgaagcagactatattatccaacattctaataagataaaataatcacaatgatttctcttttttggaaaaatgtttctcttattctcctacgttttcgttaagattttttttcttaaacaagaaacatgtctaatatctgtaaaagcacaaagcttttgggctgggtgcagtggctcatgcctgtaattccaggactttgagagcccaaggtgggtggatcatgaggtcaggagatcgagaccatcctggctaacacggtgaaaccccatctctactaaaaatacaaaaaaggccggatgtggtggcaggcagctgtagtctcagctacttgggaggctgaggcaggagaatgacatgaacccccgaggtggagcttgcagtgagccaagatcatgccactgcactccagcctgggctacagagcaagactccatctcaattaattaattaattaattaattaattaaaataaaaaattaatagtaagagcaatgtgaacaaaagatgcaataaaataatttagaaaatacaaactattaaaaaatagattttaaaacttgtgcaacgaagtcaaacagcagccaacgaaaatgtatacccttacacgtttgtttaaaaagcaatttaaattacattgatccactaaactaggaaaagcaaaacaaacaaaaagggggaaataattaagacctaaggaaaaagaaaaaccactagatttaaaaaataaaactaaaggaggattctttcaaaagactgagataataaaacagtcaagcctctgataagtaatcaagataaagaaaactttgaagagaaaagggcatatagccacatgtgaatatgatgcaaaaagtgaaaactttacacatctttacaacaccttagaagtatggatgacatgttcattttttttttttttttttgagacggagtctcgctctgtcacccacgctggagtgcagtggcgtgatcttggctcactgcaagctccgcctcccgggttcacaacattctcctgcctcaacctcctgagtagctgggactacaagcgcccgccaccacgcctggctaattttttgtattttggcttagtagagacagggtttcaccatgttagccaggatggtctctatctcctgacctcgtgatccacctgcctcggcctcccaaagtgctgggattacagacatgagccatcgcacccatccaaagtgttcatttttttttaagaacctacagttacgaaaagtaactgaagaagtgggaaatctggagaccaatatgcagaagaaggaaaaagacaaagactcatcctccaaattggatatttaaaccagaatttgtcatcctcagcaatattgatatattgggccagataattctttgtggagggttctcttggtgtgttgtcgggcatttagtaacattccctctacccacagaatgccaatgagacctcccgaccatgaccagttgtgaccacaaaaatgtctccagatatttccaaacgtcccataggagg

SEQ ID NO: 1242094 - DNA, 4001 bp, Homo sapiens
gtaacctattcctactttgaaactttacgactgttcttgccaataacaccacatccttataaacgccatatcggggacacaggaaaggaagccacatatatccaagtggtatgcagtatgttcaacagaccttaatagaaatgaatattgcttgtatcatttaacgtttgaagaggagcgataaagactattatcatttaagagtagtgagaagtacaggtaattctcacactagtaggctaatattttactagccactcattttaattcgttgatcttttcttccctgaacaagtatacctaaatctgggatgtgtgtgtgtgtgttttatcctacctttattctgtaccttaaacaacacatagatggggaagtagagtgggtttggttttgttttttttaaataatcgacaggcgacatacagtttaacttcacagggttgtttaccagcaggttggtgttccgaagaagcacgcagtaaaacacgcacaaaataagggtctatcaaaataattgtatatattattatttcgagatatatatggaaagatgggatcgcaaaacatctttaacagaatgggtaacattccgttcaattatcagtaacaaattcccacagaatctttattcctcgctatttgtaaacaagagctgaagccagccgggcacccaggagcattccgccggggccatctgaggagggggactcccgcctggatcccgctccatcctcgggccacgagaaagccctatttgaactcttctgctcccgcgtgggggctggagtccaccgtccctgcttaactacactgcagctacccgggatccttaagcttccttcaactctctgcactttgccaggcacccgaaacccacggcggctgggcggccctgctcccggctctccgagcctgtaccctcggggaggcccggtccggaggcgccccgcgggaggcttaccgagcagcgagcctatgaagatgacgacctgcacggtggtggtgaactggcggtacagctgcgcctcgccgaactccccgagcgcgctgcggttcacacccgcagcctcggcgccggacgcgttgtgcggctcgctggcatttggagagatccagctcccgttatgtcccatggcgaggctgggactccggctccgcgcgccgcccgcctcggagccccgcgcggagcctctcctcctccgggtgaggagggacgcgcgggcgcctggcggagtcctggagaagccggagcagccgacgggtcccctcacgtctccacatcgccaaccccggcgcccgggaggcggggagggagggaggcgcggctgcgccccatgcccactccctcctggatcccagtcagcagccacaagaaggcggcacggtcagagcccgccgagcgtcgtccgtccctcctccagggtggtcagcgtggcccagcccactcgacaggaatggaaacacagaaggaggcattcgatggtcaaggagggcgctctccgctcccgctgcctccttcaaccgcgggtcctccgcccctcgagggctagggcatccctctccagtcccctcgggctgacgcactcgacccctctccttagcgggaggagaacgtttggccgaagctatttttcagtcctgttggcttcgaggctggatggcgatgtgaagccaacgtaatgcccacgccgagtggccggagccacgaggggacccccgagtgcccgacagcgcccatggcttgggtggaaagccctgagcgtccccagcagcctggccctgcgcccggccgcctgccaagacgcccgtgctgggtcctgcttcccagcccctcacttgtggctccgacctcctgcctcagcactggcgacggggaccccgttccgcagcgcctttttgcctctgcatggctgggcgccccctttcttagcccccctcggtccctcggccgctagaacacagcttgacagccgggcggggacgaaggaggacgcccccagtggggcagtggcaccgtctgcgcggccgccagactcggtgcgcgcctggggcagccgggggcgcgcggctggcgaggatggtcacgtggcacgcgcgaccccgcccctcgcgcccaggctgccgcggggagggcgccatcttggccccgcggagcgtgactgtctcggctggaagcgtgggaggccggaggatcagtgactggctgtcgtggacatgctcgctacacctcccggggcttcgcttcgtttactattaactgtcgttactcctctgtatctcgtcagcaggggctgcctgcggtgttagaattacacgcccctgccacctgggcacggagcccagtctcccggcccctcagtcagtccttgggtgtagctggagcatttaagaaaaatgaaatataggaactcagtgcatggtttcctgggcctttttattgaatatcatttctaacatgtacacagtataacccaggcttagtggattccgggacagaaaatgttgggagctgggatagtcaagtaaacaagaagaaatggtaaagagatgccaagtgggagaggaaactacggatgcagagagaggatctgggataaagagaacaaagatgcgtggtcgactttatggaaactcgtttctttttaataagtgaggtacatggtagaagactttgacatgttgattatgtgactgggaccaaggacaacaactcgagaattgattaaaactacagttattccttggttgccccaaggatgatcctggtacaatatggctatttccttttcactggtaatccttatttactcttgaaagggtaaaaatccgtgtcttgtacatatttggagtttcacaataccttcacatagtaatctatgtgagaattattttaaacattttggagaccaaaaaggggaaagagaaagagacggaaaattactaattacactaattgtattttacccccaagaacgccattaccagcggttaacattagttccaggagtccaaacatagttttcaagataaaaccccttacactataatcattagaaaccaaaaattataataattcaccaacatccagcatactcatttaggaagggttgaagaatctgtgtaaatagagttgtttgataacagttataaaaatatccctttacccatcttcaccctccatcccgaattcaaaactagtaacagttgggataaaggtatagaaaagaatcagttttgcaagtgtagagaatggagaaagcaagaaaccgctctcatgttttcattctgaaaagatatcactaaattctctacaacccctcaattggtgttagggtatatggtcagtagaatcaagaaataacccaatcagctgagatcaccatgattctcagacttgaggaaggattgcctctcaaaaatgaagggctaaagacaggaatagagtggcacaattcttaatagttgtgtgctgtatgagttttttttaaggatgagtcaaaagatcttaagatttgtgatgtaaaagattggacacgatttaaatatgtattaaatgtctgtagtagtgttttttataattgtctggtcatctaccagtgcacaacaaaccataacaaatttcgtggcttagagcataactccagaagtgtagctcagcgttgctgcctgggtctgggatctgaaggcttgttcactctatgtctggcagttgatgttggctgttgactgggaactcagctggaacatctatatgtggcctctccatgtggctgtttggcttccccacagcctggcagctatgctccaaaagtgagcatcccaagagagacaagagtcccaagaggacaaggcagaagctgcactgacgtttttttttctctctttctttttaggttagccaagtgaagcagtgggagtggagaaggaacaaagaaatctgtaaagtagttgtgatcaattagttgtaaacaccactgcactcagactcagaccagcttgc

SEQ ID NO: 1242095 - DNA, 4001 bp, Homo sapiens
gagttttcagccctctgctgtcaaaaggtgaagcagagtacatgtagggctttactgtgccctctccagactggccagagccactccatggtcagtggtctcttatcaggcaaaaaaggaggggcggcatgaggttgttagttgatatcagtgtggagtcttttgaaagagttagtttctgttgaacccttagagaagaaagtctaatagaagttaatgaaggagagggcataaggaagcatgccccatcttcttctatcccactgtggccaagaactcagttttcaaggttactctggggtccccttggccaaagaaggtccattcagtcagttggggagcttagaattttatttttattttacagtggacaggtagattgctacagatatctgaaaggtaggttggcagtatctattagattggtgcaattgtggtttttgtcattacttttaatggaaaaaaacacaatcacttttgcaccaatctaatattaaatgcatgtaccttgcacaatcctacttttgtaaaactatcctacaaataaaagaatcaatgtataaagttgtgtgttcaaatgtgtttgttgaagggttgttgacagtgactctcaaatgaaaacaatctgaatgtccatcattaggataaattgtggcatgtccctatgggtacacagagaaatatgtggaaggctacatcctaggctgtcaacatggattatctcaactgaagtggtattgggagatggtataataaatgtgtgacttaatttgtttatgaaatagacaactttccacccctagctagcctggtggtgaaaatgtcatctttagggattaatttttctatttctaaaagtctgttgttaaaatacaaatattcctgaagttgtttttcagcccttaatacccagaggtgggagagaaaatgctgtggttgctttccagccccgacagcaagctgacagaaccatcttaactaggacaggtaggtgtctgtgtgggaaaggcaggaggaaaggcctccggctcatggcctgactgacatgcatctcgttgacactaacatgttgtctaggaaggagaaccaaaagagaggaaaagacactgcgtggaggggctgatggggcacatacattgactgctgcctgaggccagtgctacttaggatgctgctcaggtttccttcctggttctttggggattagcacaagcactgagttggccctctgccagctggaggggccgccaacagggattgccaaggggtcaaagaatcagcatcactggctgagagagcagctttaccagcagagatcaaaggtgccagacgtggtttcttttgattcactcagggagcaggacaagtaatcagaaaagtgtgattttcctctgctccaataaaataaaaaaacctgccgttgttataaagcaccaagagaatcaataagagtttcaggagacattggcacacctcacaggcaaagccctggaaacaaactactgctttcaccacagtgtgaacttcagggcagaggctctttggcttggatgagtttacagtacagcaaaactgtcctccccgtcacagtgtatgtggaacggtatgtccatgctggagtagctggaatgtaagtagatttagtgtgctaacattagaaagaatgatactactagccagaatttagtgaatacttattgtctaagtatgcgtatcatgtgatatttgcaagaactcaatgagttaggtactattctatcccattttaaaaataaggaaattgaggcactgaaaggttaattacccaaagttctagaaataagaagcagtggagctggcattcagacagaagcagttgaactccagagcctgggatgtgatcactacgtcacactgccttctcatgaagagacaacacctcacaacgcaacccccaacactgagaacaaagaccaaagatgtgtcgctggaaaagccacttggactcgggcatcagaatggatcagggaaagaacttggtgagagtaagaaagccatgaggtcacaaagaatgccaaagttccatgggggcaatgtgtgcgcaggacacaaggagctcacaatgctctgaggtcaaatctaggaaagccctgtagagtgaggttgcaggatctacagggaaaagtgagtcatctcaggaacaaagggtgggcttggggacacatccagaaaggacttgagaccattagttgcttaacagactatggtttaaaattaaagtagaaacagctaaaccatatctatatgatctaatttgtttttgactactttctctgttataaacacttatgtttattgatttcactttattggtattgttcccacccacctgaacgcctggttatctgtctttacagttccaatctgaagattttaaatcgcaacctcaaggccaacattcacccattcctcagtccctgtctctcctttccaagctgggaaattggaggaagcctgtcccaaacaggacagcctctgcctctgagttggcatgagtacaacagtttttttctctaagttgttctactacctaaagctgcgaggttcacacaaggatgggtgatatgtgttaattggaaagtatattttatcttctctgtctagaacaactcaaataactttgtatattcttaataccagtactgttataattatataatttaatttatataaatatatatatacacattcccaaccagttagctaaataaatctgtgactaattcacagaattcaaatcaccgtgtgtattctgcatcataagacaactagtatgaagaaaatcctaaggtagtgctaagaacatattatcagcatttgttcatttttctgacttaattaagagttacaaactactactctttgatactgaacaatcaatgagctgtgtataagagaataacaaaaatagtttacttattcaacaaacatttattaatttattagactgcaaggctctgagctaagtaccaggtttacaaaaataaacaagacaaaatctcaaggagttgacaaacgagtttgacatatagatagataagtatttactaaacaaatgatggaggaatatatgggaagaggaaggaggacccaatgggctggagtgggaggtggaacaccacaagaggatacacttgatctgagtcttggctggaagaccaggcagacaaaagagagagacaggactggaagagggagcaccctgggcatgcaggcaagttgcacagcatggatatggcaatagcaaggagtttagtgaggccagaggctagaatcactttgaagaaaaaagtgagagtcagcagatgagttgccaattaaagtgactctactctgtgtgctaaatgttaatagctgcagctatgcaaaatagaaaaagcaaaaatgttcacaaatgacatgagatttcaactttaatgctctattttcttaattctaaaatatctcattgatttaaataatacttgattgtaaaacataacccaatttaagaaatgttagaatatgaaaggatgaaggaaataagtcaataacaactgctagaaggcctcatccaagagaatataaacagagactctcacacaaaagtggacttctgctttgccccagagtcaatgtcagtataagcaaaagcctccactacattccatgtttagttttcaagcacttcaagatcaaagagcattatctttgaacgttttaaattgattaagctaatttagagtcattaaaaatggaaacagttctttttagcttaaggttggaacgggggaaccttttggagaccactgaagcatgtgttaacttggtttttaggtacttgagcaaacaatggaaatttggagttgccttggtttctatgactgccaaacctcagcagataaagaatcttctgccaacctctctgcatctcctacattggttcctctttcgtgtctgtttcctcaaaagatgttcctatc

SEQ ID NO: 1242096 - DNA, 4001 bp, Homo sapiens
tgtaatcccacctactcgggaggctgaggcaggagaatcacttgaacccaggaggcggagactgcagtgagccgagatcacgccattgcactccagcctgggtaacaagagcaaaactccgtctcaaaaaaaaagaaagaaatttgaaagcagccagcaacatcaaggcacagatggagcttgagctaccctcttcaggctattcagaaaattctcccaaggggaagttgggaaggagaacttctatttggccccagcctaaactctcctggaagctcgatggggcctctgtcagctttcccctctggacctgcccatttgtcccagaggtgcccactgaggctacctcaatgcctgtcaaactaaaacttaaacctaagagtgtctgcagcatggtctccagccagcctgatcagaagactatggagggggccaggcacgtggctcacacctgtagtccctgtaatgctagcactttgggaggctgaggtgggtggatcacctgaggtcaggagttcaagaccagcctggccaacatggtgaaaccccatctctactaaaaatacaaaaattagctgggcgtggtggtgggcacctgtaatcccagctactcgggaggctgaggcaggaggatcacttgaacctgggaggcagaggttgcagtgagccaagatcccaccacggcactccagcctgggtgacagagtgaaactgtctcagaaaaaaaaaaaagaaaaaagaaggaggggcatactgactcctcactgaagaatgggatagacaccctctattctacctctcccagcaaggccataagtctttgctctgaaaggagccagactttagagccggctacaggtggacatggggtgaagacatcaggttgcgagggtaccctctctcgttccctaggagcctggcccctgcaaggaggggcacctttaaacaatcaagcatagtgagtggggcggcaagcagagcagagacacagacgacagcggggtggagccccaccagtccctctgagtataaggcagagggagtcccgctggggtccacatccctgtgtgtctcgggctgatttggacacaaggctcacacattcatcctacctgccccagtgctagctggccgaggatgccaggctgtacccgaccttaggctgtgcggcttggaacctggaccggggcaggaattgacaggttcccccaaacaatgtcactcccaggaccctaagacctcaagcagcagaaaccacaattctggatgttacgtgcagcgccagctcctgtctgccctgcctccttatccctttctcccagggcgactttggaccaggtctcgaggccgggagaccggccccagcccgcccgaccgggatgggcctggcgcccgggggaggccgcgtcgtgctgagacagctccgagctgcctccccgcagccgcgggccgctacaatacggattcggcggcgagaggaaacagtctggccctccaggggacgcagggaaatccaacctttgggtcgggggcaattaggactgggagtcgataccgcgggcaacgaatgatgaatgaataaatgaaaggatgaacagagtggcgaggcggagatgggccatgcggggcgtcccgaggagggtgcccttccttgccccgatgctgccgggaccgtccctcatcccccaggtcgcagcagactcagccaagacacccggtcctagtgcgaacacctcgcgggccccgggagacgcctgggcgcgcggtgcagctctggcccggagcccgcattccggcggccgggaagtgcctgccccgtgggcagaacgcgccgagttgccgcggccccaggagccgtcctgccccgcgcggcagcagcccctcgcggcggcctccggaacccccgagaccggcccccgggccgcaaccccttacccgccctcctcggtggcctcgctccggcttaaagcggtcatcccggcgcctgcacccagcgccccgaccgcgcgccgggacccagcgcccgccggaccccgcccgccccgtcgagagcccgccccgcccgcccgcccattggcgggtcgcgcgggccgggcacagcccattggccgttcctccccctcattccccagcttccccagcttctctccttccccaccttccccaggtggggctccaagctctgagcagatcctagcgctcggttccccggactgggaggtcccggaggccagggcctggcgcggcacctcctgtccctcacgtcgagggtattgtgtcccctctggacgcttctgtcgtcctagtcttgcggcttgggtccctctgcaggaaccaattccggcccctctccaacctaacccttcccaacatagagctccggataagtttcaattttaccgtcagtggggaacaccaaaggggatattgaacaccatggtctgacagccaagtcaccaccacgaacccgggagccaggatgctcccacgcacttttgccggagttaacattgcagtttctccaaggaaatacacttttggaggagtctgcaaaggggctgaaggtggacacaaatcaaaggcagggaagcagaggcacgtgcgctcagtgtgacaatgagcttttgcctggcctgcaggccctttcctcttccatccccaccaggacacttggtccttgggagtgtggtcaggggagaggaaaagcgcaggccagatttggtcccattcccaactctctcccccagccctttggcactacagcatcatggtgggagggcaccagcaaacaggaggggtcccaaggggagcctaggtccacaactgaggacctgggagccaaacccagtctcaggcgcccagagctgactcctcctacagcccccataagggatacgctaatgcaggaagaccaaagtggaagaaccatggccaaggccactttgcaatttgggtttatctaccagagtgggagggaggccttgtccctgctctttcccatcttcggttcacgtaagccattaaagtctccccgcagcactgaagggggcaacctgtaaccctaagatagtaagctactgctttcccagcgcctctgcaccaggaggtgggcaggatggcaggtgacaccaccatagctcccactgcggggcacgaggctgcagccattcccagcctgctcagagggcagggttcaaccacctccccctccccagcagaaaagagaggaaacaggtgcttcagctgttgtttattgacatacaggtaggctctatagcaacaggcctggaggtgctgcagtagtgggggaaaatggaaggtggagggtggagtgtttgctgcaggacagctgagtggagggtggggacaggtgcaaactggagaggcctagagagctagagaagcaagtaagggccagggccagagtcggcttcaatggaacaacagcccagtgccctaaggcccctaactcttgctggctgtttcttgaccccaagccagggttgggagtcctctgggcatccattttttctaaaggaactggacagagtacacacaggaaaggaagctgtcaccctcttgccatctggctccaggggcctccagtccagcattcctccttcttcccttgattgggtggggccacatgatgggcagccaggctctgggctgtcccactagagcaggctgcaaacacagccatgtttcagtgaggcgttgatcttcttccctggtgtcccaacctaccagtgccacgttacagcccagagtgagttctacaagcgttgctggcctaatggatgggctgggggaagggggtgggacaggggctggaggaggggctctggggtccatcacggcacaggaacaacacgcatggtgttggtgaagccggagccagggcgccatccggtcagcacaatgaccacatctcccttcttgaagaagcctcgggccttgcctggaggaagagaagggaggttggtgagtaaaagccaagc

SEQ ID NO: 1242097 - DNA, 4001 bp, Homo sapiens
cagagatagtaatcaaatcacctactgttatagacttggcttggggggcagtgagaatatatagttttcttaagatctttccctccttgctttgaaaagtacatccccccctcaagactctcatgctccccctccttccaaaaaaagagaaaaggggagggggaagccctagggatgaaagaggactcctcaccctagaatggggttatcttaacctcttctacgctatttatttaacttgtgtgtacagccagaaggaagccactactctggggtccctgggacagcttaaaaccctagtgacccacttaacacaatagattgttttaatcagttcgtgtcctggcaccatctcgaaggggaacataaacagacgcgcacaccgctcagatttgctctttccagcaggagatccaattacctatcggtggtcacctctctgccctcggaccgtttaagagggggattttaacccctaacgctgaggctgtatttctgtctataagagccgagattcggagtcggtcgaggaggggaaggcagtagacggattcgacccgggaatgcattagggacagctccgggcgcgcaggaatttcttcacagcagaggctggtcacctgccgtccgtccctccccgcctggcccggtgaccgtcgccagagcctggcgcaggcaaataaacgccaagctggggcacccccaaggaggagctgcgatccgaaggcaatgccaagcgagagcggtggcgcgtctgttcttccggagtctgtagtctacaaataactccggccagcaaggaggtgacagccccaatatacctcccactcccctgctatggccttgctccgcaagctgtggaggggccagcggagccagccaggcagcgagagagaacgaaagacgcccagctcgttgcagccgccaacccgcctcagccgccagtccctagtcctcaggagctagtgaggcgctgcaaggcgaggctggggcctctagaacacagtttaaggggtgcgcgcggaagtgggaaccagccggtggccgctgcccggcgccagaacgtctaccattcagcccgggcgtgcgcggggcggggaagaggctggagtagagaagcgagcgcccgcgagtgcgtggccggtccgcgagcgcgtgtggtgtctgccttgtgagcactgcgggttcgctggaccccgcggccagggccgcgccccgcaccgcagctgtcggattacccaccgttcggttttccgctgtggctgaacacagcggctctgcccttgccagtctccatctcacctcggggatcggcaaatgcacacatcatggattctccggatgctccaacccgcggactccaatgggcgccccaagacgcccccagacccagcgcggcgccccaagcacatgggaccctctcaaggcaactcgccgcgcagtcagcggccgactagcaggtccggatgctcctgcgctctggcggcctggacttcgcgccctcgctaagcgggcgcgtctgccaggcgctgctgccaccagcaccaggagcgtgttcgggggcctccgggaggtggaaacgggatgtgggggtcatcctgcccgctcctgacaactttttttcctacgtttccctgcagacccagagcagcgaggtcacggtgtccgcggcctcagcaggaaggaccccgcgatggttcttcacaattcacccccgcgaacaacgcacccgagcctgcgcgcacggagggctgccgcgcgtggaactgagcgggtcctgggttggtttgcggccctcttccctccgcccactcacatccctgccgggtgcgtccgcgctcacctgtcagtgcggcgggtcctcggggcctgcgctttcgacgcgtggcgctgagtgcggccgcggccagagccgccggggctcggcgcggggtcagcgggaccgagagtgacgcggcggccgtgcactgggtcgcccggtccgcggaaggcgcaccgagtgccaggcatcgcgccgtctcccgtttaaatgccggcggcagagcgcggcgcccggggccgcgcctctccattggccaggcgccgccgccgccgccagacccgctatccgccccctttcccggtactgcccccgccccccgcacccctcctgcttccccgcggggtcccctctccgcccgcctcgcctctttgtctgctccccccgcccgggccggctgggagaggtcaccccagggaaccgcgcctggaatgcacagcaaatcacattttccgctcccgttggagagggaagagcgggaggaaatccccccggctggcggcccctcattccttctctgccccaggtctgggctttccctgtcggccgcccggcatcgcctgcgttggtcccgcgctcagtagcggagactgcgctgggaagagcgagatctccgtgggatcgtgccagattcggccattcttcccctctggagggaacgggactgcgggatgctctggtcgagcggccgtcgtggctccccggcggccccgcccgaggcccccaacttcgagggcgctgaccccggcgcccccgttaacctggcgggctcgctggccgccagcaggagcctgtcgccaacatgacaccctgctctcctcgcccgccaagggttctttcagcccagatgccggcggcctcccctgtgagtgtacagaggggagtcacgggaggagaataaaactaaatgaccgtcaaaagtcaaggcttctgttcctaaattatcttaagagacagagagaaaacagccactgggcgagaggggttttctgtagcatatcaaagacgaataagtcaggaaaataaaacgttagatgaggaagtaacttcccagaaatttaggacaaaaacctaccgacgtgtaaaaccaatgtcacattccggataccaagtacataaatagttttcgaaagatgagcgaacactttcatttgttctcttagcctgaaaaattggttcctcaaagaggccgtaagttttgtgtgttgaagctaaagtccgtgcaaaaattaacacgtctgcaagatctgcagaccagctccatcagccacgtcaaatgaagactttgaaaaagatttgctacagaaggaaatatgaaggtgtctgtattgtctaacgcgaaataaacaaaacaatgaaatccatcaaaagatacttacgaaacacccgtaatttaagtacttgactaggaaaacaaaaccagaccagaaaacagcctattttttttttctctttagtccggcgttagggggaagaagcaagaaacatctactagatgctgttaggaacgtgaaatagatatttttaaataaatgaagcaagaaggacgtctgcattagtatccttaaaatcttagtcctctcaatgttttgtttgtgcagatggcagtttctacacatgaactcgaggctgcactttacaattctcaatcagttgttgttaagtcatgcagtgagccacagtttgtagttgcctacagaatgggagcattgaaccagcttgaagacctgtcttgctcacgtgggctcctggagagataggtaatcagaaatacacaaaatacttaggcgatgaccagttcagtcgaagcccaccaccaagctgtattggagccagctgttctcccaacgtgcaaactgctgtacttctccccacaaaagggagcatattttacaaattcattaagtcctcctcatctaaaataaaagctttagtcacttctttttttcccaagacttatatactgccccaaatcaaatacaaagaagctgaaattacctcccaaaatggaagtgattttttttttttggagccctgacactgtggttttctctatctccatgtatcaaatcatgatgactcttcctcatgcagtttctcaggccatattttttataatagagcccccacctcctccccacaacacacgccccctctctgtatcccaaagagatagagaggg

SEQ ID NO: 1242098 - DNA, 4001 bp, Homo sapiens
tccttcttaatactgtttgctggttgatcccgttttcgctaaactcttaatatcacaggacacagtccttaggcctctgctgctttccgtctacacccattccttacggataacatttattctcatggtttaagtaccactgctgatgatccccaaattcatatagcatagaacttctcactcctgaatctagctgcctactcaacatctctatttgttatcttttgcatcgtggcttaaagaactccatacttctacgagcttgggcaaaacctttgatttcatcctccactccctctatctcactctccatatccaattcctagcaaatactgtaaggcctaccttcaaaatgcattcagaatccaaccacttctcaccatccctacggttatcaccctgacctgggccactctcgtcatctggattactgcaaaaatctcctaaatgatttccctgcttctacactcacccctacactctaatcacaactcacagccagggtgatcttctaaaacttcagttacaacatacctctcctctattcaaaatctcccatggcttctatcagcctttacaatgatccggctaccatgatctctttgactttatcttcttgtccctccacccccaaaactcttgctcatccctctccagatacactggcttccttgctattcctcaaacatgacaggcctaaaagcatttgtattggctttcctatctgcctgaatgctcttcctgatatttacttagcaaattttcttaattccttcaagtctttgctcaaataacacctactaaatgaggctcaaactgaccaccgtcatctttaaaataccagttcccacctccactctggaactttcccgtactcctttatatttctctttttttttttgatggcaccatcactttctaacaccattatatattttattttctgcatcctctaatagaatgtaagctccatgagggcaaagctttttattttgttcacttaagtaaaataggcgtctagaacagtacctggcacacaataggagccaaaaaaaaatctgttcagtaaacgaaggcaaatatcagtaagtataatatgcgtgtgggaggggagagggggttaaaaagggcaagaagtcccaataggtagataaaaactccacagagtaggaatacagaatcgtgcatcgtgtcccatttgacaaatttttgagtttatctagaaaatagccctgcgttaaacgtttgttaaaagtgctgatttcaatgttcttacattctttaaaaattccttgttaagtgttctaatcttttagatgtggtatcagccacagaaatttattgttcccttcttgttttgcagttcagaaaattagaagtcaaattcggaagtaactcgtcctagcattttttgattaaaccaccaagtttaaaattcgttccttttgtcggagttcgcacgaagaaagttggaaggcagacttcaaacaacaagctacaaagcacaggaatgagacatttaaaaaatgctctccgaaattcggcaaaactcacagggcgctagtggatgctttaagacattcacctggctgaaaatacggtggtgggctgaagacctcccctaggtgggttctgtgggcgccccgtgaacgacgagcctcccgccacgggacgcgaccatcaccgccgcctcgccgcccttctccggtgccggccgcggggccttgccggcaacggtcggtaacgggcagatcccaggagcgaagggccctcagagactaccccaccaacgcactccgactccgggggggcggcagggagcgcggccctgcttccctccctaaccctgccctccctaacccactacctgtggggaaggcgcttccctccgcggagcggacagaagccgccacgagcccggcaggaggttcctacttctccgaccacctctccagccgccgcagaaaccgcagaactgagctgacgacccggaagtgctcgcggaacctggaagtgacaccccgcccgagggacgggaggccccgcccagccctgctctcgcccgccactcaagccttgtcagggaagggcgtggagagggaaggaggggcgtcgggctggagcttgaagccttaaagtggtggacaggcgctctgctcgagtaattcaccaggtttactaaatcgttcctaagggaattataatttttagagactaatcttctccattgttagatgcacaatttaagaaatgtagggcattcatatttcatgccggaagtgtgttcagggtaacagtgttgaagaccttgcagacgaattctgaaaagattatagcaggggccgggcgcggtggcgcacgccttaatcccagcactttgggaggctgaggcgggtcgatcaccggaggtcaggagttcgcgaccagcataatatggtgaaatcctgtctctactaaatacaaaaaattaggcaggcgtggtggcgcatgcctgtaattcgagctacttgggaggctgagacaggagaatggcttgtacctgggaggcggaggttgcagtcagctgagatcgcgccattgcactccagcctgggaaacaagagcgaaactccgtctcaaaaaaaaaaaaaaaaaaaaaaattatagcagggtaagcagggtatcttctttacccctcgaaacagggctgcaggcaaagtttttagtttgtgaccagttcatgaagaactttaatttgggagaagttatatttaaaatttgcatctaatatgcaagataaatacttcactataaatttcaagtttgcaaaatcacaaattgttttaggtgtcagggtgcatggtacactaactggcttaaacccagcagtcatgtgtagagcagtttatcctacaaaatagctgaatagtgattaaagagtatgtgcaaaacaacaacaacaaaaccacaaaaaacaccaagtggtatcagctggaacctctgagcaggtctatgaactaaacaagttcttcttatttaagccatgttttcggccaggggcggtggctcatgcctgtaatcccagcactttgggaggccgaggtgagcgaatcacctgaggtcaggaattcgagaccagcctcaacgtggagaaaccccgtctctactaaaatacaaaaaaaatttcgctgggcgtgttggtgcatgcctgtaatcccagctactcgggaggcggaggcaggagaattgcttgaacctgggaggcggaggttgcggtgagccaagatggcgccattgcactccagcctgggcaacaagagcgaaactgtctcaaaaaaaaaaaaaaaaaaaaaaagccatgttttcattttaagccactcatggtttcatccttggattccccattaattaaaaaaaaatctcaactatgaaacacaaagtttcattattgttttgatgttaaaataaagcaggctgaactctctaatccccaaagaatagaagcacttagactatagaaagggaaacaagtgtaaaggtctgaaattatttaagaggtttataggataattcaaagcaaaaatttagtagcataatgaaagaaaaatgtgataaaaagacaaagacgaacgttccaattaatttatttaaattcattaatgttgcaaaaaatatgatgtgcaacaaatcaagacacaagttatattcctaacaggtcaaagaaaatattacatctccttagtaaatcatgaccaactctggtatttcttacagggaccacattaatatcttgcacacacagacatcagaactgaatttctgacagtactcggctgggcaacatcatcttaagagtaggaaaatatcacagtacattaattttgtctaaatgacagcaatgaacctgtggtaacaaaagtatttttggaatagatatcaaagtgtgttaatgtcttaacaaactctgaattgtgttctgtgtgaatagtgctccaagggctgtgcaagtcagtggccctgaa

SEQ ID NO: 1242099 - DNA, 4001 bp, Homo sapiens
gcctgcattcagttctggctccacccacttactaaccctctgtcattggacaagtcgctgcacctctctgagcctcagtttcttcatctttaaaatgggggtcacaagccaggcacagtgcctcatgcctgttatccctgcactttgggaggctgaggtgggcagatcacctgaggtcaagagttcaagactagcctggccaacacggtgaaaccccatctctactaaaaatacaaaaattagccgagtgtggtgatgagcgcttgtagtcccagctactcgggaggctgaagcagaagaatcgcttgaacccaggaggcggaggttgcagtgagccgagattgagccattgcactccagtctgggcaagaagagtgagactccatctcaaaaaaaaaaaaaaagttggggtggggggggcggtcacgacaataccaaacagaaaacactctcgtgaagattaagggagagaatagctgcagagcactgaaaatactgcttgatgcttgataaggagcaagcactgggaaaatatgacctgttactactctggtgagcagttcacacagtgaagtcttacaccatctcagtggctctttctcctctctcactgcctacgagacaaagtggtcaccactgcctcctcttcacagttgaggaaactgaggccaagagagtggaggtcagtgaactacccaaggcgttatctttgtcaaatatctcgaacttagagaaagttcaggtttcctgatgaccagccctttgcttttcccaggcgccccagcctagggacccctccacccaagaacaataagcctgggcttggagggagggtaggtgccacctccctgccaggtgcatgtccgcactgggccttccgtgagtacaagtcccccaggtaccagcaggaggcagcatcgcccgcgaggtctgcacgagcgctgctcccagcgagaaatttgacatccctgtccctgtttgcacaaggcttgatctccgcctttgaaacctgcagcccccaggagaatgaaaaccggaggtgtttcccaatccgctggcccgggcggcgtcgagggagagaagccagggcccctctcaatcgctgccccctactccagggagcacaggcactcccgcgggtcagcgctggacaccaaggtcccaacaggtttacaggctgcctgtggcctgtggctgccaacgagctggtggcaggactgggtccaagtgccgtgctgtttccatactggctgcgcacaagcctacgtttctccctgagggtcgccatctcccacccagggctctgccctccaccctccctacccttctggcctcgctgtccctggggcaagaaccccggtgagcgaggtctggaacccataggcatcagttgcctttgccccaggcgcccagagccggccagctgcggtccagaggcgcaggtccgccagccgcctcgcaggttgccctcagcccctcccaggactcccggggcccccggagcatccaacagatacccaggggcagggcctggggcgccgcggacggcactggaggcagccgaccctggacagacgacaggggagagagccaagcggaccctggcaggaagggggctggaggcggacggtggtctcggaggccacggggtccgctcgggctctgctccctcacggtgggcacgagggtccggcgcccgcatccccgcgccgctccctccccacttgtgccccgggcgcccctcgcccgcgatcacagcccatctcagcccgggcctccgcagtgcccggcccacgcctcctgccccttccccggaccctgcccgggaggtgtggggacccgcagggcacccaaagcggtaagggaggaacccggcccgcacacagccccagaagcccagcgacccctaagccacgtaccgtccccaggcagctcctcgacggctagagctctcgggggccgcgagctgtcccggtccaaggcagcagtctgatttcggggaaattaaaagggcagaaaggaagcggcagcagaaaaacccccgcgctcccgccagaccagccccttaaaggaacacgcgcacctttccctcccaagggctgggctcgaagggaggagctgctgcaggcttgagcggtctccagactcgctgggaaccaccgcaaagagggtgtgcaagagttgaggccctcacgtcttgggaaaggagagtaggggtggaataggagagtttggggaggggggatccccttagaaagcctggtataccaaaaacagtgggagtaagcaggggaagcccctgtccagcattctgctaggggctaaggctgctccccacctttgattgtggaaggggtgagacttctgtattactttcttttccaaatagaaagcaagggggtgaggccaggtgcagtgagtggctcatgcttgtaaccccagcactttgggaggtggaggccggtggatcacctgaggtcaggagttcaagaccagcctgggcaacatggtgaaaccctgtccctactaaaaatacaaaattagctgggcgtggtggagcatgcctgtaatcccagctacttgggaggctgaggcaggagaattgcttgaacccaggaggcggaggttgcagtgagctgagatcatgccattgtgctccagcctgggcaacaagagcaaaactccgtctcaaaaaaaaaaaaaaaaaaaaagcaaggggttgctgatgtcctcatgcccctgagtttggccatcatgaaacactggccagattcccaactcactgtcaggcacatagcaggtgctatccccagcacatggggcttgaatgagtggccctggctgggaggggagacacagggtgggatacctctgcagcctgcaggggcaatcaggcttctgagtggtcctccaacaggggtgggcctcccttcggaatcctgctaatcagcacagccatccaggcagccgctcaggatgcctctgtttggacagggtgttttctttcctgtccagaccaatgggggccctggcctggacagcccgatgtttcctcagcagaaaagactaaggaggtccttcagctttggctgggggaagggtcgaagggtcacagggtcacagagctcagagcctcttcctaaacacagctcaagttggcccatgagtgtgtgtgtgtgtgtgcatgtgtgtgtgttacacacagccaggggcacattggagcacaaagaactgtgatcaacaggtaaactacacctaaaaggaacgccaggcttgatgggcaaaggggagccaaggtaggtccctctgcaggttcccgacaggggagaggatggacagtagggagagcacattttgctacagttaagtcgagttgaacatgccagccaggggtaggggtagccagcaggtggaatctgaacgctcaccctctgccttgcagtggggcagaaaaaagtcaatgtgtaggggtgatggtaaaagctgggcaaatggaagacactgctgagggagagaagccaaggaaggaaggagggggtcaggagtgaggggactccactccagggtcccaggagggggacttttagaaggctgtggccaacccatcccagagcagagatgcttctcccactgtctgcttatccccagggtatgctggaacaggggttcagggcaggaaactcccccgggagggagacctgaggcttggaagcacgcagaaaggcttggctctaaacccaatccacaccgctccgcagaagagagctctgaaacgggaggcagtaggccaagggacacccaggggaagggagtcccccatcctcagttcctacgaagaccacggcctgggccttttattcagaccctgctaggcccaggagcccagcaaccgcaggtctcagaaaggaaccacttccagacacatttccctgatgtggttccagcaaagccacgccctccctttggcagccctgtggccccacctcctgctgctcagaggc

SEQ ID NO: 1242100 - DNA, 4001 bp, Homo sapiens
acctgtagtcccagctactcatgaggctgaggcaggagaatggcatgaacccaggaggtggagcttgcagtgagccaagactgtgccactgcactccagcctgggcaacagagcgagactccgtctcaaaaaaaaaagaaaacacaggagagaagggaggaaggattacactgtagagtgctgtggtcactcctggtaaagttagtcaactaggaccacctgaatctccccatcacccagacaatgggtgttcaacaaaagcttaaaatcttttaatacagtatcacagcctcttataacagttcatcttgagaggggatacaatgtgtcaaaagggagagtactaagatctaattctcctttaacagtctagtgaccatgggcaagtttcttggtctaagccttagtttcttaaattaaaaaatactgtaaggtattagagtctctaatggctcttctgactataaaaagttatgtattttccgtaaatcttccatcatgtttgtagtgcttttttttttttttttttccctgagacagggtctcactctgtcgcccaggctaagtgcagtggcccgatcgcatctcactgcaacctccatctcttaagctcaagccatcttcccatctgagcctccaggacccatgtggtccgcggagtagttgggactacaggtgtacgccaccatgccggctaatatgtgctgatttttacagatcagtttaacttttctgttttctttttagtgaaatttctcaacttcctctatatatcaaaatttatttccccatttttctcaatgcccttgatcccacttgccccatgccctcctgtcactgcattccattatttcctcacatgttcaatttctccctctgttggctccttcctccgacatgctcctcttgcccaacctaaaactgccactccgtgactccttgggttaatgtctcttttctctccttctcaaaattaatctcttcctccattcacgttccaaggtcttatctttttagccaatacttttttttttttttttttttttttgcctttaaagatgccaaggccgggcgcggtggctcacgcctgtaatcccagcactttgggaggccgaggcgggtggatcacgaggtcaggagatcgggaccatcctggcttacaaggtgaaaccccgtctctactaaacatacaaaaaaaaattagctgggtgtggtggtgggcgcctgtagtcccagctactccagaggctgaggcaggagaatcgcttgaaccaggaaggcggaggttgcagtgagccgagaccacgccactgcactccagcctgggcgttagagcgagactctgtctcatataaataaataaataaataataaaataaaataaaaatgtcaaaaaagagcttctggcgctcttctctacccagcacctcccgccccaaatacgattcaacacttcccacaaacgagggttgttggaaatgcttgttccgcaaggggacagaacgacccgtatttcccatccccgcccttacactacagtctagaggcagtatcactggatgaaaaaaaggctggtaacagtctaatctcccacaaactggactgggacaaatttaccctacagacactcaaaacacagtctaccctaaacaccatctactcagatccccgctttccaagcatccacggcagaacgttcgcggctgttgcctggaaggggctcttattactctagtacagaccccaaccaggaccctcaccactcccacagccagcagcaccaactcacagccatattgttgccaccttgggcacccccttgatgacaccaccgccacccccacgtacctgattgaccatccccgaagctatgaagtggcctagcactagcccagcgccgttaggcgcggacgccgggtcccacgggttggcagcggccatggctcggacgcaccttccgcgaaggcgccaagagtgagcgggatcgcagggcgaacgcacggcgcggctcgatgacgtcacagggcgttcccgcccgggactaagccggggagcgcatcccggctactgcgggtcctgggtcttcacctgcggagccttacggcagctgagcggtgggaggcgagtccggggctccctgatcttccgtaggctcccagaggcgcctggcctccgcagagctgcaaaggcggcagggcttggtggtcgggctgtgtgttcttccgtttcttccttgtcgctcttgggtcgggccccaggagccagggatcggcgggagttgagagctggggcaggagccccagccgggaggccgaccgggtggactgggcggtgacagcagcgcttccttcccgcagggacctgagccgcggcgctaggatgggaaacagtgcgctccgcgctcatgtggaaacggcgcagaaaactggtgtctttcagcttaaggaccgagggctgaccgaggtgagactgggagggacacgaccagggaacttaaagggagagggacggcgggggcggcgaacttagtcggtgcgggattccccacgctgtgaactcctttctccagttccccgcagacttgcagaagctgacgagcaatctcaggaccatcgacttgtccaacaacaagatcgaaagcctaccgcctttgctgataggaaagttcactctgctgaagagcctctccctgaacaacaacaaactgagtatggctctcgccagggaggcttttgctagtgatcagctgttaccaggggtggttttctcttacaagctgatttttgtttttgttatgaaaccgtgcaggagggctcaagttgcgaatgccggaatccttgaagccttctttctacttcttgtaattacatctaaaataagccttataatgattgggtgttataatgattgttactgggttaatttggacttgaaagagaagaacattttggggatgtaatgtaaacaaagctacctaacttggaatgggggatggatgagaaggggaggatcttccaaatatcacaaaattgctgtcggattgtgccttgggcccctttacaaaaggagcccattatacacacaaatgctctccggcattttgatggcaccctcaccttctaaagactatgttggtaaaatgcaatatctaaaaatggcacatgtgggagttttacatatattaacaagaggcgaagcaggctgccatatagtctttataaacttcatcaaagttgttttcagctctatcacattcaggttttaaaaaaatttttctttgccagctgttctgcctgatgagatatgcaatctgaaaaaactagagacgctaagcctaaacaacaatcaccttagagagctgccgtctacctttgggcaactctctgccctcaagaccctgagcctctctgggaaccaactgggagcattacctccccaactttgtagcctacggcacctggatgtgatggatctctctaagaaccagattcgaagtatacctgactcagtgggagagctgcaagtcatcgaactcaacctcaaccagaatcaggtctagagctttaaggttttttttcctacagcatatgtgtggctttaaggtctcctgatacctgttaacctcttgtttcctaaactgccatcatagagctaagtatcagaggctaaatgagaggtttcttctataggctgaactaatttcaaggcccaaagtgccatggaattagttgagacactggatgtgttagttgtgtaggtgttttggggagggtggggtaggtaacagggagagatcatttcaaaagttaaactactgtctcacaaatcttgaagacttcttcagatcctcctcaaatatatgcccctaaccagctagccaggagctatgtcagggatataatgtggaaatgaggcctaaactgaggttctcagagtcgggagtcagaggtaattcagttttgtttttcgttttgtgtggggttttgacatctttgttacaa

SEQ ID NO: 1242101 - DNA, 4001 bp, Homo sapiens
agcccagacccgagaagaccagtgactgaacccagaggaaagttcccccagcgcggtgcaggagggggcctgggggtgtctcggagcctagaggcgccctgcctctcttggagctcccagcgcaaggcaggaaagttaactccggctgggaggcagggtcaggaggaggcatgcctgccaccgcgcagggcacccacaggatcatcgctgtggccccttacctgaagtcactgtaggggtggataatccaaaatccggccgacttgaccctctcctgttcgcgctccacggctttctggctgccgaacatccttagggagaatttgttgaccccgggttggagcatggccccgaactggcgctgcatgaagccggcctggcccaggcgcacctcggcctccgggaggatctggtcgccggcagccgcgcctccctccactttgatagcggtgtccaccgagggctgctcgcaggaggcggaggccggctgcggtggctgctggggcggcggcggcgaggctgcgggctgcgccgaggcgccggggcgctcgggctcggccgccaggcctgggggcgtcctgtcctcgccgggggacgcgtcgccctcggcgatgagccgccgctcctccgcggagtcatgcaggtgtccgtgactgctgccgctccccgtgccgccgctgccgccgccccggctgcccagcgaggccaggctcccgcggaagcgcctgcagtcgccgttcgtgctggacttgcccgcgccgcgggccggcccttcgctgtccgctgccccgagggccgagctccgggactccgtgccacccgcggccgccgagggggagggcgagggcagtggccgcagccggatgctcctgcggctggggtcttggcggcccccggccccctcctcctcggcgtcctcttcctcgtccatgatccacgccttggcccccacctgctgcgggaggctgtagagccgcttgcgcatggacggcggcagcttgtccatggcgccaggggccggggtcggaccgggccgggggcaggagcgcggcgccgcggacgggctccaggtccgcccgccggtcagtccgcccgtggggacgcgtcctttgccgccggcgtgggggcagcctcaggcgcccatgcttgggcaggctgcgcgccgcggggaggatcctagtcccgctccgagtccccgggctcgccgcgctacacctcctcccgggcccggctgggcgcggggaccccgcgctcccttcttgcctccctccctccctctggcgttcaggggcgcggcgcgccgcccggctccaggcgccccgcccccgcggggaacaatgggcgccggccggagaggctctgcggccgcggcgctcagggaaccgctccggagtgcagagcgcacggcccgcgcgggtcccgggcgtgcgtcccgcgggagggctggctgtccgtctgtctcgccgcccgggctttgtggctggccacccgcgagctcgcctcgcctcctctgccccggcccgtccggcccgtcccggggctcccgccgcaaccgagcggagcccagcgacccgccgggcttacatcagcggccgcctcccccgaagcgccctccggcagcgctcgggctcccgcgccccggaatattcatgaagccgccgcagctcgcgggttgccataggagcggctccagcagccgggcctgcctacctgggcttcttaaaggggcagcggcgcacgggccgggggctggaaaggggcggggggcgggcctggcaaggggcccaggttagaccctcgctagaccttcggggccggggtgagaggtatccacactgctgcgcccttaaatctctttcctgggctaagctgggagtgcgccccaagtctgaagctccggcttcagttgcgaattccccatcctaagattgaagggtggggggtggcttcccaatttctccatcaccaagctctgggctcgcctttccctggcatttttgcccctcagctgggtctccgactttcctcttgggaggcgaccgggttcgtctggatgcagagtcccggccttcccgcaaccctcctggagagggggcttccggaaatgcgccgcgtcggggaggctcccacggttttcctgtgacatgggcagggtgcgaaccccgcgccagtctttcccctgcaaagcctcgcagcagccaggcaaggagggcgtggggaaacagggagacacgcacagggcgcgcgggtgggacccagcccttcgaggtaagacttcgaggaaatgcgccggcaacagtgacggatgcgagatccgaacgccgacctccgcacgcgcctctccctcggtagttccgagaaagggacaagccggctgcagcggggagcggttgggccggttcctcggacgccccagcactctggaactggctttggagccccttctccctgtgttcccatccacattatgacacctactatgtggacccacgctgggtgagttcctgttccacccagtcccctacctgcacccccaagcagctgcacagcccccactcccttccagtctgcagcccagcccccttccccccaacccccgccaaggatccaactgtgtgtcctctctcccagtctctcccagtgtacagtgtccgggcttatggacagatttcactagctcagcctaaggtatagccctaccccctccaacaccatggacagcctgataccccagattagctcagaaatggatagggggacagattgggcattaaggggaggggagttgtccagagaaggctggagccgaggttaatgctggagcggacacacagcaaagtctcacaggagggaggcaaaaaggtcccctggctctgccatctctctgaggaataacatcaagtttttcttcaaatgatttttttactctcattcttagcccaatgtgaccactttcgcctcctccatccagagtaggaatttggagagcaggatgcggggcgggcagcctagcaggggctcttctgctctacccactggaccacaggacctcccacagtgagaggaatgactagggtgatgacatcactggtagctggcatttttacttttgagcagctctgagctgacagttctctgcacagatgctggaagcctaatccctgagtgtccttgggtctccttgagaagaagtgttcttaaagagctgtgagcccagcctgccctggtctaccagccacaggagggaagacctccatttaacacacttctttgagcttctttgtctagctgggagttagtctgccttaaccccgctcaggaagtcagcccatataggcttccccatgacctatggtagagacatctcctcctctgggaaccctttcctaatcaccaaaaccttggtcatgtccctgcctttggttcccatggcccattagctcctgtgaccctgagcactgattacacagtgcagtctgtgccctgagggtggagcaggtccaccttatctcagggacctctccaccaacacaagggtggacagaaagcagattaataagtttcaactctacaaatgagtgagggaccctagaagttagctaatggcattggaggggatgcttggaggagatggaggataagaccaaaattctgcttcctgggatactgctgccacaggccggccaggggtcaggatctcttaattccaccctaccagcacctcactcgccctcaatttcattagtggcacccattcacgaccatctaggaccaactttaggtgcagcaatgactattagataaatcaggcccttgataaaccctgatgagatctggcttctcctgcctcctttatgtggaaaccctaatggaggacactggtggtgtgccaacagtccaggggacagaggaggagcagccccaggtcttgcccttgatgggcttcaagttgtgaggaagctagactcattctcaggaatagggcatgaaaatagagcagg

SEQ ID NO: 1242102 - DNA, 4001 bp, Homo sapiens
attttctttccccttcctttatccacttcaattttgattgtctctcctacctttctttccttctcagaaacagaacatctattaactattttataggttcaatagaaactctatagctctttgtatccaaaaattgttacacacacacccaccagttatatctgttagcacagatagaaagattccatgcccagttccgataaaggacaaaaaaatctattttttcaccatccccattgaatcagttattattcatcttttttggactcatatgaggacttaattcaagaatctgattaaaactgtaggcttacatatacacagaactttgtgtataatttctgaggctcacagaatccctaaagcacaaccatggatccagaccaagccccctgccctggcctgggaaatgtggcaccaaatcttaatgactttctctccctcctgctgcctccatcaacacctcagtgcttaggatattttttagatgctaaaaaaaaatgtatcaagtgaatgaacatatgagtaaggaaggaaaaaaaagtcaagttgaacactctgaaactattgcaaattatttattctttcagattgcagtcttcagtgcctctgttgctgtgtgtgcatgtgtgtgtgtgtacatatctctttgtctgtctcaacatccattccttagtactccctgggctgcttttacctaggagaggggactcagtttctcccctctgcatcagcttatgcaaagttcttaagaacagaaccaaccccagacaaaacttatgagacaaaggtagatttccacaccattctatcttccttctgctccccttcaaccctctcacatcctggttcttctccagcagggccccaccagagatctgagagctctagacctaaccctccactgatccaggaacagtgctaaatgtatttgtgttccactcagaagataaatatccacaggaacttgctctcagctgacagtgccttaggaaagcaatggaataagctaacgcacactaattagtgagtaggaggatataaaacattatagaaatagacattcaagattcttttttaagcaactacctactttcctgctaagggagatccatgcctgagaactggataaccacttggttttgcctgatacagagtaggcacctactaaatatttatgaaatgaatgactaaatgaaagaacactgctgatagattcacacatgaaggaatgaatgttaagaaagaaaggatttgcagtgattacagaatattgagaaaatttttttctatttcagaatatgaacaatccccttttcccatctagtggctcagggatccaaatcctcaattttgtgggaaagtggggaggaaaagcaaggcacggtagtgtggacatatgtgagagtgggtatatgagagggagaatgaaagagtggttgagaaaagttttacactctgatcccacattcctttcgcagaaaaaaaaatgttgctggtgccaactctcagaaggcaattctaatgctcccatcaaatgtcaccccagaatctaagggccacccaccagcagccgttcctgcaggagtagcagcagggaagagggccagggatgcccgttgctcacctctctctctgtactcctcaggctccatcatctcccttgggctctggctccttctcacagatggacacgcaggaggtggaaggcgtgaaaggcgtggagcagcccggcttccctcttgccagtcctgcgcactccctggcagccagtgtgggccctttatttaaagggttctttctttgaccttagctccgcccttcaaagtcccttcctccaggtttaattaattccaccctttctttccccagtccttgtagaaaacagcgaccacaactttgactggtcaagagagccaggataaaaggcgcttctaaattaagcagtgcacttagcaacccaagcctgcaggcagcctccaggtggatgccgtaaaagagccctcagttctttctgcccctggattcagacaatagagctccagcctcagacaagctcccagctcagtagaccagaataaggccaagggtatgcagaaaaagtagcacaaattattagtattattcctgcccctgtttccttatcagcagtagggagggaggaacaggcactaatagtgatgccccctgtgcccaggaacaggcagaagttatcattgaccacaatggatttttctattacaacatactatctgttgttgcaaagaatgaaaaaacacagttataagccaaaaagaatagaaattaaaacatcaccccaaattaatcacttttagcacttaaagaagtagaaggggggcgtgtaaagggacctgcagaaacccctgtagggaggggaaacactatccttggggtttgatttctgagtaaaaagtaatccaacgttttcacgttgctaaatgcaatagtctttcttgtttatttgtttccagtcgtccttctggttctcttggtggcattttatttgttactacttcatccttgcagctcacagtttctctgggctttcctcctacatctctggctgtttgtttcctccaatgctggcacacctcagggcattgccctcctttcatctttctgctttggtggcattgcccatttctaaggctttttttgttttgttttgtttagacggagtcttgctctgtcgcccaggctggagtgcagtggcacaatcttggctcactgcaacctctgcctcccgggttcaagcaattctcccacctcaacctcctgagtagctgggcctacaggtatgtgccaccatgccccactaatttttgtgtttttagcagagatggggtttcaccatgttggctgggtttgtctcgaactcctgacctcaagtgatccacccgcctcagcctcccaaagtgctgggattacaggtgtgagccactgcgcccggcccatttcttaggcttgaaatgttacctatgtgatatccgtataggtttaaacataccatcaggccctccctgtcttttgagcttcaaaatcttatatccaactgcctttctgacaaatcctctcttatgactctgaggcacctcaaacttaacgtattgcaaaactgtctttccccaaaaatatgccccacttctagtcttccccatctcagttcatcatctctccattttccatccacccatctattcaccccttgaccgtccattcatccaaccactcatccatccaaccaccatccatgcatccatctatcctttcatccatccattcatccacccaaatgctgaaggcataaacctggtgtcttccttccccttcactttccctgctccctgcccaattcaatctgttcagattcagttctatttccaaaataaatctagtctgtcaaattctccccatttccatgactaccaccctattccggtccaagccaccattatccttcacctagactaatgcaggaggcttctcattggcctgttactgaccatgggttcttgggctctcaatgtaatagaaattgagaaggccaaaagagttttcccagacagggcattatcagagcttatgcccaggcataagggagacagcacgagagagagaattctctggcaggctccttgaagagagtcaggaaagtaattttaggctaaaataggtaggaaattttttaattactactgaaaaaactacagtgagaaatcacttcatacagactatgatgactataataaaaaagatagataacaacaagtattggtgaagacagggaaaaattagaaccctcatactttactggtgggaatgtaaaatggcacagccattttggaaaataatctggaagctccccagaaagctaaacctagagttctttatgactcaacaattctactgctaggtgtatatccaaggaaaatgaaatcatgtccacacaaaaacgtatacatgggtgttcatagcagaat

SEQ ID NO: 1242103 - DNA, 4001 bp, Homo sapiens
tgctggccaggctggtcttgaactcctgacctcaagtgatccgcccgcctcggtctcccagagtgctgggattacaggcgagagacaccgcgcctggcccccttccaactttcttaacgggaaaggctgctaccatttcttgagcacctatgtgtcaggctccatcaggcacgtcacagtctaacctgataattacacaacccatgtcactgacaaggaagccaggttcggaggggttgaggcccgcaacctgagggaggtgactccgggacacacaattagtcctgctttgctgaaggaaagatatgcagcccaccagtcggaggctggagaaggagcagcagcagcttaaaccttaacccagagttatttttattttccagaacgtgttaggaactagtacttaaataatctcaagtccctgaggggccagagatcccaccatgcaaaatagcaaacagacccaagacttggggagaggcggtgagtgcatcagaaatggatgggtacatctgattcccaccacgcggggctcagcttagttagcaggagaccttcagactgagaaaaaatgcaagtctttttttggcctctaatatctgggaaggatggagggagctcaggagacacagaaaagatggcgtatgaatcctgtccggcctgaacgaggctggagttgtgcctctggatagcttcaagcactgatcagattgtcagcccccgctgcttgaacagatgctttagagcctcttccagttgccggtttgttccctgaagccccttcaccacctgcgctgcccactcgaagtattcctggactcgatgttctgaccatcctgcataagagtcgacagaaacttgctagcgtgatgtcaaggaaagcactgccttttccccacttcctggcaagcttggttcaaggccatgagttcctgatggaatgagctgtcctgaaaacttccccttggcccagctattgtatttttactgtatgaaagaagatcaaagagtggtccagtaggattaatttgggaattaagaatgcccagggtttttcaggggaactgaccaacatgtgtcttcagaaggcggcatccccctcccttttcccttacagcccatacgaaagcgtaccctctggggtgcagcgattcaggtccctcagattgtacagcttgtctgccagcttcaccagtttggccccggggctactgtggggcgcttgctccacctgcagcctctttctctccagcttgggcagagtcttgtcatctgttacctcctccaccaggcgccgcacttgtgccccaaagtgtagctccacctcatccagggtggtgtctgtgtcctccaccgtgtcatggagcagggccgcctggggacaagttcccactcagccctgagatgtcagccaagggttgcccattgctgaatggggcccctaatccccatcccaggctcctggcagagaagggggaaagttacctgtaacaccacaatgtcagtgattcccgcctcgtgggtcaggatccgtgccacacctgacggggaggggcaaagcaggaagtcaggtcggaggtagtcccaaggcggtgtgttgtgggttttggagagccagatgtggccccttgtggactctgactagctgggtgaccttggtcaagtaccttaccctctgggagccaaccgacaaagggaacgatcatgcctaccgttccaattgttatgaggcttaaacggtatatcgcactaagcttgggacaaaacaggtgctcaatgaggtgcacgccccccacgtttccttcccagtccccaccacccaggtgccgcagccggcgctccgcggccgacgcgcccaccgatggggtggttgatgtagggggtcccctcggggtccttccgccgctgctgccggtgcttgcgagccgcgaagtcggcagcctccagcagctgcgccgcctcagagcccatcgcgcggatggggccgacgactgcggccgcaggggcagggacggaacgtttacagcgccccctggcgccggggaggcccggggatcgtggaggctaattcagcgggccgagttgggcctgccccagatgaattcctctggagctgaccggcccgcgcagagagcaagtgatgtggacagctgccttcagcatcgcagcccccagctcagtgtgctctgttgggggtgcaagaagaacataagcctggctctttgggagcccacagtctgtggaaaagaggaagacagacaagaaataaggcagtggcctcacagtgctctgaatccagggtggccaaggctcaggggactatgggagcgggaagaaagaacaatccccacaccctcagagtcagagacagcttctcccagaagctccccccaagaaccatcttcaacctgtaaaagctctgaaaattctccaagtgttctaaaaatagttctccctgtagggatgggccaggttctgtgggcaggggagtctacctttggaccctccaggagaccctagggcctgacctgaaaaatcagagccttccctgggagccctgcctaattgcttcagacttaggctcccaggtagctgtgacgtttctgcaggaactgcctttgtttgtcctcagtgttgcagatgaaatttgccttgtcttcttatgctatgagagctcctatttcagtctctaggcatcttctgtgggcccctggggtgatgagtgttgtcactgctgtcctgggagcatgatgttgtcaggcctgggtaggcactggaataacacttaattctgctggctggtggccttctggagaaattccctgccttaggggcagctgaggggtaagagagacctggtgatccccatagaacttctctgtgagagggggttccctattagctaagtatactctaatcagacatgtagcttttgtgttctggctggtagctggggcagataaggctcaggggaaaggctaatgaaaggagtcacccttggttttcagctagtcttggtggttgccacgtagcagaggttagggagggaagccccacatgctggaactgaggtctctgggacctgaaataggagggtcagaattcccagagcttccatggcagcctggaagttggagaatgggtagaaacatatttggctgtaaatgcttgtttgttcttcatactaatggctcagctgctctctcatccctcattctgtcctctagtcctttgagccttctctccttcagcagtttggcaatgcaggccccacgttttccaacaggagacagaaacccagtccctgtcatctctctctaaaagcctgtgatagagaagcttcaggctcgtattaatggtgcccaagggccttggggctttgacttttatttccttattgtctgcagtcacggcctagaaagagagatgttggggttcccaggaccaggacagaggtggtagtgaactctcatgggcatccagagaaggtcaggccccttgctgacaggcctatctgtggggctactgctgctcttcagctgggtgacccttgtccagccaacctctctctcaggtacagcacttacccctgtggcccacctgcctctggtgctatgggctattcctgggaactggaactgatggggatgggtggaagggcatcttttcttctggtaggggctgatctcttttactctccagtaggggtggagtgagctgtggaaaggcccctcctgcttgtctctagcacccccacctctctcttcagctctggtccaccaccctcacttgtgccagaccacccgggatgtccatggccgtcactaccctggtttcttttgccctcgtctgtctgattctccagaggaagcctactgctgccacctgcaggctgcagggggctcctgctgcacccgggctgaatttgaggccctgtaccaagtcaatctgtccgctcttccgcccccgcccatcctcaggtgagatctccaaccccagag

SEQ ID NO: 1242104 - DNA, 4001 bp, Homo sapiens
ggatatgcagacagttgaaatgattagtccataacagagcctgaaccagacaccaggtcccccaattcctggcctagtgttctttccatttgacaatcatgccaaaccaaatatttaaaaagtgattatgtccatccattacttcaacttcactaaatttcagtctggccactcgtgatgtcacttccttttgtgaatgggtgtatttttttttcttgatcttgctatcttcacttgactacaatacaacattttagagctcacactatatttatgccaattttctccatgactgtttccgttcctaaagaataccaatataatctctagaatgccttgaccctccttttcacaagatttcttatttcaagcaatcaactgccaaccatacaaaaataaaaataaaaaggatttcttctaaaacacaaagcacacatggcagtgttgtgtgtcttcctcaaagagcttaataaaaattgtgaatgctatgtattacatgcagacgctttctagaaaaagagcccaacgacaaccttgttatgtaggaagagagagctattgtggactgtagcaggaggccaagaataaggtttgagattctacctaaaacaaatatggaggtggaaaggcacaagaagcttgctggacccaccagtcagaggtaggctgcaagctctcggctatcagaggtcggtttaaaagaacgatgggcaccagagaggcacgtaccccaggacaatgatagggcaggcggggcaccgggaatcgcgctcagggaaaactcaacaagtctagaaggcaaagagatggatgaatgactgccaagaggctcccgctggcctctggatgaccactaccactttccaggatttactgcccgccggcactcgccggctcgcggacagccgctcaccccgctgccgtacctgccccgacgttcgcccgggacccagggtatccaccaatgaccctgcccggagccgaagcctccgtcgcaggcccgctgcccggcggcgtggcttcccggtcggcaccggctttccaggaggaaggcagcgtcgggcctgcgggggccggacccgccttcgaaagtgggcggaaggatggccgccctggcggagtgcgggcgaggccgggagcccttgcctcagccccggcccggtcttcttcgtgccgcgccgccctcagccctcaccacagccggccgcgagctgcgggctcggggctgaggcgatggggaaagggggcgggcgcgccatcatgaaggggaaaatggtgggcgggcgggcccgcgcgcggccgcggtactcacccgggccggccagtgcgggtagcccttcatcttggcgaagaccaggtcgcccgctttgtactcgcggggccgcggacgcgccatcccagccgctccccttcctggtagtccttggtcgccgcgaagatgccgggaggccgcccccccgcgggccgacgaattgcgccgcgctccccgcgggcctcaagccgggcggacgagcggccgctccgacgaggggaagcggcgaggcggcggctgaggcaaggggtgggcggggggcgcagcaggcccggcaaatcacggcccggcagcgggggaggggagcccccggccgttcggcgctcgcccgcgtccggccgcgccaaggtccccgccgccgccgccgccgccgccgcgcgcgctgctcaccagcgccgcgtcgcctgcctcatgccgccgctgccggtctccctcccgggctcccgggcgcggcgcgagcgccgggcctcgcgtctgctccgaattccttctcgggcagcgaccgcaaacacgatcttattattgttctcgcgcgcgctcagcatcccccccccgccccgcttcccgcttcccgctcccctccccttccctcccgcgcgggccggttaattcctaggtacacggccggctttcgcggagaaaccgagcgcgccagcccggcttctcggctggcgggcgggcggtgggcgcgtcctcccccagcaccgaagcccgcgccgggcgggcgggagtgcctactccggaggacgcccgccgcctgctctcttttgttcttggcccggagctgcctgccgcagcccagccaatcaccacccggccgcccccttcccctcccgtccgtgccactctgggggttctccccactcgcgccccccgctcccacgcccacctcccgctgactcgaccctctcctggctacccccagccagccacttccgcggctgctctctggtgagtgggggacaaaggcgctccaggcctgggggacggcggcgcgaggggaccctctgctgggcaccaagctgccggaaagagcaccgctccggagtcagcgaccttattggattcttgccccaggtctgcccttaacaatgcagtgtgacccacctagggcgagctatttaatcggagtcatgggaggttttctcatttgctgagtggcacagacgggattcgaacctgtatccacatgagtccaaagtccataagcgattatgtttctctctgtgtgcgttttctaggcctgcagtgtttgtgaaaaggacttgcactggccggtcacttgtttccaatcctggcaaccttttggacaacgtttttgaaattagcatccctttctggagatgtatgtacatatacagttcattagctctagaacatgttcatttaccactattttactctaaattccctagctggctgctttcaaagacattttgagagtaggaatcttcctaacactctcttttgtgaggagtaagtagaataattcaaggaatcgtttggagtctgtccaatgaacgaatgctgcttctttaatcatgctgtaacccacctcctttaaggggtcagctggcatagctcctaaatgctgctttctgtggccctcaccttgtcacacggacagttctcatttgtgtctgttctctctcccttttacagaagctacagttttccccaccatccgcccccctctctggccttgtagaatggtgtgtgtgtgttttaactcctgctcttgttctgtggtgctgggcttcctatgatggggctttaaagtctctagatttcctgtggattgtttactttgttagcagtgcttttacattactttactaatgcatttccttactacttgcatctcatgatttttcttttttttttttttttttggtattgacctgtactcacctgtcctacaggttcgtttttttcctcttttctcactgtggaagatgagtctaggtcctctttgcctcagttgtgatgatctgctaacatctctctctcctagaacctaccgtatgcagctgccatgatgtcacgcattgctcatgaagctgtagaatgatttctgtatcctcatatgtcaaactcacatccctctgactagctgtcaaagccctagctgttgcctgcttgcccctacagtccagcctccctgtgggcacggggtggatatagggaagaggagagaaatgagaggggaaaggttgtcagttggaagccaaccaggggagggcagtaaacaatggagggatgcgatcacagttcaggtttagacattactttggtggccagcatgggactagacttgagggtgagaggcttggggcaggacctgcattgatattctctccccaggagagataagacaagggctgagacagagcttgccgattctttgggtggtaggtgggtaggaaggaggaagagtagaaactgattccctggtttctggttggagcaacaggatgattagttttgacactcaccaaggtgcagaaatccatgaagaatgggcaggtttagagatgagatcttgagtggtttgggatgtgttgagatttccatgggccatccagagagctagttagtgggcagctaaatacacagcttagagaaagtggtcaagacagaatgtagacttttgagtgatatcagtatataagtggtcactgaaaccata

SEQ ID NO: 1242105 - DNA, 4001 bp, Homo sapiens
tgactggaaatttaagaagcaaaatgataagaaccttagggaacgcaaaattcataaaagtttagaattacaagaggccttaataggccatttaatccattccaataacaacaaccccagatgacaatctatcctatttttaaaaggctccagatttccaacctccctagatatctcattctgccatacaaccttgtcatgtgatttgggggaaatattatgactgttctttgcccttcctaatgctatcttttctcaaataatatagcaatacatcttaactcacttccaagatatataaatgtgtataggtgcagaatacgtgtgtgtgtgtgtgtgtctctatacatatatacgtacatttatgcataagacaggcacctaggacattcaattttgcttgtataaacgcaggctatggaaacacatatatcaaagagacatactcatcccacactaatcacaacaggcactatgaaacaatgtcacagaacaattttggtctaaaaatatccagtagaaatcaatttcataaaacctgaggtaaataggtttcttcccactatgaataatcatagtttctttcccttctacaaatactgccccattttgagcaaccaccactaacagaattgtaaaaatataatatatacataggtactagacccaaacagacaatgttttaacgtttgatttttcaaaccacttagctaacaatcattttggaaaagggcccagtgaaaaagatagtgatggcagagttcagccagtgataatgaactagcagccagttttaatcaagcaggccagagaactgattcaaataaaataaatcatttttggaacaaatatagaatgaggaagtcccaagcaaggataaaaaaaaatgtgtctgttaggaaatacaataaaatgttaaccatgaaatgccacctctggagatggaattacaaagatgggttagtttgttcagatttgttattcccatcatttaattatctctatattctaagtattatagacatttcttaaactaagacaaatctgtccctgtgtttcacagctctctaagataacatgtcttttacataacctcctgggagaggtggtacaagctcctgtcctcctcgtgtctcccagtaacctgccacccatcacagaacagatttcaccatgttccccggggtagctcctgtcatcaccatcatcatcctcatctcacgcttaagactaaacaatgcgccccgcctcgcctcccggttgcaaaggctttataatttgttgttttattggggcgggagatttggagaaaggtttagcagatgatgagctgccctcacccaaaggcagaggagaggaggaagacacgtcgtcccagcctccaccccgctaaaggcggccggcgcctggggacaccggggtcgcggcactccccggaccctgagagggagtcggccgccgcccgcggaccgagccccagccggggcagaggagctggtcagcagataaaggaatgaagcagaaagagacgcgaccacagcggggccggggcacagacgttgtaagccgctggaggggcgggtctctcggccctctccgcgggcgcctcggcttctacgctgctccgaggcgcccgggcggcaggaggcctctagagccggggacccgggggatccgcggcgcgccaggagggctcccccagctcgcctgccgcccacccgggaccccagcagccccgctcggctgcagtcccgaaacggccccggccggccctgcgcggccggcaaagcacacacgcgcgcgcgcacacacacacacacacacacacacacacacacacacaggaccaggaggacggtagatgatgcgttaccgtacgtggctctggagctggcggggtggggcgcggctccggcgacccgagcccggctccgcagaggctgcggcggtcgcgtcctttatttttgctgcagcagcagcgacttgtcaaagggaaagacgtaagaggcggcggcagcagcggcggcgtcaggcgagtctcacgagatttgggcggaactctcgcgcagccgggagccctcgccccgcccaacaggcccagcgcgggaggtgaaaggggaaccgagaggaaggcggctgaggtggagttgggggttgagcgaaaaggggaaagggatttgggagcgaggggagccaagctaggtgctggggacactttgctaccgcgcggccctcacccttcagccgtcgcggaatccgggcagccccgaccgcctgcggggacctgactccacagatgaagcacaattgggggcgtttcacaaagggtggtgaggagtggggggccatgcagtgcgcccccttttcctcgtggtgggcagggaagaccccgccgccaggcgaagggacacgtgttacggccggcggcagggccagggcctcacccctttatctccgcctcgcacccggcgccccacgctctttatctctcatcgcagcggccccggccctccggccggctaagttcaatcacataaaagcgtttcacttgacctactcttccaccttgttcatgtctttgcgccttatgggactgccagaaccctgcagatgccagggcctggctcctcggttttcttttctgcttgggaacacagtagtgtcctttgggtgacttacatccttgatcatgacctcgacctccacgtgaaaccccatgaggggaaggacacagactggctcagtcctcaccatatctccagcgcctaacataggtccaagtggacattaaattgttgagtgaataccccatctccatcttcctccttctgtacctggttttactcctttccagccaccttcatggtgtctttccttccagatattctaacgagcatcaattaaactgaccgatgacttggggacaaaaaatagagttggcctctgcgttccagaagtttgcaatccaattggaggcgtaggagaagcacacaaacatacaagccatgaatgtgtcactaatgtaagaaattacggtatagacagacgagggagtgctttcccatggttaaattagatacatgtttgtgtgtcacatgaggcagtttagtccaagagttaggagccatgtgcttcactgtcagacactggtgggaattctggaatcccacttaccccaggtgtgtgaccttgggcaagttgcttgacctctctgaacctcagttccttatgtgtcaatttataatgccagttcttgttatcacaaggttcctctgaggagtaaaatatatgtaaagctcacatacggcacatattaagtactcattaaatgatgggtcttaggtgtgtagcttttaagtttctatgtataaaatgtgtatttctggtaaatgatgtaagggagtagctacatgaggagtgatgtcattgttgctagtgctttatgatctgggtattgtgtgtgaagcatactcaaaaacaacaagcaaaagctcctccttttaacttgttgatgtcatctacgtcactcacaaatatgatattctgtctttcttgaatttgtaaaattgtactggttttgcccactttttctttttcttttttttgagatggagttttgctcttgttgcccaggctagagtgcaatggcaccatcttggctcactgcaacctccgcctcccaggtttaagcgattctcctgcctcagcctcccaagtaggtgggattacaggtgtgtgccaccatgcctggctaatttttgtatttttagtagagatggggttccaccatattggccaggctggtctcgaactcctgaccttgtgatccgaccgccttggcctcccaaagtgctgggattacaggggtgagccaccgtgcccagcctggttttgcccattctatttcaagaaaaggactgcttactttaaagaccaatcaagagactccctcttttaccatctccttagcttccaccctcagagctgtgtgtaaaagagaa

SEQ ID NO: 1242106 - DNA, 4001 bp, Homo sapiens
tgtccaggctggagtgcaatggcatgatcttgacccattgcaacctccacctcccgggttcaagcgattctcctgcctcagcctcccgagtggctgggattacaggcatacaccaccacgcctggctaattttgtatttttagtagagacggggtttcaccatgttggtcaggctggtctccaactcctgacctcagggcatccacccgcctcggcctcccaaactgccgggattacaggcgtgagccactgcgcccggccacgcaacacagctctaaacactggactctcatatctaccaacactcaatacctgtttaaaaagaaaaaaaaaattaggaaggggcaataacacttcagtgtaagtatccatgatcaactactgcttaacagcctacacgacttttgatgaacagtcaaggcacattacttaatacttaaaatggttaaccttagggagtaggaaaatacagacacacacaaaatatttcaaacacttctttttgctgctgataaggagttccaaaagtagtttttccaagccatttccaaataaaagtagattgggtgtaaataattgtctatcgaaatattagttattatttatttaataatgtcctgacaagcttgcagttatctcattaaatcaaaaaattaggatctaaggccaacattgtttcctcacattcttgatgtgaaaatctgagcactcctcttaataaggagttacaaagacaaaacaaacagctcaactgaactaactcttgtctctccagaaacacaaacacaagacctcataaaatgagtgagtttctataggccataattactgcaacttacttctccaattttcccctccacagttaactcaacagctcaaaaacgatcagtaacaaacaacagtcaccatgatatggttaggagtgtggcagatttcttaaccagtaataataaataggaaaaaaattttgcctattaatagatctcaagtttcgtgcacttgcaagaaactaattaaaaggcagccgcgcacgatctacaaaaacagccataaagactgttacattttaagttacaggaaataaacctgctcctctaattcagcaagatacaactgacttccccttacataccctaaaaaaaagccttacacgagaaatttaaacatggaagcagaaacacaccaagaaaaagacatgtcaaaccccacctgtatatctgttttcaaccatttggagtcgaggcgagcctgggcagccaaacagaaagattcagagggcatcttttctccagcttcctcccaggtctcaggcctgcaagtaaacacatacgctgaagacctaacgctttttaatagtttacaaagacactcccgaaagccagaaaagaaaaaagagagagagaacagaaaggggggagagaagagctggtggaggggagagaaggggagagagggaaagagggaagagatggagggagagggaggtggggaagggaaagcctccttccaaggtaagcagggtgtgccgagtttctgcaccacgctgacgagaccttgagaatggacggtcacaggaagccaagtcacaatgtcatccccctgccctcaaatccaagaagtacacacacataacagggagcccatcgttttaacgacaaatgacagcagcatgaatctgccgctttaccccacagcagggcgcgtgcgtgaaacaaaaaattactcaaaaggatcgcctgcagaaaaacccacagccaccaccacttaagagatggagagaggcccgaggctgccccgcgggtggtccgcgcaggccccggtgcggccgccgcgcccacgcccgcctcccgggctcggccgcccgccagccccgcgcccgtaccgcccccgccaccggccgcccaggtgccccaggccaggacctgacgcgcagggcccggccgcctcgcctcgccggcgcgcggacgcagcctcccaagagccgctggctcagccggcgcccgcgatcccggcgcctctcgcggcccgaggggcgggccgacgcgggactgccgccccccgcgtacggccaatcgcaacgaggctgctccgtgggcgcagccaatggggaagaggagcccttcgccgctcctcccgactctcccgcttccagcaatcccgcttatcttcctacttggagcgccctggctgcggccaaggccaacagcgggcgccggaaggcgggatttccgccacacgcacgcactcccgcactcccacgggagactgcttggctcggagcgctcttgatcacgccgcggcgggtggtggcgctcacactaactatagctatccagggcgcgggtcgagtggcgagaccagctcccctgggtatgagaacgcatctttgtgcggtcggctggctggggcctgaagagcttcctcctgtgtgttcaactgaacgcagcaaaagtcttgggcagattccatggagcagctgtggaagcactgtgcagggaatcgaagaaggaaacacctccagcgaccacaaaacaaaattgaagaactataaaacaatataggccgggcgtggtggctcacgtatgtaattctcagcgctttgggaggccgaagcgggaggatccctcgaagccaggagttggaggatcccatgttgccagactgggcaacatagcaagaccccatctctaaaaaataaaaataaaaaaatttaacaattagccaggtgtggtggcacacacctgtgatcccagctgctcgggaggctgagacaggagaatcgcctgagcctgggagatcaatgctacagtgagcttagatcgtgccactgcactccagcctgggcgacagagtgagatcctgcctctaagaaagaaaaataacggccgggcgtggtggctcaggcctgtaatcccagcactttgggaggccagagcaggtggatcatctgaggtcaggagttcaaaaccagcctggccaacatgatgagaccccttctctactgaaaatacaaagattagccaggtgtggtggcacgtgactgtaatcccagctactcgggaggccgaggcaggagaatcgcttgaacccgggaggcggaggttgcagtgagccgacattgcaccactgcactccagcctgggggacagaggctgcaccactgcagccttgacttaccgggttcaggtggttctccacctcagccttgccactagctgggactgcaggcacatggaaccacacctggctaatttttgtagtttttgtagacgggattttgccatgttgcccaggctggtctcgaactcctgggctcaagtgatccgcccgcctcagtctcccaaagtgctaggattacaggtgtgagtcactgcactcggctaatagtaatgaactttgaacagaaggaaagttgttattattttcttggttatgttctatctatattttctaatttttctaaacatgtaaagataaaattctaaaaactcagacctcagaacaaaaaaattagagtataaatatttattttagttaacttgtacaaatttggtttctggaaaaagaatggaatagattttctgagaaaaaaaatccaccactttggccgggcgcagtggtttacgcgtgtaatgcctgcactttgggaggctgaggcggtggatcacctgaggtgaggagttcaagaccagcctgaccgacatgaagaaacccctgtctctactaaaaatacaaaaattagtcaggcctggtggcacgcacctgtaatcccagctactcaggaggctgaggctggagaatcgcttgaacccaggaggcagaggttgcagtgagctgagatcgcaccatagcgctccagcctgggtgacaaaaggaaaactctgtctcaaaaagaaagaaagaaaagcagactggctgaaaggattgaagaacaaaatatgatccaccaatgtgctatctacaagataaacattttaaatacagaaacagattgaaagtaa

SEQ ID NO: 1242107 - DNA, 4001 bp, Homo sapiens
agagtgcccagcactgggattgacatataccagttagacggatttttttttccataaaccaggctcaaactcttctaaaccaaaatcaacatattctgagtgccaatcttgggtaaggcactctattatttgtcatgaaggattcagaggaaaatgtgatctaccacactcaacagcaggcctcttatcctctccagcttaatgcattttaccagttaaggactaccctgatgctgagattgtgtttctttccccaaatcaaatgtcactctctaagggtcatctgtataattaaatgcttttaattctatatatcaaatgataacttttgtgaaagtaatttaaacacacttgaaacatcatataaaatattactacaagacttaaccgtaaatgtggctcccacccccataacatctatacaatataaccaaagagctagattccagattatcaagaaacttctaaattttgaacccatgcagcagaattgtattcctttacattgttggctcgacttacaaatgtgctgtggaataattatcctcaaatacaattttcagtactgattacatagctgcctaaaagaaaactgttagccccttccattttatgtgaaaccaatgtctaaagcgctcttgactcttcaaccccacattttccccaccctcatccctcctcaatccccagcccccactcatcacatccactagacctgaactttgaactcaatcataattctttgtgcctctgctcaagcccttcttcctgcctggaataccctcttttcagtcccggctaattacatctaccatcccattccaagtggccgctggaaactcacttccttatgttctatgatttctttcacaatttacactttttttgttttgttttgttttgtttgggggggggggttgtttttctgagagggagtcttgctctgttgcccaggctggagtgcagtggcgcgatctcagctcaccacaacctccacctcatgggttcaaccgattctcctgcctcagcatcccgagtagctgggactacaggcgcgcgccgccacgcctggctaattttttgtgtttttggtagagacggggtttcactatgttggccgggctggtctcgaactcctgacctcgtgatccgcccgccaaacattctatgtgccagaaacttgtatgtaactttgcatagttcttgtattatgtctccccaattttgagtgttttctctggtctctactcagcccttgctcacagtctcactaggaccctggctagcttgaacacggtcagaaggatcaccttagatttctgctggcacagtattttccataaattaatctcctgattgaaccgtagtcctatagtagttatctttggatgaaaacctaatgcagctcgaggaggaagtggagtgcctgtgatcagagggctggacaaaagcccatagggcgtctctggagccctgggggaactgtccccaggcaggcactctcagggcccaggaacagggcgggacaagtccgactcacctgtgaggtaaggacggggccaagacccggaaccgaaaagcaggtcacgatagcgctggaaggcctcgtcgaggactgagcagccgggctgcgcggccgagctgacatcgtactggaattgaaagttgttcgggtaaaggacgtagcgctggtcggaggtttggaagttctgaggccagggccagagggccgtcgcccgtcctgcgaacgctgccgccagcagcagcgaaaaccaaagcctggagcttgtcatggcccgctggtctcccctctcggagggggctggccacgtgagaccctggtcaggtgagcggcgcccccgtgacttatcggcgaatcacgtgaccagaggcggctctgcgcctgcgaccccaggaggacccacaccctgccctttcacttccggcctggacctgaggctcctgctacgtgcagcggattgtgccgggcgtcggcaactgctcggctcgccagactgttcacgggcccagtagagcagtaaataaccggccacccctgcggccgtgccggccgtgatggaactagacagctcacccgactcgagaagaacggggtggggaggcgaggacgcagggcgacctggagaagaaagtttcccagatggctctagggtgaatcttgaatgttgtgatgcagctcgccaggcctacggggaggtaaaggacttgccaggctgaagtaacttcagaagcagaaaaacggaggattaaaaccacaagtcgttgtgatgtgaaatttcgtggggcaagaaagggccggaagtaggtagtctgcacggctctgctagagagaggatcacaagatcacacaaatgtgatctacttatgactggaaaaaatgtgtactttcagagccagcttgaggcattccattgcctccaatatgagctcttcccttcaagattgactataaatctcttagttacaactcacatcccctttccccagacaaaaccccacatagcccggtgtgtatttactgaaagcagtaagatattgctggggctttgggtgcaagatggagagtgctcagagataatgacaggggcctggtcctgcagggccttacgtagaaagtcaaggaatttattctctgagcaattgaaaatcatcccgaaagatctgcattttagaaataccatgttgagtagttgcataagaaaccagttaggaggcccctttttattggaggtagagaataatgagagactgaactacagaagtggggaaggaagacagctgtagatccaagaaatagtatccggaagagaggcttgagaagtgatcaaggagaattccacagttatcagagaccctgtcttccttgttcaccactatattaccagaacataatacaaataatgctattgttattgggtggcattatttggttagtaggtactttttaaaatttttaaatttaattttagtattaaaatacatgtaaagatcaggaaaatgaacttttaaaaataaagggctttcactgggcatgataacacatccctgtagtcccagctactcccagctattcaggaggctgaggcggcaggatcacttgaaccaaggagttcaagtttagcctgggcagtatagtgaaaccctttctcaaaaacaaataaagggctactgaaataatgataatttatattcaggtcgtaggtacctaattactagttacacatacatggctttgatgggaaatcaaagaaacattctgacaatacagagattcatcaagcaatttgtctttgaaagttgattattcaaaaacagagcttgtagcaaaagaagcagaaattagatcccacagtcatcaagtttcagatcctaaggcttgcattcttacaccaatttcttctttgcttaaatcttaattttcatcagcattaattaagtgtctgggtactctgccagtcaggagagatgttaccaaaggtacaggatttgagaagtattgtcagaagagccaagttcataatcaggcccacaggatcaataatttgggggagtgtttagagcagtttcaaagatgagagcagtagatcaaagtagaatttcaggactgagcacatgccaaggcacccttttatggatattcaacctgtaccagaagggaggagtcatttacttaaaagagttacacaagatgaaagagctagatccaaataaagacgctataaaaattactaatggggctgagcatggtggattacagggattcagttatttaattattactgaaagagctcttttagacttaaccagatttttaaaccaaatattcttatgcatacataaaagtaagttacacaagataaatttgttgatcttccaaaatatccccccttactatacactagagtggggttttggcataatggcagacaaatagatggaacggaatagagggtccaggaaaagagccatttgattattac

SEQ ID NO: 1242108 - DNA, 4001 bp, Homo sapiens
aacacttcttctttaatcaattaattcttacttcgggcagtctacatgttcctaacctattaataaccacaaagacaatgttttgtcttgctttttcagtcaactactgcagcaatcgtgtggtctttcaaaatataaatcatacttgattttagggtcttagattcttttttaaaagtgaccacagaagattaaaacatgtatttttttttactgtaatatttggtttaaaacatattttctaatgaaccctaacccaaacagctatttatttatttatctatttttgagacggagtctcactgtcgcccaggctggagtgcagtggagcgatcttggctcactgcaacctccgcctcccgggttcaagcaattctcctgcctcagcctcctgagtagctgggactacaggcgcacgccaccacgcccagctaatttttgtatttttagtagagacggggtttcaccatgctggccaggctggtctcgaactcctgacctcgtgatctgcccgcctaggcctcccaaagtgctgtgattacaggcgtgaccaaacagctttttaaaaaaactattatagaattaaaataatcgcagagtctgaggctagattaagtacaatcccaaaagaaaaagtacacaggccttattacttcaaaaattcttgcaagacaatacagttctaggttcactgatatatatactaaaattactaacattcagatttcacaaagtaagcttcaaatagattgattccttcaatacacagacacacacccttctaagtattgtgttatctgacaacagaaccaaggaatcaaaattattgagtgtttattaccgcctcacatatagtttattaaaaatgagctactgaaaaccagaaagttcttattgaccttttgtcctttgtgagccaactttttcctgtttagaatctgagctgagtctcatgacccttgctttatactttaaaaccacaaagaacagataccatttaaaaatcagtgatgaattaaattacaaaggaggaaaatgtaataaaatacaactttcaaaaatgttacgtgtaagctacacataagaatttttaaggctgaagaagctgttctcaggcacagggcaaaacctgtagcccaaaatcaacagtcctaataatttaagatgtcaattttatcagttaaggtaacctcaaatttgagtacttcagtgtgatactttcattctgctaagatgaaaatgccccagattttatgtaaaatattcagtcccctaaataaaaagttatctccttaaaagagaagctagatttcctgttgcatgtcaaggcagagggcaccacacttcacccagccaaggctggacttgagtaggggtgcaggtgttggcaattcatcagtcacacaagctatgtcgtcttgcaaaggtgcatagagatttttaacaagggctttcgaattctttgaagaaaacacagacaattttgctggggaggaaatgctccatattccacgtggaagcaaactcataaattctgactgcaggttggtgttcagcacaacttggaataatctaacttttcacataaaacacaatccccaagctgcaagataatgtctccgcgaatggcaccaagcaccaccttttcaagccctcatcagcactggaagtgggtcggacacccccaaaccatcaccacccccccacaggaagtgagggtgtcccccctccccaggacggccttcctcccctcccccaaccggaagttgaggcgcccccattcagccggcctccaactgagacaaaccagtaccaccaccaccaaaagaggggtgatcttcaaggggtgaagggcatctcgactggggccacccccaagctcgccttgcttactgacctgctgacgacaggggcaggaaggggcctagggccaaaagaaagtcccttccacagaggacaattccctcagcccctctcaatcgccttcacttcacgcactcgtcgtctcacagctggacaaaaattcttccgcagcactttattttggtgtcctttccttttctttacctaatctcttaaccacctttccacaggtaactcctcttaccgcatagcatttacaattgctccggtgagaagaaaaatgaaatattttccacggtaccttcacaaaaatgaagggattattttgccccaatgcggcgaaggactacgtggttacgcaaggtgagccttattttcgtggaggtttctgggagatgtagtttttttttttttattgcgaaggcccgcagaaagtagaagaactgaaattggtcatgactacatattagcgtcctcgaaaacatattctgtattcgatgacggctgacctagcgggccccgacgcccaaatgggcccagactcccctggtcttttcctctgcggcttaatcgaacccaaattttccctcacgcgggcccaaggtctcggcagccccgccccttgtcttagccccgccctccgcagccaatcaggcaccctttaggtctcgtcctctggaggttggaaggcagagaggaggggcctggcggtgactcctcccgctggggctgagggagacctgggagacgaccggggcccgtgagcgcgcgcgtgctcacggctccaggagcgcggcgagcgggcgagggcgcgcgcggaggggcggcgcgcggggccgagaggaggcgggcaggctggtgggctgggcgggcggcgagcggccgggagcgcgcggtggactcggccgcggcgagtagttagttagttgttgttagtcagtgtcagttgctcggcggcggcggccgtggtcaccaggaaggggacgggacggacggtgatggtggtcgccgcggcggcgtgtgcgcccctcaggtaacagcggcccggctgtccgcgtccgctcggttgtcttctactcacgcgccgtctgtgggaccagggttgccgcgggttgagggcgctgacccgggggaatccgggcggggcggcgcgggttctgggtggcggcgcgggttctgggtggcgccgccgccggggctctggcggccggtgcgtcccgcccggcgcgggctctagctccccggccacccccgcgccccgccggtgccgcgcgccccctgccgcccctgccccctccctcggcggcggccccgggagcgcgacgccccccagaggaaggaaagttgggacctgccgcgagggacgcccccgggcgcggctgggaggttgcgggggaaagtgaagcctggaggagctggacgcggggaggccggggcaggaggggcttctctggctcctgccgggtccacacggtcagcccgctcccgcacccgggagcatcggcgcagcctcgccggcagcgtcgggacggagccgggtggctccctgcctgctcccttcgcgccgcggctggggagcccgcgaacgtgtgggctggcggggtcgtttgggggttgtgagtggttcggctgctcagtttttttcttttctgccctttgacccatccgttcttgcaacttttctttcctccttcgatggggacttgccgtctgaaccgcgtctgccccctcccctctcgtcgcatgcaccatccgtctgggagcttgatttcgttttttcctcctttggctacgttaaagattgctgagagcaccgggagagaccctcctcccccgcctgcctctggcctgttaaatgttactttttgcgattcgttgttttttaaagatccaagttcaggaatttgagagctgtggaatggagttattggaaggctgacgttgagggggtagtgatgagttagaggaaaactatgatttcatctttattggccttgctatagaaaacctaattgattttttttctgcctctgttgaatgtggtaagatcatacgttgaattaaatacttagagacttacataaaagactatttttaggtcattggatgatgtacgtgaacagcttttcacctgaatt

SEQ ID NO: 1242109 - DNA, 4001 bp, Homo sapiens
aaaattacatgaaagacatattctgtgtttaaacaaaatccccaagcgtctcctccctgcttctccacaaacaaaaattattttttgacattttctttaaggttttatgagtgagtaaacattttcatttccacagaactatttgatctcaaccacagagtttcagtacttgtttttgatcacacaagtacggtggattggttttgtgttggccagggggagggagggccagaaagagagttaaaattaccggatcccttttatcttccattctgagaccttacatttgccaactcctttttccctgtacatttttttaaagtatgaaatctgagaacctcaaaggctctcactgctcaaagatcagccttttcacagtccactgaggactcactggaaatgttacagaaatacggcctgccaacttgggtgcctctgggtaaaatcacccacagttgctgttcatgtgaaatctcctaaatgtaagcacacttcttcagccctcgctgctcatctcgcctcctcctctctgtcacccacctctgtcatgtccagttcatgttggcccacagccctcacacttccattcctcaaaattcctcttggcctgcctctgatcccctcacacactctgcagctcccatggctaagactcaccaggcaaaatgactccagaaacttaacctggagtacggtgcaagaaagccactgacccaggggggctgagccagggcaccaggacaatcttgctccttccactgcactcttgccttcccaggccccacccatcccaaacaggaaagcaagatctctagacccttggagcagaagcatttgagtcctgcgaagggctgttggaagaatgctgggttcagcagcagggaacagagagatttaggaattctggttcacttacccgcctccatgcccacgtcaggcagtggcaaggccacccctgctacacaaatgctcatcaactacacagcctgggggaagtcaccgaaccactttgtgcctcagtttcctcatctgtaaagtggacataagtgtcccctgaatacgtatggcaaaccgtcaacgtgtgcccaaatagagtgagcagatgtaaggagttattgtgctattagcacagtggctcccagactcacagagcctactgctcagagagacgccgaggggaaagcttaaattactttatatactcagaagcattagtcacttcgacagagtatttcaacttccctcctgagcatctactcagttgtttcaaagactgaagcctcacctaggttccttatagacttccatcatcttcagcatctcaaagcagatccaaagtccactattcctacgctggaggtttattattatttgattatttccaggaaaacttcgatttccattttgcttgtaataaatccaaacgtggagaacgacaaactgcttagactcacacaggccctggagttgactgcgcccaggggcgaagagaccgcggaatggccgaggcaggaggccggccagggcaccggtccccgtcaggtgcccccgtgcccgggctgtatgggaggggaagggccacgggctccgcgcccaggccagggtgcccctgctgggtgtccgcgtgccccggcggagggcgcgggtcaggtggccccagactcccgggcgcagagtgtgcgctcgctccggcttggggaggcgggggccggcccgccgggaggctccgagcccggttacgccagccgcggccccgcagtccctccggaggggcgcgcggagagcgcgcggcgcgggctcactcaccccatctccggcgctgctccggcggccgctccgacggggcctctcgcgctcgctctccgcccgctcggcagccgctccccgcgcggcacatgcggcggcccgtgcgcgcccggctcagccccggcgccgctccattccgcggggctgcgcggctgccactgctgccactgccgccaccgccgccaggcgcgggcgggcgggggctgggcggccgcgctggggcggtgcccgccccgccctccccagccgctacccccgcccggctccttacgtaacctcgtggcccccgggccgcggcagcgagccaagaggcggggggcgcagcactgtgtgcaccgtcccccgcgcagccgcgcagtcgccgcttttctcccgggccacccagtcctcggtgccggccccgcgttggcgcgcccccgccccacgccgacccggggccctggcgcagtgccatcaacatcctgcctgatggacttaaagtcccattcacacctggcggggactttagggctacctttactttgcagataagggaaccgaggcctggggagggtaagtgatttgcccaaggtcacacattcagattagagttcgttcgggtctccagagtctgagatgggcatagctgtgctcctccttaaagcccaccttcatcttcctgccagttgcccggccgagtggccttaaggtacccgccaccgtgaaatttcggaagccagcctggcagagaagagcctacaggccgcggcagatgctctgggctctttcctggataaaaatgagatgagggctcccacttgaaggggcagttttaaggcggcttcatcaagcttggttttatccttagagcgaggggaattaggatggcaaaagtagaacttgaagaagagcaggctctcttcgtcgcctttctacctatcaggtcctgagtttctaccaaaggctggcactgggactaacctaaccttcatcccccgggacttccacgggatcatcttctgctgggaacacaccgcccacataagcctggcatctcaggacagtaaaaaagtcaagggacaggtcgggcgcggtggctcacgcctgtaatcccagcactttgggaggccgaggcgggcgaatcacgaggtctggagatcgaggccatcctggctaacacggtgaaaccccgtctctactaaaaatacacacacacaaaaaaaattagccgggcgtggagacaggcgcctgtagtcccagctactccggaggctgacgcacaagaatcgcgtgaacctggaaggcggatcttgtagtgagccgagatcgcaccactgcactccagcctgggcaacagagcgagactccgtctcaaaaaataaataaattaattaattaaatacataaatagccgggtgtggtggcgtgctcctgtagtcccagctactcccagctactcgggaggcttgatgcaggagaatcgcttgaacccaggaggcaggggttgcagcgagccgagatcatgccactgcactctagcctggtgaaaagagccagactgtctcaaaaaaataaataaataaatacaaaataagtttgtaaaaaataaaataatcttgggagtttccaaatcctccatgcatagtaatcagcaatatcaggaaagtgagcttgtagaacactgaacaagtcatttatcaggtaatacctgaggattctgaagtgttcgaataacttcaaaggcaagccactgaaatcagagtttttcatttttattttatttttattattttttttttgagacggagtctcactctgctcacccaggctagagtgcagtggcagtggcgtgatctcggctcactgcaacccccacctcccagattcaagcgattctactgcctcagcctccccagtagctgcgactgcaggcgcatgccaccacgcccagtttttttttttttttgtatttttagtagagacagggtttcaccatgtttcgatctcctgacctcgtgatccacccgcctcggcctcccaaagggctgggactacaggcatgagccaccgtgcctggccgagtttttcatttttttaaactacaatccacagtaagaaatatattttacactacaacctgcaacctggtacatacttcagcacatacatactatgtctataggtatatcgatataaaatagaaacaaaaagttata

SEQ ID NO: 1242110 - DNA, 4001 bp, Homo sapiens
ttgaaatgaatgataagttcttaaagttgtaaggaaccttagaggcaactggtgaaggccaatctcctttctattccagatgttcccatacaatctttgacttgttaagctcctcttaggagagcgctgttttccatagccatgtaaagcaaggttgttagctctggccatccaaatagactgatgtaataaaaggctgtgctgggagaaataggacatattttagtcccagttctgctacctaacctctgaaactctggactagtcatgtctcctctaaaacagagttggattagattattactaaaagtctcctctagctctagtattccatgccactaaagttctttaagttcgccttttttctttatataagcgctccatatcatagaactaatggcacagatcaagtcaactcttgagagtaaataaaaacaaagaaaaaaatatgtttatcagacatgtctgtcttaaccaaatgtctcctttgtatggaggggaatttttttttttttgtttttgagacaaggtctctgtcacccagtctggagtacagtggcacaatcactgcttactgcagcttccaactcctgggctcaagggatcctcccacctgagcttcccaaatagctgggactgcaggcaggtgccaccatgcctggccttttttttttttttttttttggagagagagggtcccactatgttgcccaggctggtctcgaacttctgggctcaagcaatcctcctaccttggtctcccaaagtgctgggattacaggtgcaagccatcatggctgtctttttgattttattatttttatttttttagagacagtgtctcgctatgttgcccactcacacatttttaaaaattattaactttttttcctacttcattgaaagggagaggaggaattcaggtactataggctgttggtctatatatccggccaacagtatttagctcctgaaaaagcccgcaggaagcaagtgtgatttccaactccaagatctgcgtcagaatctcaccacctttgtcctgcagccgggagggggctggaacttaagctctgtactttgtgcaaagtataccagacaagaaacaggagtcattcttgattctttcctgtccctcactcccaacgtgtaacaaagtctagtaaattctaccttagcatgtcttccaactctacctttcttctcctacattcccttttgctgcgtccttccaagggattatacccagtcaatctctgtattctcagcccctaggctagtcccttatttaatattaaatggtgaaccaagggtgaccttcattccacagactcacggggcagttcaaccccaaggggatcatgaaacagaaaggtggggaatctagcatctgcagtttttcaaagacaacagtgcattactaggtgcttttaagggtcttcctggtgggtgaaggggaaaaagtggtgggtgagcgggctgcagaggggctgctgaaccaagaggcaggaaaagagaggaggagggcgcatgagtaagtgaggttcagcggagctcagagactgctcccagtagacaccggccaggcgccggcacagccctcggccagcgaccccacacagacccgggagggctggcctcgacagcttctcgggtgccacgctttcattctgggggcccagctcagccctcctaggttacaggtgaggtccgggaagaagggtgacttgcccatcacgcacgcagcgagctgaggatagcgcgggctggaggagcctgaggcataggactcccggctccacacttgcagcgagcctccctgccctcgggggcgaccccgactcccgcagcggggacgcagggctcgtctctgcttccccctccttggctcaccggcagcgacccgacgtcctggggtggatcccgctttcccgcagacaggtagtgcggcctcggccgcgcaccggcgctaggaggtagagcaggggccgcagcgcccgcgcccctcctccaagccccgcgagtcctgacttctgattggctcctcccggtccctcgccgcccagtcagcgcagactactggatttttttcccggccccgcctaggaggctgcgaacagaaattcagagattcggcttctgttgactttctgcaactccgcccagccttctcacagtgagtatcccagtcagaatccggctaccttttcatgaaccggactccttattcctgattggctctccgggttgccgccccaccccgagtgggcaggctttcggctcttgagtggcacctccgagtttcgcagggtccacgttgtcgtggcggtaacactgacagctcctcacccgcatccacgtttttgtttcctagccttcattccttctgttggaggcacgtatcctggaagtgatacgcttagaaagcgtggccccagagagactcgcaatcccagccccaggaactgtaagggtcctgattggaaggcctgagtaaggcctggctgcgttccgcaggaggatgctggaatgttagaacccgaacagtttaggcagggcgcagatggctcacgcctgtaatcccagaaatttgggagaccgaggcgggaggatcacctgaggtcaggagttcgagaccagcctggccaacatggtgaaacccctctctactaaaaatacaaaaattagactcagggggtatgtctgcagctgcagaaagatgtatgggaacagacacacaactctccctccgagataagcacaacaaagagacacagaagcagtccaagcctctgataaactctcccactccgaatccttaaaaacttacttagtctgtaagagagtgtgcctctgacctaacttggccagacgcccctctcaggttttctctaaaataaacctcttatgaccaccaagccacttttcgtgtttctttcctctttctttaattcttacaccgagtagttgggattacaggggcccaccaccacgcctttatctaggtagtggaatcagtgggctctctttctgcaggaaagtccgcagagaccccatgattttcagaaagctgcacgagattcatggagtaacagccaggttagttggatggtcttaactgttaagggcatgaggcgctgataaacagcttgatgcccttctccagccaagcaggacttctccgataagtcagagccctctatctactgtaggctactggaagagagtcctgggtactggtccactcatgcctgcaaattggtttcttattttgtttttgccaatgcacatccaccctttgttttctgtcaggatataacacactcggattatctatagtcaccctgattaacttggatgattcccagacccctatcaaccacctactgagggaagcttcttctcctgctttagatatggttcttacctgcttcacttctaatctccaaaaggcagggctgtttttcacaaccccaggggaacataattaatatctcattcctttagattgtcaaagagtgattttgacttggatttttctgtaaccagaattggaatcctattggctcccttaggcccctctgcatgctttttgccttgagtggcttctgagttatttccacctgtcattattccagctctactggtctttctctacttctcttgggatgagggaatgggaattaagattgaatctggaaattgtgagaattggaggcagggctattggatccacaactgccctctttggtatgtgcatttccactccctgaattcttctgaaatatagtatttggtagggtgtggtggctcacgcctgtaatccgagcatttggggaggccgatggaggtggcttacttgagttcaggagtttgagacccgcctggataacatggtgaaaccccatctctactaaaaagacaaaaattagccgtgcgtggtggctagcgcctgtaatcccagctcctaggaggctgaggtaggagaatcgcttgaacct

SEQ ID NO: 1242111 - DNA, 4001 bp, Homo sapiens
cagctaatttttctattttcagtggagacggggtttcacatgttggccaggctggtcttgaattcctgacctcgtgatctacctgcctcgacctcccaaagtgctgggattagaggtgtgagccacagcacccagccaaattatttttttttaatcactcaaaatcaagcatgttgtaggtaccaaaattctaactcaaggtggcctatgaactgggttcataacctacatctatctatatatatagtggctcctaggcaggtagctggccttttagatattcataagctgtcttggagacacatgccatttgagtacagtaactctgctgagactccagatgtaccttgaatactgttgagagctagtcagatgaatgagactggcctgccacctagcatctgcacatgaggtattcttctacactgatttttcatacaggtgtgctagattttaatgggtcacttaaattcagttagtctccaacatataaattctccacaacataggatatagtatacactctacttgacccaagatgataaaactgaaaaagacaaaaaaaaattttattgccataaattaatccagtaggtatatttgagaaagcacgcatcagttggttagggcaataagcgcctctaccacgttgcccatgtgttcccgcaaactgcgttctgctgctgctcgagatatctccatctcagtcatctgcagaaaaaaatcatgttacataggttcccaggcattaatgtgccaccaaatatactgactccgcttgtttcaggaaacaacccaaattaagcagaatagcctcccctccgcatacactagttaggcactaccactcactattagctccagatcttccttcttgatagtgacttttgccagttctttctccctgcaaaaatatttaaatatattagtcctcattctcaaccaacaccataaactcccaggaagggtcattcccagaagtgccctgtaaataaatcttgataaacccttgattgaaaataaaaactcccactaatactcctttcccctggagtcttggcagcaggtgttgccaggaggccttctgctaacaagagtaaagttgtggcgcctagatctgcaggaattggtgataaatttgaagaacggtataaaggcttaataatggtttttatttttgtctggggaccggggagggaagaactgttaaagttggctgcccctgaagacttaccgctcctgtttggctttctgctcccgggaccttctgtctccaatcacagacatggcctatgggaaaggcaggtctagttactgcaccgctacccacaattcccaataatctaaaaggccaacaaaacaagcggttcatgcatggattcacgatgacaagtgttaccaggtagcaaggactatgtttaattccattctatgcacctgaggtccccttaagcccactatcaagctcctttaggcaagcggcgcgctccggtgaccgctgtttccctcggctctaccctattgcctcctcctgccaacgggatcagaaccccgtcttggagcgctggcttccagctacagcctcagagcccccctctgctctcagcccgccccgacatgctcttggccaaccttaccgtctccagattggaactctggatctccttctcctctgcatagtcggtgacccgctccaagtccgccgcaccgctgtcatgtttccgtggcttctccggaggccgctctggtccactggtctcagtctccaactccagctccacatccccctcggtcgccatatctatttcaccacgccgccgcataagccccacctcacgccgacttccggcaactgacacagcttccgcccggggaggaggcggggctggccctgggccacaccttctttctgctccagttctagaagcttcagggaggaaggcggttcgtctctcagacttcctttcgggtttgtacagtgttttgtgcgaggccttctctcagacctaacccgacaccgctccagcccaccccaccgatatccttaaccacctcataaactaggaatagtcccctcaacacataaacacgcacccacccacctcagggaactccgttcaacctgaatgacgtctaatcctaaaccaataaagaatgctaatccacagggggccagatagacaaactgccccctaatctggagagaacagcctgagtggccgcagtgttgaggccctaaggacaaagctccttcacagggcatttgcatttaccgcaacctggaggtcagtgttctcttccggacgtctccattctgcccgggaccgggtgctcagccccaacacagtggcagtccaatgggctgaggacagaagcaactgctgctctcatctgccttccatctggtggacctaagcctaatccctgggacaaggatggtgggtgccaaggccggccccagccccggcacctccctgggcctggcacagcagcacagcggaggcagcagtgtcctagtgaaaagtcccttctgtcaggtgagagggtgcgaaggggagagtggccgaagctggggaggaagacgtgcagaagccaataaaaacgacaggcctcttttctcctctaatgtcgttctggttcgttgccccaggtataatctgtaaatctctcccgccatgtttccagccccaggtgtttaggtcgagagaaaggtcagatatctcaagcctgcttataatgaaagccctactaagttgtcagtgggcggcaatcccaaatggctggaatcagcttgaaacagaacctgagtaaaaggaagaaaggggaaggggaaattttggaattcaacctcctgggttaacctcacacatacattaacgtatgcctttcctcagcaagtctccacctcgctgccttgcatctgctctactcccaggtgtgctgctgtgggcctgctccttgtgccagctgctgccactctaggtggccctctctcaccgcatccacttgcagccgcctgttctacatcctcctccatgtgggggcctcagcaatctgctgcctcctgctgtcaaggacagtagtggaaagggtgtggggcaagacacacagggtaagtgagagggggtcgggttgtcaggtgggaagagataaaaggaaaaaccctaagatagaaaaggtttcggttgggggcaggagacaaatgagtggtcatacccgtgacaagtaggtacctttccatgcattatgacttgtcctgccatttctctcacacacactcccagatccagatgccctcggggttgtgtgcccacctgtttggcctctctgactgtccagtgctcagtggctctggggctgtgtaccgagtatgtgcaggaaccgccaccttccacctgctgcaggctgtgttgctggtccacctccactcccccaccagcccgcgggcacagctgcataataggtttgtgtgtactttctgggtggggaggggacagaggagggaaagtagacataggctgggtaaaggaaattccgggatgaagtaatagcactgtaaaaagacagaaaacaggtttaagtccctgcttctcgtgtacttgctgtgtaaccttgagccagactttgtgcttctagcatctaaaatggaggtaacagtggggttatcttggtaacacaatcctttataaactgtaaaacattgcccagatgctattaagtatctttgagttagaatttggaataaggtgcagtaggcctgtcccaaccccctctcatttgggattggttcctccttagttgtctcgtctgtcctctttcctatatttttggtttctcttttgcctttccccataggcactcttcactgtcctttgccttttctcctgagtctgtttttctttctccctcctaaccagcttctggctcctcaagctgctgttcctgttaggtctctgtgctattgccttctgcattcctgatgagcatctcttcccaggtac

SEQ ID NO: 1242112 - DNA, 4001 bp, Homo sapiens
atgcatcagtatagtttcttattaccttgtcgtggtattgtatctgtgacatctcaataaattcttaagtttctgcacatcatataaaaacaaagtaaagggtctcagggattgtgagctccctggggatgggagtgttgttagcaataaacaaatactcaatgaacatactgacttaatagtctgagtcaggtactattttaatactctttgtaaccatttataacatttgatcctccttggctggcttagtaaatgtgtgttaaaatgaactaaagcagcacatgtattagctagatggctacaaaaccactatattatttaaccaggttctctatttgcaaagttctcatacacttttaaaatacagtctatgcatttatatcatttgatatagatttcaatataacaaaaagcatgtctattcttaaagagggtcttttttattacttgtatggaaatgggccaaggttcttggactcaagaaaattccagtatctctccttcacaggagaccaacaataaatacctgagggaattatacctaaaaataatttgagtgctgaactgtgttgttccactataggagtggaagtacagtcagccataactctagcattccgtatgtgaagatgaggatagggtaaattctgagaccctaaacttgtattttctgtttcctccaaatctctctatgccagaaatctattttcttatgtcaaccatcagccccactacactcctcttcagtggattacaaagtggctacaactcaccaattcagtcctggttcacttatgaccatcttggagctcatcttcctagatttctgcttcactctagctcacagttcacagctgcctggctgcgaaggctccaagaggcaggatccctccagaacttactcagctgagtaaaaacaaaaggccaagatcaaaagcaagtgattggctaggccaggtgctattaggtgaggaagaatctctccctaaacatctaccctcaacagactgtggcacctaaaacagaatacagcagacccaaggttctttgtagcagagcagcaatgacgatacaggacgagcccttttccatttaatctacgccgggagtgttactctcaggacactcactatggaaataagagctgaaacagaacggtgttctcattgcttacatactaggccacttgatggcatggaacgggaagtcaactcagttttccattcccttactgccaaaataaatcttttgttttcccgaccatgctttgttatggggcagattctggcaggcactttatgacaaaagctacctcgatatcaggaatcttaggcctttcacaaagaacctcacatttgagaagacttgaggtcaacttaagtgacatttcacaagatcacttacagacatcatcaggactacaaatcaggcttgatctctcatgttcagtacttctcctgtgaccccaggcagactgataaagtgacctgcgagaacctaatcaaatttaggagtcggtctctcgacaccgaacgggcccgaccggctcccacttaatctacctctcacacttcgacccagtgtggagctgggggggaatagtcgaggaaggcaaaagaaacggctgagggaaaggggacgcaaagagaggggaaacaaggttccagaaaagcaggtaaaagggcaagcaaagcaggggtaggagccgcgcagagccaggagcaaagggtcctggcccggccgccatgttccctcctcccgcccctgcatgagcacgcccgctggcccggcagcgccctcccgtccgcgtctgggctgcaacacagcctttccgcccacctcatggtccgcggcggctcttgcccaggccgcagccacacaccacacacgctccaccccactcctcacattgtcgcgcgcgcccaaaaaagaccatatttaaaggatgtggccgcgccgactcggccctgcgtgatgacgtctcagcgacatagtgggcggggccttgcgtcttgacggctgctcccctcctttcctcccgccacaagcgctcgctgtggttctggcagcgaagtgcgagactgggctcgccaggcggaagtggttggagactgcgtgttttcctagaaagtcctcgaccttcgtcggggagaggaggggagtgataaattggaaggcggacaagcgacaagtgcggtactggaaagacccaaacatacttggttgtgacctcaggcaagtttcctgacttccgtaacccaaactcctcatatgtaaaatggagatgaaattgttactgctgcatcatacggttttttggaaaggattaaatgaaacaaaggaagaagctgtgctctgcacagtacctggcacatagtagggcctcattaagtgctccttcacctccgctccactccccatccagttttagctgtgagttcaaacactagttttgttctcatccattacggaaagatttattgaccgtaaacagagtactttgtgcttggtgctgggtacacatggactaagactgaatactgatttttccagtgctttggatctctggcaatctaagacatttacattaaatacaatagaaagtaataaactacataagaaaggtgtatagattgaggttagagggagaggaatagctagtgtgagggacaaaacgcagttttgaatagtattgagtacttacatgtcagttgctgcactgagcacctgccgtgtgagctcatttgaagaatgtgggtatgtggaatgaagagaaagggcgttctagacagaccagcacaagtgtcaaaagacaaaaatttgacacatctaaagatctcagttggccttattgcgattctggaatcaggcaacacttcattccataaaatggaatgagtgtcccaatgagtggaacagaggaggttggcattacggacagaaaaaaggtctgtagaaagtagaaacaaagaacaaaaagcagattgatcatttcaaagttactttcctggtaaggtggagacagacagtacaatagaaagataactgattggttaacatcaggttacttcaagttactctttgctgtagggactaaaacagaggaaattcattatcttgctgattgaaaattgaaactggcctgttacctctgtctcctgatttcttggagggccacataactcagtttcggtgtggtgagcctgagtgataccatttttattttagtctggtctcttggggtctagtgcagaagttctaaacaatggcctcctataattttttttaatacaaggaactgcataaacttattgcataaacagaatctagtgtgtgctattagggaagcatgttctacattttattttaagacagagtctcccagactggagtgcagtggtgtgatctcagctcactgcaacttctgccacctgggttcaagcgattctcctgcgtcagtctccctagtagctgggactacaagtgcatgccaccacacttggctaatttttgtattttttttttagtagagatggggtttgccagggtgatctttaactcttgacctcaagtgatctgcccaccttggcctccctaagtgctgggattacaggtgtgagccactacccctggctgacattttagactgatttagaatattgttagaaattatgttaatgtaaaaaatatgctacaggaaaccataggtagtttattttgcctggaatgcaaggtctctgaagagtagtagaggaaaaggggttggaaaaactggttgaagctagaacacgtaagattttataagccagactaaggaagtttgactttattgcataagaaataaaatgctaggaaacaaacaaacaaaaaagcttacataatgacacaatcagaactggctggctgtgcttcaggaaagttcacctggcaacctacggaattcattgaagggaggaggccagttaggagacagtgtttgtgaatgcttaaaaaaatca

SEQ ID NO: 1242113 - DNA, 4001 bp, Homo sapiens
gcaagctccacctcctgggttcaggcaattctcctgcctcagcccctgagtagctgggactacaggcgcctgccaccacacccagctaatttttgtatttttagtagagaccgggtttcaccatggtggccaggcaggtctcgaactcctggccccaactgatccgcctgcttcggcctcccaaagtcctgggagccaccgcacgcggccagaacagccattttggaacaaactctagtagactccttggtgtcatccttcattccttcccttctctcacatccaaaccaccaaaaccagaagccaccctcagacaagcccacccttgccataagtgagtgcctgctgcgtatctagatttttatgtaaaatcgcctgaattggaacctttccccactactggctcctccttcaaaatatatccagaatccaaccacttcttcaccatccccagcgccaccacccaggtccaagccatcatcctctcttgccaggtccctgaagctagaatgctcccgataagatggaaatcaggtaacgatactcctctcaaaaccctgcaaagtaaaagcgaaagctctcaaaaatggcctgtgagccctctacagaccccactgccgaacctcatcctgtcactccacctggtgcctgctgagccagccttcgcaccatcctctctgctcttccatcatgcccttggcacctgcgagtccctcttcccccaataccgaaaatggcctgcttcctcccctcctcagcgattccttcagtgaggacttttctggctgccctatacaaacttttgtgcacacacctttcttgcctgtttctccttagctcttctctttttggggggagaagggggaggcagggtcttgctttgtcacccaggctagagtgcagtggcacaattgtacctcactgcagccttgacctcctgggctcaaatgatcctcctgagtagctaagaccacagacatgcaccatcgtgcctggctaattttattttttatttttgtagagatggggtctcactatattgcccaggctggtctggagctcccagcctcaagcaatcctcccacctcagccccccaaaattctgggattacaggtgtaagccacagtgcctggccttccttagctcttgtacccatatatcatactagtcaacatctatcttgcttactgtctgccccctcccacatcagaatttgagctcctaagggttttgaaagagtctctgctggttttattcccagctctatccccagcacccggcatggtgtctggcacaaagtaggagtatactacttttgtcaaagacataaataaaggtcaagttgaagtcaactccatctgtggtcagggctgccctgccctcaccttctgtttcactgaatgtgtttcctcccctctcacccatctggtatgcattgccacacaggggccagtgagttcttaccagcagcctgcaccagatgtacacgggtggcatctctctccagcaataggccccatgccctgaagaagcttacaacctacagtgtactaatatttgcaatctgctggtatttttaacatgggtttacagagtataaaccccagggaaggccacagaccctggcttccagtaatctgagagcagtttccagcacctcataccctgaatggaaccagcccaagggccctcaacttcacacagaagatgtgggagcaggcctcagccattccaaagaggcttttcctcagtacctactaggcctaaacacaaccaccccaatcagctctggcagggcagctagggccttatctgacgtggcagaaagatctgcacacttaaggggcaagaattaagaagtttctgggttaggagtgaaggaaggctagataagtaattctgccactgagccgttcacagaactggtccgcactgccccaagctctaacttaccagaaacatcaccagcagtcgctggaagcctatggcgttgcaaaataggaaaagatgcgtgcaggaattaccaggcagcaaagacacggggctcttttagccccaaaatattctttccttgtcatcaaggggaatgccaagtattctgtctccagctgcgttgccaggtaacaagctggcagagtcgcaactgtagagtctgatgtccaactccaacaccaagcaatttccccattcataaccaacccacatggggacttctagaagggcctgcaactgactgctttttctgtatccaaattcaggacccttaaaaggcgctttgtgttcctgtttgtgtgtgtttttcgggttgtttgtttcttttttttttttttaccatcaaggcagaaaaaaagggagaattaaagaatgtggctaacttccaccatatttttgctgaaggtggtgtgctatatgggaatctttgggtcctggggcacttggaacctgggagttgttgggcagatccctgaggtagattcccagaggtacaaaagcagacatgcccctttctccttggcagggaaggtaggactggggcccaagcctccctacccccccggctctagtcagctgctcccacaatccggttaaccattacctcctctggccaggtcagggccagcgggccccatcccctcttcctcactctcctggctcactgcaaggggctcctggccagattaggataggggtttccatggcaacaggcattaggcagggccaagggacctacattgttccctgccttttgtagctgtgttgggtagccagggtgagggggcaggccgatgcccacacgccaagcaaggcagcctgcgttggcaacggaggctcgggctaagtcttgcttattacgacccgactactgtcttccctcctaagcagggaactaagggtacccagaagccgtgggaacgattccgcaaagtgacattttgcgcgggctgccaggtctctgcggcgagtgagccaggcagggagggcatgtgcctgccaaggcaggtcaagtcaaggagaggccccaggatggagcctcaagtgcagcgatgaaggcgaaggggtgggggtgggggcggccaaacaaaaggggaaaattaaaaaggacgctcctccagctgtcgtgtaaaaggctccaaaaatagctgacgtgggcctggtatcagcgcgcgcctggctgaaaaggaaggggaagtgcatgtctcccgcctcccagcctttgtctgagcaggggccgagccacgaccctccctctcgccaggggagcgcgcggggtgctccagccccccacgggtgctcgtctcgttccaggggcgcagggcgggcaggccacccttcgggtccgggacactctcaggaccccctcccgaaatacctaggggcgcgcggcagccccgagcccccgcccgcgcagagctggccgtcgcccgggccaccagttgccaccgtccctcaagtccccaccccagcgcctggcacggccgggaagcgccgggcgggggagcgcggagcgaagctgccccgcggccctttgtgcgcctgaccccgccgtccccgggctgcgggctggcgggacgtgcttcccggccccagcctgggaagccgccacgtcgcagctgggggcgcgcgcctgcctggaccctccgcgcggcactcacagtggcgccgcggctgctcttgcgaggtgggggctgtcagggccgccggcgcccaggccggccgcgagcctgaggctctgcagagcgagcgcacgacccgcaggtagccggccatcccaagctggagagcgaacgagcagggcgggagaggtccgagcgcgcgccgctcctcccggctgcctggccgcgggctaacgctgggcctggcgggcgctggccgcgcgggcaccaccggggcggggctgccgggcctgccgccccattgggccttgccggggaggaggcggggccagggccgccgacgcctccagcgtcccgcgggagccgggacccggcggccaggcccg

SEQ ID NO: 1242114 - DNA, 4001 bp, Homo sapiens
ctgccccaagctctaacttaccagaaacatcaccagcagtcgctggaagcctatggcgttgcaaaataggaaaagatgcgtgcaggaattaccaggcagcaaagacacggggctcttttagccccaaaatattctttccttgtcatcaaggggaatgccaagtattctgtctccagctgcgttgccaggtaacaagctggcagagtcgcaactgtagagtctgatgtccaactccaacaccaagcaatttccccattcataaccaacccacatggggacttctagaagggcctgcaactgactgctttttctgtatccaaattcaggacccttaaaaggcgctttgtgttcctgtttgtgtgtgtttttcgggttgtttgtttcttttttttttttttaccatcaaggcagaaaaaaagggagaattaaagaatgtggctaacttccaccatatttttgctgaaggtggtgtgctatatgggaatctttgggtcctggggcacttggaacctgggagttgttgggcagatccctgaggtagattcccagaggtacaaaagcagacatgcccctttctccttggcagggaaggtaggactggggcccaagcctccctacccccccggctctagtcagctgctcccacaatccggttaaccattacctcctctggccaggtcagggccagcgggccccatcccctcttcctcactctcctggctcactgcaaggggctcctggccagattaggataggggtttccatggcaacaggcattaggcagggccaagggacctacattgttccctgccttttgtagctgtgttgggtagccagggtgagggggcaggccgatgcccacacgccaagcaaggcagcctgcgttggcaacggaggctcgggctaagtcttgcttattacgacccgactactgtcttccctcctaagcagggaactaagggtacccagaagccgtgggaacgattccgcaaagtgacattttgcgcgggctgccaggtctctgcggcgagtgagccaggcagggagggcatgtgcctgccaaggcaggtcaagtcaaggagaggccccaggatggagcctcaagtgcagcgatgaaggcgaaggggtgggggtgggggcggccaaacaaaaggggaaaattaaaaaggacgctcctccagctgtcgtgtaaaaggctccaaaaatagctgacgtgggcctggtatcagcgcgcgcctggctgaaaaggaaggggaagtgcatgtctcccgcctcccagcctttgtctgagcaggggccgagccacgaccctccctctcgccaggggagcgcgcggggtgctccagccccccacgggtgctcgtctcgttccaggggcgcagggcgggcaggccacccttcgggtccgggacactctcaggaccccctcccgaaatacctaggggcgcgcggcagccccgagcccccgcccgcgcagagctggccgtcgcccgggccaccagttgccaccgtccctcaagtccccaccccagcgcctggcacggccgggaagcgccgggcgggggagcgcggagcgaagctgccccgcggccctttgtgcgcctgaccccgccgtccccgggctgcgggctggcgggacgtgcttcccggccccagcctgggaagccgccacgtcgcagctgggggcgcgcgcctgcctggaccctccgcgcggcactcacagtggcgccgcggctgctcttgcgaggtgggggctgtcagggccgccggcgcccaggccggccgcgagcctgaggctctgcagagcgagcgcacgacccgcaggtagccggccatcccaagctggagagcgaacgagcagggcgggagaggtccgagcgcgcgccgctcctcccggctgcctggccgcgggctaacgctgggcctggcgggcgctggccgcgcgggcaccaccggggcggggctgccgggcctgccgccccattgggccttgccggggaggaggcggggccagggccgccgacgcctccagcgtcccgcgggagccgggacccggcggccaggcccggctggtgcttctctgggcgccgctgaaagcccagctccgcaggagctacaggcgtgagacccaccgggacccgcgagcgggatcagggctgggggattagcagagccgcttgcgaggctgaccctctccaggatgccccatgtaaacctggatgtcagtttctgacgctttagcttaaacccaaaagccaatctgagcgaactcttgcttccctcgcctgccgggctgaacccaaaggcgcattagcccagtgcggctgcttcattcttgagctaagaccgccggcggcgtctgcgcctccgcgagtccgctgtcaggtccagctggtgtagagagagttgaaatctcactttgggccgggcgcggtggctcacgtctgtaatcctagaacttttgggaggtcgaggcaggcggatcacttgaagtcaggagttcgagaccaggctggctaacataatgaaacccctgtctctactaaaaatacaaaaattgatcgggcatggtggcgcgcgcctgtaatcccagctactcaggaggctgaggcgggagaatcacttgaacctgagaggcagagattgcagtgagctgagatcatgccactgcactccagcctgggcaacagagtgagactccgtctcaaaaaaaaaaaaaaaaaaccacgaaaaaagaaatatgattggaccagaaggccaataacctgagtggggaaacccagcaagtcctgtccgtgtagattcttcttgacctttctctgcagcattccttccttctgagtacggggcaggactctctctgggatggaggggtcttaggacctgcaagcaaacaaggtaggtcagataatttatggccagtttttacccagaaatgtgtgggagaaagagtaatatttttgggttcgatgtctggctttgggggagaagggctctggtttctatgacctgccttgaggaagaaggattccagtttctatggctggcctcggaggagagtgaggggccaaagacaggagggagggagagggtcagagagagctgctcctgaggcctgcattttggggtgttgttttctgagaccctagagtagtcaaacagccacagtagaaacagttccatttttgcctgtttgcatataaaagatgggtttgtttgtttgttttaattaaaaatagagatggggggatctcactatgttgcccaggctggtctccagctcctaagcttaaatgatcctcccgcctcggcctcgcaaagcactgggattacaggtgtgagccactgcacctggccacaaaagacagttgtaattgattctgccacaaacaaagtttctctcttcatctgttttcttaaactaagacaccagctgagggctgggttttatttggaaaaacctgacctctttcccttctctgctttcccagtcacgctaattcactccaaataggagcaacctttctcttctgtgttctcagccctcccctccactacctcacagtcaacattgccaggtggagctggaccaggaaggtgaccttcaactagtgacttcaaagctcccctcaccaagtcctagccggcagaactactactctggccatgggatccagaaggctgagcccaagggagggctgcttttgggccccccagagtctgaggcctctgtcaaaggcctggtcttgggccagcttgtgccagaaagaccccttatccctttgactctgttcagaattctgttgctccaaacacaagtagagaccatggaagcctctggcatttgactttcctgccaacctggtattatcaggtgcctggatctcaatgtccacacctgtaaactggaagactggacccctgaagatccttctggtccaaacaatcagacttacgtatgtcagccacccatactgccacctctgaaatggcggtaatga

SEQ ID NO: 1242115 - DNA, 4001 bp, Homo sapiens
tcttgaactcccgacctcaagtgatccgcccactttggcctcccaaagtgctagaattacaggcatgagccaccatgcctggccacaacctgaaatggaaactcaacagaggaactgtcctgattgaaaccggcatccagctcagcacctccaccatcctggggtcagcctctgagccaccttctgctccaatccctaaagtgagaagctggcccagaagtcaaatgactctgccaaaggtcacacagggagtgcatgtcagagaacctcatcttctgactccacaacccaacactttctgaatacctactatgagggttttttcatgcagatcacactaaaggcaaaacagatttaccagcacaatcattatcaagtgttgctttagtgcctcactgtgaaggcaaatgtacctaccaaagatgaattgggtgttaaatgtaagttcagagattaaaggactgagttcagttttcacagtgacacagaagttgctttacttttaggagcaaatgtgacataagagttatcatcacaagcaaatctgggtctgaagagggtgacaaagtagaatctagttattgaacaaaaaaaccagttaatgatgcccatgaaaaccactgtctgttggagacagataaacatattgataagaaagcttcagatttttgttttccttctgtacataccaagtgctttcacatacattattttatttaatactcaaacaattctgtgatgtaagtatagatattcacagatgggcatattaaggcttagagatgtttagtaatttgcttagggtcacacagccaatcagtggcattgctaggatttaaatctgagactcctaaattccagtacagagatcttttccttaaataacagtgcatctctggacctctctttaaaccgaaaaaatgggagaaaagtagtatcaaacttacagaaaaacgttaaattgtttatagatttctaggggaccaccctttcatagcaacaggagacttgaggcctgatggcctgtaccatcatttgctatgtgaccttgggaaatgggaaccaagacacctaggttcctctccctgctctgacaccgacctcctgtgtgaccttgagcaaattcttcttcaggcacaggttagttccactgagaagctacggaactgcatagatgatctgaaaccctttccagctctggcatctgagctgtcaaggagagctaaagcgctccagattgcaggattcccaccaatgaaaggtaaaaggaaggctctgctggtctctctctccgaaggttcagacggtaattccgaggtgtaagatgccctatcctatgaaggggaaatagctacaagagcactagaggtctgactgggaagagcgccaaagggaaaacaatctgatagggaaaagggcccccggattctctcacctgggaaaacctcccaagctcaacgccagtgcccgtggcacctgcggttccccggccaagggccgcgcagacagcggatgagaggtgtgggcagtgctgaggggatcagtcccgcagcagggccgcagccggggaagcggcccggatggcggagccgggacagaggctcccgtgaccttcccgggctcggcgcgaagcctgggctctggcctgggcggatgcgggtgacggcagccgggtctcggcaggagcagggccggcgcccccccgccttgaccttgacgccgtccccgcctctgcgctgctgacccggcccggggcggcccatacactgcgagccggccacggagcgcggggcacgggcgaccaggaccggctcccaagctgtccccgcgggcagccaccgcctccctgtctggcccacgcgcccgcccacacccggcacgcgaccggctctcctgccagccctcgcggcctgcctgcctgccacacgccggcctgccagcgctcaccttagagatccacgcgggcccagccatcgcttcccctcctggctccgcagcaacagccgcagcggcagtgcgcaagcgcccaccccacgctcggagcccgcccctgcacggccacgccccctgaacgccccgccccctagaccgcctcaggattgcttcgcgctcgctcgctgccccgcccctggacattccgctggcgaatcgccgggctcgtctctctgtgactggcctggctgagcgccaggcgaacccggaaactgaggggccggcatctccgggaaagcttcttcctcccctccctggttcattgactcgctgttaaggtaagacgtttgttccacacctactaggtgctgattaatgttctaggatcttggggatatagcgctcctcatagaatttacaatcccgtggagaaagacacataattttcttattccacaaattttgattttttttttttttttgagaccgggtctcactctgtcgcccaggctggagtgcagtagcgcgaacaggttcactacaaagcctcgacctcctgggatcaagtaattactaagcccagcccaactttgttttttcttttctttttctttttttttttttttttttttctccgtagagatggggcctcgctatgttgctcaggctggtctggaactccagagttcaagcgatctgcttgccccaggctcacaaagtgagccactgcgactggccgaattttattttttaccagctttattgaggtataatgtatatatagtaacatttactcactgtaagtgtacagtttgatgatttttagtaaatgtaaacagttgcacaaccatcaccacaatccagtttttgagcatatgaaaatgttccttgtgtccgtttatagtcaatcccgctcctgtcctcaatcccaggcaactactaatctgtctatttagctcaacaaatatttctgagggtcaactagacaccaggcactgttttaagtgctggggcttagtgtccagtaggaaagacaggcttcaatcaagtgtcacacacatgtcattaaaactgttgcgccaagaagcaaaagagcaaggagctatggcaaggcaaaatcaggcaacctgattcaaacctaacctggaggtcagggaatgcttctctgaagaaataacatccatactcacctttccccttgtcctctccctgtccatcacaaactcctgagttcctgctgatggccaggcctctagctgggtgccaggggaggtcaggtgtttaaaccaggtctctgctaccctaccctgggaagagttctatccagagaggagctgcctacccacccagagaggtgatgagtgcagtagagaagtgatcccaagagcttttatgacctaaataataaactgcagctaagtctgtggccttgtcaggaaggagggcttttatcaacccctttccattgggccccttcccctcatcaggccctggcagtcccatcctgaagtgttctcccacagttcctccatccccaatgtcacccctgccctccttcgggccagaccacctcaggcccaggctcttacaacagcctcttcacctgccaacctgccctccccttcaggcacagctctgaccagggctcgccccggctctgaaacctcctggctctcccttgcactctcctctcacaccactgtcttttttcagcctgatttcccaccactccttccagccccaaagacctggagcgcctgccaactaggactgctggccagcccccaaatgcttcccatattttacctctccgtgcctatggtcgtgccattccctcagcctcaatgccctcttgccccacttctactggctgaaattctagctccttgtcaagactcagcttacatgttgggaagtagtaaaagttgtaaaagcccccaagacccacgaatgtgtccccctctccttactcagagccctctagcacttggctcccacctctcctgggaaacatcacattctcttctgctgtgtgccattgagaagataagctttgggccaggcgtggt

SEQ ID NO: 1242116 - DNA, 4001 bp, Homo sapiens
agggagcagggtgtgtggtcccagtacccggggtacagactaggttgtggccccattgcccctctcctctggcactctgggtgttggtccttttgcctttgtcatagggagagatgaagagtagcaaacaccaactatggtttcccaaaaccaaggaagagggtgctcctagaacctttacttccagccaacctctctgctcctgcagaagagaaatgagcaggaaaagaaggaggccaaagaatagatggggttaaggccaatcagagaatcagaagcccggctggagggacaagcactccaatcccaggcatgatgccaagtcaccaacttctccagcaaacaacttaccagaccagttacaactccactcgaggaggaatgaacccacctggtctgaaatggcagtcacagacccctcctcacatttccagataactagcgatcctggagctggcccctccccagcagactagggccctccctggctgagggagatggggaaatgggtggggagaaaggaggggcgttggggttataggcattccccgcccagcgccccccgcgcccccctccccccgtccccggcccaggaagatgtaatgttttaagactttttaggatcgcacttattcaaacccctgcgcatcctccccatgtcgtgagttcacccgtcttagccccgaatccaaccctggtatagctgtcgggaataaagtttttccttgatgcggacgcgagcttctacttcttgggagaggagtggagagagaatagcccagatgagtgtctgtggggaacttgaggtgggagggttaagggactagatttgcactctcctcccgggagatgggaccattgcagccactaaagggaacagagtggtggtgaccgagctccaggcagcagagccgagctccaggcagcagaaccggcggaccgcgagagccagggcaaggtctccgcgtgtgcacacttcggggaagggcaggggcacgtgagcatccccgcggctcgctcgctctcgctttcggtggcttctcctctccttcttggctcacgggctctgtcccgggtcgctccctagccacgcgccgccctccaggaatctccctcgtcttctcctgtctctcccgcgcactcctcagcccagtaccagctccaaatgcaggtcgtgccatctccgcccagtgcagccgtcagagtcccggtctccgctccccaggctgctgtcccctgtcttggctgcctcgggctatgtccacggccgggcacccagcaccccagctcgtccgcctcggtcagcgcttagccttgcggtctcccctggctcgtttccctcggtctccacgccagcccgccccgcttgctcccgcttcgctgcactccttgctcctcagtctgggctccgggtcctgccccagtcttcctccggggggttccgtcctcaacacgcccctagggcccccagcagtccggccttggtaccctctccccgtccggatccgcagggtcccccccgcgcggggtccgccctcaggtccgcgccgctctccccgggtccgcccctcgcgcccgctccctccctgctcgcccttcccctggctccgtccgcaaccgcccggtccggggcgctttcactcaccctcgctcggcgcgggcagcagcagcaacagcagcggcagcaggagccggggccagagcggggcgggcgggcggcgcggagacgcggcgcgctgcacagccatggggctctcggtcagctcggctcggcgacgcgcggctcccgggcctctcgcggctcacagcgtcccgcggggccggcgccggggccggggctggggctccggccggggccgagcccaggcggtgggggactggggccgcatgcctgctcagcagcgcggggggcgcagggggagcgccgcttgcgccatcttgcacccacccgggcgatctgtcagcctcgcccggggtgcgcgctccacactcgcaccgctcgcggccgccccgccctcctccccagcccgccgcccccctcctctctgctcccggtcccctcccccagccccctctccccggaggcccggtctggggaacaaaagagccggcgagcgctttaagcggccggacattcccggctgcgcggcggacgcgccccctgcgctttgaactgtggctggagcggccggcgccgtcccgggctgcagccgggtatcccctccccgcgggccagccggggacctggggggctgaggaagtggacaccagcggactggggagtgggtccgggctgcggaaagacacacagctgcgggatttgctctgacccactctttctgctgcgccctcctccaagtccatattttagagataattctctaaaaagctgcgtaaagttgtcaaagattcagttttccatggatttctggtccttccactcaaaggatagatcctgtagctgcaagcttggcttctctggaccgaggagtcctggcgctccgctggggaggattgcctggagagagcagacccagcagcaggacaatgagagctctaaaggggcctggcttccgacctgggttctgcctgctgcctagcccagtcactctcactgagctcatctgaaagatgaaaataatcttatctctcctgttcatccctagagacctttaaaccgcagaggtcctgacaaatgacctggtaactggaaaagcacatagaaagttaaaattcccagtaacgtttctgtgccacaaagaaggccctcaatcgttcatgtcagagaacatataaggagacaacagaggtcccacgtgagaatgttacagaagataagcatgtcttttagcagagacatacccatactagccctcagagatcttgaatctcagccactctctattaaatggtcttctgttgagtccagcatgatggactagtccatcaaaattattgagcagctactaagttctaggagctagagaattaaagctggcaggctaggcttagtggctcacacctgtaatcccagcactttgggaggccgaggtgggcagatcacttgaacccaggagttcaaaaccagcctgggcaacatggtgaaaacctgtctctacaaaaaatacaaacattagccaagcatggcggtgcatgcctggagtcccactgtattccagcctgggcaacacagaccctgtctcaataaataaataaataataaaagttggcctaatgtagctatttgctcctttggcactggactgggatggcagaggaaaaactaagtctttcttttgataccaactctggaactttgggaccatgtacgaaactaacggtggctcacgcctgtaatcccagcactttgggaagctgaggcgggtggattacctgatgtcaggagttcgagaccagcctgaccaatgtgatgaaacaccatctctactaaaaatacaaaaaaattagccgggcgtggtggcaggcgcctgtaatcccagctactcgggaggctgaggcaggaaaatagcttgaacccgggaggcaaacgttgcagtgagctgagattgcaccattgcactccagcctgggcgacagagcaagactccgtctcgaaacaaacaaacaaacaaaaaactaactttgatacggataagtaaggaagtacaggcctccagaaatcagagtgcctgtagatggacaggtttactaatgatgaggttggcatagctcaggactgttcactctagggcagctactggaagatgagcctgagaagcaggacatgaggcatgtgaacagcgggaagcaatggaaaaattctaggtggaggactccaatgtgccaaagccctattggatttcattgtgagaaagggtgggagtggtggtctactggccttaggaaagggaggggaagggccctccctgggcctaaaatcctggaactccctcctgcagggcttgaattctcaacaaccccttcttggcttgtcctggact

SEQ ID NO: 1242117 - DNA, 4001 bp, Homo sapiens
ccggcctgctgagatttggaggaccagggcaagctgttgtagccactcacactgcaaccaagagacgccgcaactcggtccctcgcctgctttgtgcgttcgggagcagggagaggccagggaagctgggtccctcgcggcaggtcctaaaggtattgaataatgcgccggtgcggttcccagccctgatgccgtttagctgggtgaccctgagctcgttccaggagccctaggaatagcggaaggtggggcaggggaactattccttaatcccctgagctctgggaagacagacctctctctgacacttccccgcccctttcacctgacaagccagggcctccagctcctctggcccagcagccgagacccagcctcgcggcggcctccagcttaatccgctgttggggctggaaaggggcgtgtctttgtagggacagaaggggtccgaggagttcccggcactttcccacccgctgtttggttttcctggagatgggcctggggctggccaggcggaggctccttccccccgcctccctcccacgtggcctggctgagtctctctggaaagccgcagcagctggagagaaatccccctccccacccccacctccaagtccctccccgactctccccggacacatcctcagctcccccctccgcggggaaggcaagaactaggcgaacaaagcggccagcccatccccctcccagccctgccacctacactccccatgagccgcccccaaacgcacaccggacaggaagcgacagagctgtgggtggaagccgcagccctagacacacacccttggggacttcgctatcccctccccagccctttctccagcttggacaactctgacttaccccgtacccactccgcactgggctgcggactggatgaggccctgctgacctcgtccacgcttccctggtcggtccctggggggtggggccggggtgacacgcgtcccatcgtgagaacaagcgctggacatgtccacgaaagcaaatggtttcctgccccctcccccagtccactgctggccacaggttttggggagcaacacctccctctacccctctctaaccggccccagggaccacacccactgggcaaagttgagtgttgttttatcaccaccacccccagtcaaacgggatccatcgctctgtcccccactatgggcaaggacacttcccaaatgccaaggccaaatattagctcagccccataaacacaattgcacacgcacccgacccaaatggaggtgcagacacaaccccagttccctcctcttttacacacactctcaacccaagacacgcgcaggcaaggcagagcccgccccgcgaaagccaccgacaccgcagctacccgccccgccgatgccacgccgcgaccatggcacgcactgcggacacgacaggagcactcccaacacacacacacacacacacacacacacacacacacacgactccagactctgcgaaccaaaggcacacacccactgcggacaagcacgccccacaaacgccccccggccgcagctcgcagacccccgcgcaggcatcgcgggcacctggacgcgcagcccccgcacttgctcgggactccggcttgagccagccccgcagcccgatgcagaccagggcgcgggcgcaccagcactccgcagtcgctcctgcctctccgggcgcccgcccttaccgcgcgcggccaacaggcagaaggtcaacgcgaggagcccgcggccgcggccggcgtccccccgcgccatggggctgggctcgggccgccgccgccgccgccgcctccccgtgcttcggccgccgccgcggggggagagcgcgccgggcgtcagtggcccggggaggcgcggcgccgcgggcgggggcgcggcctcgggggcccgggcccgagctggggccggcgcgggggccagggccgctgccgcctcacccgcccctccatcgccatcttgggcgagcggcccgggagggggcgcccggcgagtgtggccaccctggccccgccggggaccctgcgcccgcgcgccacggccctgcgcctcgcgggggctcctctcggcccgggtctgtgtcccggtgcctcgccctctccgggtcgccgcgggcccccgtgaggccgcctgttgctgggtctgtctcttagtctccccgtctctgagtcttctggtctctctgcctcagcgtctctatttcttctccctgttgctgcctcggggtctccacctccgttccaggctcaggggaggcagattcagggccacggtctttgtccagatggcccccttgccacccgagcccagtccattccagcccaggtcctggcctgaatgctggttcgcttctccacacgttgcgccagcccacctgcggagatcttgatagtcctatctgccatcccaaaccaagggcttctcttggcctccttcccttgctctggcagtaactaacacaggcaggacacttttacactaccttcaagcactaccatattcagatgtcgccgcatggggaaactgaggctggagaaggtgaagtgacttgcccaaggacaggaggctagggagcagcagatacaggacctgaaccttggttttctgacttcggaaggtcatctccactccctcaccctgcctctgctgtccagcatttactgaagtaccctttttctcattcttcaacggtactttctctaacctacctagccagactgtttgcctcagtatcccgcaaatatttcttgttctacagccaagggttcaattgtcaggctagggtggggaaaagagtacagattcaatgacctagttaaggtcctttccaactccaagatgccatagttcttcccttccctgtgtctctaagtgttcctgtgacttagagccatcttgtctctacacctgtctgttgtcagttaaccctcaataatcactggcgctttgcatatctaacaggcctggcgtttattcattcattgccacgccccatcttcacttgccctatcagcagcatttgacttagtgaatcactccctcttccttgaaacacttgcttcccttagtgatctcatctggtcctcaaggctttaaagagcatctttatgctaatgatgcccaaatgtatactttcagcctagaccatctttcctgaaccctggacttctgtatccagccatccaggccccagttcctttagctgtctagtagacaaactcatcctgatcttttctatcaatctttctcctcccacagtcttcctcatctcagttcctttcctgttgcccaggtcaaaaatgtagaggccaggcttggtggcttacgcctgtaatcccagcactttgggaggccgaggtgggaggatcgcttgaggccaggagttcaagaccaacctggccagcatagcgagacccccatttctattaaaaaaaaatgtagagtcatctcctactcttcatgttcagatgcttcaccctccactttctcactgtggccttggtccaagacccgtcgcctctcacctggattgtcacagcaaactcctcactgatctttttctgtccttgtcctccttgagtgttttctcaatacagcagccagagtgctcctgttaaaatgagatcatgccacttctctgctagaaacccaccagcggctcctatgtcagagcaaaagccaaagtccttattgtgacccacaaggcctatctgatctgtaggcttgctctacctctctgacctccccttcgacaccaccccctgtgctcaccacctctccagccacaccatcctccttgctgtaacttgatcgcgggcagcctcctcccctccagcctcaagacctttgtccggccagtgcaagtctagagatctgttccctcatactggataccataaaggctttctcacagcctcaccccctactcttcctatcctccttccctgctgtctattcttgtctttaact

SEQ ID NO: 1242118 - DNA, 4001 bp, Homo sapiens
ggccctagtacccctccatcccccggcccgggagaaactgggagaccatcccagagccctctgaactggggacccagtggcgctccccggaagagacaagctgaggaagactcccggcctcgcacttcccggggggctgcccagagagcgcttcccctcaccccaccgcccagccccgggacgccgggggcaggtaacccaacgaggagcgggccaaagtgacgggcaaggccaggaacccgaggagcccgaggggcaaaagcacgttgggcgacgggaggcagcgacgggcgcttggagacgtgtcctggggcttcggggcctctccgcagggcacctcccccctcgagggcaactcgcaccccgcgggccgggcggctgcccgctccccactgcccggtcagccccagcagcggagacgcggtgcggcccagggtgctgtcgctgctgcctgcgcgccgcaggggatcagcgctgtgtgcggagaggctcttgcgcatggaaggggcgaggtgcgggtcgcggggcccgggaaccgcggagcccgccccggcaccaacttccctaccgagtcctcgcgcctagccgggaaacacggctgggctgtcaggacggagaaagagaaaagcccttcccgcgcggggatgcgcggagccagggcccgcggggctccagacgaacgagcccgggtcccgggtccgctgcagcctccctcccggcagagccgccctgcgccccaccccgccgctcccgagcccgggggcccgacagctgcgacggtggcaactcgggtttcgcaaacagggcgcagcccctcggaggaaaagttcccgcagtggccgcgggcggcgggcacatactcactttctccactcgtcggccagagcgagagcgcggcggagagaaacaggagcccccacagcgaggtcggggaccctcctccggagccagacttcattccttttatttgggatgaaattcccctttctcaaaaaaaaaaaaaaaaaaaaaaaagaaaagaaaagaaaaaaaggaaatgaaaggaaacaagtctcaaactcagtcttcgctccccctccaaaaacaagggcgaaggaaacaatactccgaaggcggcgccgccggggccctccgggtgcgcggacggggcgggcggcgcggggcggcccctcagcgccggcagcagcggcccagggctcggcggagtcgggaacccgaggcgcgccggggcgggctgtcggcgtcgtcggcctccattttcaaacccggagaggcaggaaggggggaaaactgcaaagaaagggggcaaagcccaaatctgcctaggcgaggaaaaacaagcccggccctggccgcgcgggaggcggccggacgcccgagcttccgccgcgggagggcgcgacgcagttcgcaagatcgccccgaagtccgggtcacaggcgaggccggcgaggggcagaaacgcggagtcaaaatgaatgagcggctccccctcctcctcctcctcctggctccgctcgccgccgcctcctccctcagcgccgccgccgccgcggcgagctccttcccaaatccaggacacacacaaagcggcgggccggccgcgccgcgctcagcactcccgccgcgccgcccggctctgcgccgccgcccgccccgcgccggcccccgcccggcccccgcccgccgccgcctgctctgcgcgggggctccggctcgctgaaggtcacagccgaggcgaggcgcgccgtggagctgcccccgcgcgggaggggcgtggagggcgcggggggatccggggagcggggccgagggtctgcgagcgccggccgtgggcaggctcgctggcggcgtccctctcgctctcccgcctctctcgagttcgcctggtgcgctcgctcctcctcgggttttttccctttttttttccgctcagcggagttaatgctggtaaacaagagccccagcctcgccgcgccgccgccgccgctgccacacactgggggctcgcgcgcgcgcgcgcgccctggcccgcgcacacgcgcccgctcgcacactcgagcggccaccgccgcagcagcggcgcgccgagggcccggcccaggccggcgcgcgcaaaaaaccggagcccggttccccaagacgtgcggagcggagcccgggcgtggggcgcgagactgcgaggcgccgcccccatctcccgccccaccgcctcccgcgcgcacacagagacacgcgcgcgtgcccacccgctcccgcccccaccgcactgcgccggccaccccgcacgcgccctcccctcccgcccgactccaaaaacaatgcccccgccgccggtccggtctcggcggggcaggggtgggtagccagggaaaggctaggcaggggaggggtgggcaggagaggggaggggtgggcggggagtgcggggctgggagaggttcattgaaaacaacaacagcgcggctggaaagcgcgtttccccggttcttgaaaagcttcattgtttcttgcagctgttgcaaaataaataaatgcgtgcatgcggcatttttttcgctgcgtactggaaagcccgaacgtggcggaaggggcgcacctgggagaaaggggaccccccccccaggctactacgccgggcactttcacgccaggctggggtgcccgcggcgttgcgaccgtggagcccggagtttgggggctcagggggagcggagggggaagggcgcggcccgtgtggctcggcccagagtggctcgaggagagaggaccccgccgcccctcgcgggccccgcgccccggaaggggggcccagacaggcagcgccgcgtgccccgggcgcgtccccgcggcggccgccagagggcgcggcgggcgctggggagggcagcccgcggagagtcgcctccctccctccgggggaggaaatgtgggggcccgggctgggggccgactcggctgggtcgcgctggcgtggcctcccggaccagccgcccgccctgagcgctctccgcggcctcgcgcagctcagggctccaccacgtgggcggctgcggggagcggccggggcgcgtgcacgctgcgggtctccgaagctcggggggcgtgtccgggtcccggggcgccgaggagggggtggaggctggggccgggaagcctcccttggccgcggtcccgacccgggaacacgccgcatgcactcgggatcagcggctactgcggaaacccacccgcacctgtctcgggtcctcccaggcacgttcctcttgcttcgtttgctacgtaagtgactggaaaccagtaccgaccctaagtctccgcggttgttttcttgaatgtgcaggaggagaggtttccccaaagcgagactcccctaggactgccatctaatgaataaatgctgcggagaccaggtcctcaaagagggaaacagcccagcagtggcaggagagaggagtttgaaatacgtggacttttacaaacagtgattggaccatgtgtcgcccttaatgtggtccggtttcatgactcaggctaattgatgccagtaataaatttttttaagatagctaataaaagagttgtgaattgtcgagataagaagtggttgtctcaaacaatcgggtaggatggtagaagggacctgatgtaaaggaaggtagtaggtttcttttactctctaattctaaaatacttctgcattagaacgtgtatccatcgttcgtaaataattttttaagagctgaaaacaagtcaaaagctatcataacggaaacttagccctttttttctaaagttgtttcctagatcattttcctccttggaaatttctagctcaattcagagtcagttgtatagaaagaaaataaaccttgttttacctaagaaagttattcatatgatgggatggttttgtttaactgaaattcagcttgatttttaaataaagagtttcagttttggatgttcctagatttaacagtgaaataaatttattagaa

SEQ ID NO: 1242119 - DNA, 4001 bp, Homo sapiens
ctggctaatttttgtatttttagtagaaacagggtttcaccatgttggccagcctggtcaggaactcctgacctcaagtgatccgcccgcctcggcctctcaaattgctgggattacaggcgtgagccactgtacctggccagtagatttcaattcaaagtgtacctccctccctctcactcctatacccctgggccactgctgggaaccagaaagggggaggggttgacaaaagggcaggtctcaaggtcctggtctgcctctgccaaaataattctgccttaactgattatacatgagttttcatgatagattttaattctaaaaaggtttccatgaatacaaacaattagaaaataataattctatagtcaattgcatccaacagagattattttttaaccctatggatatatgaccatctttgtgttgaggaaactcaagtatttattgaggcatgccacaaagccagtgagagcatggattttggagtcaagctgggtttgggtcctgggaacgtctagctgagtggtcctgtgcaagcctcctcacctctcggtttggggatatactccctaagctccaggttgttgtaaggtttaaattaaatgaggtatgtgaatattttagcttggtgcctggggcttgaagagtggccaggaaatggttggggtactaagttttatttaaaagactcactggggattgaataaatgagcagtagaggcttcaagggtctgacccacctgacggctcatgcccacgtcatatctgcagcaggggaggtgccttctactgtgctcgtaaatgttgaccatcacttaacttcagggtaaagaaggagaacagaggaggaaaaaggctgaacggtcttctccttccgggggaaactggagaaataggaaggggagccacagagacggcagctcccaggctgcttccaggaacccagtgggagcttgaactggcctcctgggacaaaggggtcgtctttgtatggctcagcctgaagtgggaggatttcacctgataagggcaggaggagaagatgcttccctgtattccacagggaacctctattcttatgctgttacctcattctccagctacagaaagcaaacttgctatggaccaaaaaagaaaaaaacaaacaaacaaaaaacaaaaacaaaaaaacaccaatcctgggacctaccaatgcaggaattagtcacgggacccttatcaaaaagcaagcagagtgaacacttttcccatggtcaatctgcagagatgcccacccgctgtgcccactttggagaaaaggagtctggccaggcagcagagaagcccccatcaggtgccccgtggcctttctctctcctgctgccttcctttcctccacctccttccacaccccattgccaaggatgagacgaggctgaaaagtcagaaatctcaggaccaaattctccccgtgctgcagagccaggtcaagcgatatccctctgcccgctctggccttctgaagctgcttcctcctgtacctaactgtgacatggtgacacagagattcctaccaacacaatcctggcttctgctcctgcccctgaccccagcaccacttccaaatatgaagttacgtcctagcaaccaagaccctccccattcaggtcagagaggccagcttcctccctccggtaacggccacctggacagagcagctgcctgacagacattcactcacctggtgcccacctacctccctatgcacagtcccccggggctgccatctcccttgctcctctctccatctgcccagcagggattgcagcaccacttattcccggacagcctgtggcccaggcctgggtcagagccggcaaggattgagaaatggacgctcagttctcagacggaggccggcctttgagtcagatcccaggctccgatagttgagatgccgtgagtaggacacaatattcaccacctgctctggacaggtgactcaggacaaatgtgtcccacctggcatggatttgctcgaagactcctgatctgagccatctgactgctccacgtgaaaaggcttgatccaaaaaggggggctgccagtgctgagaagctcagcctcagaacaaggtccaccatctgctgggctggccggcaacacccaggaggcaaacccagtgcagagccacagaaccacagtgaggttccttggtccagcccagttgcccctgccttctttggacaacacagaaatgactaggagagccgaaaggtagcagacatgactcggtgcctgcaatgtgcctggcacgctgctaggagctttctataaacctcatcacatgctggaagctgtggcacgtgcctataatcccagctactcaggaggctgaggcagaaggatcacttgagccgggggattcaagacaagcccgggcaaaccatagcaagaactcctctcaaattatataaaaatttaataaaaagaggaaaaaagtcatcacatacaatcctgccatcaatctggtaaatatatcacctgctttgcagacaaagaaagccactgcacaaacgttcattaaacacctactacgtgccgtggaatttccccaaggtcacacagttagcaagttagcaagtcaaaatccacctgtctccaaagcccaggctttttccatagcatttcatttcttgtctgtgccaccctttcccaaaaacaacagactggctctcagaagcttatgtaactcagtggtcctcaagccagctgcatcagcagcatctgctagaaatgcaagttctcaggccctggcctagacctcctgaagcagcacctctggcactctgttttcacaaagcctccaggtgattttggtgcgtgctcaggtgcgagagcccatgacctaacgtatacagagcatgttgaaaactgcagcataaaagaatggggcacttttgtgtgtgtcctgttggcattagtgtcatgagaccagagtgcctttcccccacgtagccccttggagaatctaatcataaggtggcatttaatccatctgccccgcaaagagcatcccacacatctctcctaagctcagtctctgtgagccctgtgtacatgctaggctgaggtttttgtatggacctctcttctaaagaatggaatgtttcccaacgctcagcaccaaatgtttcagggcttcctgggggctttaatgagggtgtaggtgcaacctgtaggaagcccttgaaattccatgcaaggctgcaaagatctagccgctgctgctggagaacacaggcccacggtcccaagggaagcacgggaggagggagcactctggggataaagctgcctttgtcagcaggcacaggggacattgtagggctgagtctggagtgagtctggagtgcagtgaaggaatttctaaattgcagagagtgagcgcctctgtcagtgtcgcctgctcagctcacacccacaatctctctcacaatggcctgggtgcggtggggccaggacagactcaggccccacttccatcttgctctggcagagaggctgaggagcaattcagcaccccagggctatgggggctggccttgcccttcttggatcctgaggcctgggagggccccacagcccccctcctccactaagtctaagctctctcttgtcatcggcacctgaatccagttcccgcctctccctctattttccgaagatctgttctttctcactctcagaaggtaaatttattccaaagtgtagttgagacttggccctgatttttcctaatacggggtggtttgtgcttcaaggtggaaattttatcacccctctgcccttcaggacatcctgcagaaagagtctccaccctgcccaacactccatagtccagctcactgcaagccagaagagacggggaggaagacgcaggtgagagagccccgccctggttagaactaggaagttcaagcaccacttgaagctcaaccaagagcttcctgtg

SEQ ID NO: 1242120 - DNA, 4001 bp, Homo sapiens
tgtttgtgctttgacctacccgtgtcattaaaaacaaggtgcctgtgcacagcttctgatggggccacttcggcttcccacagctcttcacgctccctctcacccagccagcatttcccatgtatgtacctgcctggccctgaagccgtgtgtttgctgctctgcctatacacaggtcattgatcagcttgctctcggcaaaggagtgttttccctccctcaaaagctgatgaaaaggttccaggtagaaaggaatctgtgaagtaggattctccaccttggctacatactggaatctggagggccctgaaaaatactgacgcccacccctaggtactgactgaagatacctgggatgcagcctgggtgttgggaatgtgatgagcaggggattgcaatgtgcaacctgctctgtgccagccaggacctcaggcatgccctggagcacataggagtctttctcagaagccagcattgaaccagcatcatatctgcatgggtaagggagagggtgtcctggctctctttcccaggggcagagggaggctggcctgtgtgccttgggggatgcttgctactggaacgcaacccagttgaaggaactctgatccctcctgtcccttgtctcaatgccaggtttcaaaagaagtgaatcatggagcattacaccttgatgatatcaaagagaaattctgcacaatctaagagactggccttgggcaagtgagcccaggcctccagcctgtttctgcatttttgaatggcttggctgtaaggtgctgttgtgagaatcaggaggcagaggttccacaggcaagccctttgcagattggagtgacaacctcctgtcagttaaacactgaggcgtttgcttttgctagaatgttcctcaattagggtgactaagggagaggagcctccacccacagggcctctgctctgggtgagatgtgctagatctttccaaaatgtcccttagccctccaaaagtctttcatgagcttttctgtagtgttactcaaacagtcatatgttttatagtctatatgtttatttcctgccactactagttgctccttggaggcaggacctgactacctggtctcatccctttctctctctccccccagcatctagcacagggcctcacgaagccagcattcaatgtgtgcttgctgaatgcatcatatgcttggggtctacgtgctcttccacacattgctgatgagtgaatctgggctcagaaaggcaaagtaggttgctcagaatcatactaatgacagacagatccaggattccctgacttcaagtcctatgctctctctagcaagcaaataaatattcaagtcatgtcttagcattgtcaggtgtaccatgtggacacacccttgctatccacctcatggaggaggtgaccactggtagatgctatttatacttttctggcgttgcattctctgactcagaaatcctgaatgcagcaggactgttgcaactggaatgttggcaccctagaggtagctgcccaggatggctgggtgggtgtgtctttggacctcttccaagggctccatcctcccaattatccagaatggcctgcattcctgctgccacccccacagcatcacccgtccacccaggaggctccccaccctggacagcacctccacggtgctgctgcccagcacctggaacccttgactgttgatcagccaggtccagtggtgatgtcaatgcagagcactctgatcctcaggccaatttgtgctcttatcttatccctgcaccttttttcaaaagacccttccttttggaagatctcaatgaaagcttacctgggctggctcttctccaccctggctcgccctctgtggaggacttggtctgtgggccgataccaggtcctgggcagccggcagaggcactagggcttctccctgctgtgtcttcctgtggtagcagcagtggcagcagctctctcgcttcctgtggtgtaaacaggaagcgagaccatgtcaaaacggtagcctcaagctgtgagaaggcgagacacgctttgattgggacggaaaaacggatattgagctgctttcagtgagaagttcatcagcagccatgtaaagaggattcttttctccttggtgctgacgtggcagagccagcacctcctagacatgcagagcatcccttgacttccagcaacctggtatccaggtcatgggctcatactgttgacatacttgaagaccctgactctttatgataggaacaaaaggctttgagtgtggagggactggcattgcttcagttacaactgcatctggtgaactacccaccccgggagggtatagggcagcgtagaaacaaggcagcaaaaaaacctggcagctagtgttccctaaggttagagcactcaggaaaatgcttgtcaattgctgtcacttgttaagcactcttcaaatatttagtaagtgttctgcaaaagatgacagatactcagcacctgtgccattgctcccctctgtggcacctagggtgacatcctcaatctgttgcagaattgtttccaccactgagcctggatgcagccttggggtcctcccaaaacagcctagggacaagatgaaccaggctctgaatagctatgcaatacttgaagagtttggattatcacacagtgtgcttaaggtactgtcagggcccagaggaaacagagagaccagttccatcccagaggtggagaaggcttcctagagaagtactttctgtctgcttcataaacagagtaagaattttgcaggcagagaggcagaaaaatagtgttccagagacatagcccaaccaaacataatacccatctggaaaaaaagattgagaaagcagacatcatcaaaatgatgccacctgtatttgattgtctgcaagagaaatgctttgctatactgcggtggcctccacgtccggttcattccagatttgtgtaatgatgggccatttgacatggctgcaggcttccttccagagaggaaggaaagaggaaggaacaaatgcatcctttgggactaaaaaagcaatggcaaatatccatgacctgaaatttaagatctacattgacaataaacattttggaggaagcaaaggtctacaaaagttagaagtgtattcacagagcattgcctcagctcgagttccctactgtagaactgagctttaggagagcattatgaaatactgagagatcaaccaatttcaaaggaatcattgagcttctcgaactagcccttaaaaaaagtaaggctgagtcatggcattagaagctccaaatattggcctgatgatctctaagtctcttgtccacaagagaaattacatggggatgaaatttaatttcacctggttgggagctctgtaagttgacatctgttgacattcatgaattgttagctcttttacaggcagccacatgtgataccaactgcagtcaatgcagctttacaacttagaacagcacaaatgtgttttgtcttttcatcaacacatccaatattgcatcctcttcatgggagacttcagaattagcccctgaaataaatttgattttacacaaatttttctcttactagtgtttcctggaaccatgcttggtggatgagggagggagaagagaaagaaggaaagagggagagagcagattcagcatagtggggagaaagtacgtttttgtttggtttttttgtttgttttctaagaaaggattcttcgaaaatcctgttgtgtttttttaagcaagttttttaaagcacgggggagagtttaggctgattttttataagagggatgttagttttttgttgaagaaaatatcccaaagttcatattggttgtgagagttaagtccccttgaattagagtagatgggaaagacttgggggtcatccatagcagcttgacaacagtcttgggaccctgtagagaaaagactgcagggagggaaaagtggg

SEQ ID NO: 1242121 - DNA, 4001 bp, Homo sapiens
ttcatagtccttcactacttaatataatattatattatatatcaagttgttattatctatatccccaaatcagaataaaagttgcaataggactgagtctgttttgctcactcccgtgcctggcttaagtatttactgaatgaaggaaggaatgacagcatccccagagacatgatgcctttttcctttgagcctcccacagccctcctacacccctcttgtagtgtatttttcactctatcttaagtgagttatttcggggcaaagactggacccccactgtgccttgcagataataggtgctcaggaaatacctatgatattaagaggaagcatgtgaataatccattctaggattctgctgaggtcttgaaatactttttgaatttcatttaggtgagcgctaatctagatacattcataatgtcactaataaatttgactctcagttggtggattagattttttcacatcattaatggcagcctgggagcctggcgagcctcccccaaacccactgggctgatggcttctccttctacccaattaagtgagtgcaggacatattaatagaagtcacatcatgggttatagagcagactgggctgggtgaggctcttaaggatgctgtggagtccttaaggcccttaacacaaatgttgtttattatgtgtgttaaatagtgatttccctcctgaagaaggcaagctgtacagaggtgacagacccctttcaaaggtactggaatgtcttccctatttaaatgcatagactggcagtaggctataggagaaatgtctgtatgttggcttatcactgcgttagcagcactgatcccatggtttagggccatctggactcttgaaaaatctcacctttgatagaagccacagcacttgatagcaaaatattttacttggtctagatttctggtattctgcaatctccatctcattatgatgacaaaaattgaaatatgatataacagaaaggaaaacattctgaattctggcaggtccccagacactgcttatttccccctcccctattgatggctccacttgccaccttcagcatctacacctatgttgaaaatggcagaaggtacctggaaaatgttcacagtcagcattcagggaacaaactcactcatccggcaccccttaccttgcttgccataaggcctccttctctgcccaggccctataagtctgtttctataagtctacaagaaagatgtgatttggcctgcctatggtatgctctataatgcctgtctagagaaaagagcttcccagtgtattgactactgcatctggcattttccatcagggatctaggctcagtttaccttggagtgacatagtgcttccctgaacctctcaagcaagagtgttaactgagcctgattcactcccatactcattgttacagttccagtgggccctgcctcaacttttttcttgctctctttcagaattataactctgcagcttcatgatttttgaataaatggattcaaagactttaattcacagcaccagaaaccaactgcaggctagttcaggcctgcaaagcctgggcataccttcatgaagaatatcctcctacaggtcttgcctcgatcattcccagctgcttggagttgagcagcctccgaggccagtgctagatcaggaacactgctgggcccagcctccgatgtgtctgccagctgcacagatgagtggaaaattccctccttgccctgggccaaggaaatctcaaagggatcaggatatttctcatcagggctagagccatcatcactggtcttagcattacagagcatcagggacctggagatggaccgaaattttgcagattttctgctctttccagcgcggctgtgcgactccatcctcaaagaggaagtgaagctgcctttcttcctttcctggtctctggcccttggctgacgggtggccactggacagggcttagctgccacttcatgagtccctagaggaaagaggaaatgggaagaagcaatgtgacttgctgctgacaagtggagctgcacacgagtcctggatctgagccacgggttcttggtgcccgtgaagcaggacagatgggcagatcatcctttaagatcactggcccttccagtgtgccagccaaatggggctcagttaacccaagcggttaacacccactccactcccagtgtcatggagacctagccccagagcttctcattctatagacaagggaactgaggtgcagagaggggaagtaccaacccaaggcactagcagaagagccagtaataagttacaggagacagtttagggatcttagaggccagtactttgtgaggtttttaaacttggaagccattctttaaacaaaagtgtgcagtgaactccagtctatagagcagaccaaagatgggaaaaccaaaactaagttccactttcctggtccccttggtaacttcacccttgataactcccatggcatctccaaagaaaccccagaatccatggagctgagtctgaagaccactgatgtcttatgtcctccattgacagatgaagagcccaaggctaggaaggttggaagtcttacctaacactgacctgccagagttgatgtgagcataaaagaaggtgacacttggcaagtgcctgccaaagggatgagcacataacaggctcctggcaaacatgagtgcctttctccaggcctaaagtcaaacacttggccagagtcacagtcaggcccaggggctcctgcttcatcacctatccccactgggtcaaactctcacagccagagagaccaaagatgggctttccagtcaggccaacatcctggctcagctttgccaagaggagcctcccatggattcagtttccatgaagcaggtggtgaaaggagccctgatgctgtatcctaaaaagttctgactcaggcccaagccacaaaagagaggctgtggccagaacaacaaattgtgggatgctcttggcccattggtactgctgtttgcgcacatccagtattgaataaggaatagcagagacctaataacatttcattacatcaaaaccctttcacatatcctccaaaaggagaatttctgcctaaaaatagactgtttttcagcactcgaattgcacacatttattgttttctgtattagctctttgattttatcaatttattcaccaaccatcccagtaatcaatagcaataaacaaaaatgaattaatgattgattgaaagtctacaatatatcaggcactgtgtttgatgctttagtataaattaattcggttttgatccattttatcaagcaccctcttgtcaacatgcctaagttttgtactccatgtccttccatctcaaatgatagtaaaactccaatcacagacaaatccaagcctctgcagagttcatgcctgactgtgggtctctaagccttgaaggagacactctcactcctgaacagattggtatcatgaaacattcgtggccaccaactgggcctccagctctggccaacagtagtactgtttcagtaatcagcttgataacacatttccaacaatgtctgtttgaaaacttcactatggtgtgccaggcattgctctcattgctttactatttagttctcataaactctgtggtagcctccatcaatatcctcattttacagaagagatactaaggcacagagaggttaggtgactttctcaagatcacacagctaggactcagtaaaagcaggaatcaaaccaggcaatctggctcttaagcctgcatgctttaccctggctctaccgtctcattgattattgcctttctcacctttagcctcagtctcttcctctgtgctggatctttatcctcagcacatgaacacactcaaacattttctgtctttcaaacactatatgttaactccatgtcctcctcttgtcacttgcttttcctttatccccttcatgtct

SEQ ID NO: 1242122 - DNA, 4001 bp, Homo sapiens
cactgcactccagcttgggccttgtgtgaaaaaaaaaacaaaaagaaaaaagaataaagaaatcttgagtaaaacttggtagtctcccttcttattctctatcactgctatcatctaaatttccaggaacctcctgggccacttctaaccgctagatggccaagctacagagtgattatttccttaggcaagcaaacatcccagccctctaatacggtatttcctggggctggaatatcaacaggaagttatgtgaggaagagctctgccaaaacactcattccaaggaagggactggtaaagtgacaaatttgcccaatcctgtacaacatcctgcatcctccacatgtggccctgttgcacatctaatccacaggcaggtcactcgctgctgactctattcttctctgggctcctgggacgtataaatatgactctatgtaagaaaaccagaggctgggcgcagtttgctcatgcctgtaatcccagcactttgggaggccgaggcgggcggatcacgagttcaggagttccagaccagcctggccaacatggtgaaaccctgactctactaaaaccacaaaaattagccgggcgcggtggcgggcgcctatactcctagctactcgggaggctgaggcaggaaaattgcttgaacccgggaggcggaggttgcagtgagccgagatcgcgccactgcactccagcctgggtgacagagcaagactccgtctctagagaaaaaaagaaaaccagacagattaaaaagttgcacttacaaagcagttggggcatttattgacatttaaacaagggaggagatcctgaacactagtctcgctcagtttataaaaacttgaggccaaactctccatcatctgtacacagcttaaccacggccaggagcaagaattcgagttaaacgaattgaaccagtccaaccacaagacgataaagggaaacagggcgtggggatttccagtttttccttttacattacaaagtttccaacacaagaagccaacaataccccagtgctgcaccaagttacttcccactgtttcccaaggcacagtcaattaataatcagtagtccaagttctaagaacattccctggaaaacaaggacgcacctcccgtggctctatgcatggcctgccactgatgaatcaaattcttaagaacctacgaccgtctgatacccttgaggagagcaccctcatagaatctccagcatcaggcctcagttttcccatctgtaaaagacagccatgcaaagtgggagatccgctaggcttccagatcgaagtcatcgcgctcctcattgtactctagcacgtgccgcttgatcttggacgagtccacccaagtgacaaagtcctccatgctgcgcgtgacaaggaaggcggggtcggtaaccacgtcagggcccacgcgtacgtgcccttgctccacaaaggccacggcagcctgaaggtgctgcgccatgcgcagcttgaggagcacggtggggaggcggcggcggcagaaggacgaggccgtgacgaagtcgcagagctccagcgaaccgcgcgtgggcaccaagccgagagcatacagcttgtccagcagcgcggccgaagcgcgcacgcggaactggtcgcgttcgggcaggtcgcgcaggcgccgcgccagctcacgcacggcacggctcagctggttgtagcgcgtgtagtcctcccgccgctgcagccggtaacgccgcagcacgcgcagctcgtgcaggttgtggtcggtgacctcccagttcaggaagtccacctgcttcagcagcttctgctcgtggaacttaagcttccgcaccatgatggcggcagccgcagccgcaggacccgaagctgagagcgcgttctggcatccgcgcgatttccgccgcggcgccccaagacctggacggcctgggaccctgggccaatgaaagaaagacttaaagtcacgccctcacttcccattggccagggtgggaccacgcctctgcactgggatctcgcgtttcttcttttcttcgcgtttgcgagggagggggtagaagcaccggaggtgggtggttgggagcgggtccctaggcggttccgcgcggtttttagtagccaagactgtatccctttctgcggcaatcatttcctcctagacttctgtcctttggggactttcagagtctcccccgcaagagctgaagaggccatttctggggaagaggggtgactgcggcttgttgattgggtttactgtgctaacttgcactgggctcctgccatgccttgggggagcttgccggagccggctctcctggggctgacctggtagtccccgccgcccgccagcgtcaggtccttcacctggcatgcagagcgatctctcattgtcaagttgggataggtggcaccgaacccatgaaatactgattggctgcttcctaggcccacagaaaagggatctataagggagtcgcctggaaatctgtattattaactaaagtgtcagatgattcataaaacccagcaagtttgagaaacttggactataactacaagtccaaaccctttagtctgtgctcaaatgaattatcctgacatgaatttctggccaccaagcattgagttaacaaatttaatgctgtttccgctagttgcatctgtaagttacatctgagtatagcgctgcagacctaacccctttttgcccgggcatttgacgccacctagcttctcactgatcatttttgttttgtatgcttttcattgtcttttacaatacaatatttgagggttgggcgcggtggcacatgcctgtaatcccagcactttgggaggctgaggtgggaggatcatttgaggccaggagttcaagaccaacctaggcaaaaaaaaaaagaaaaaagaagcgagatcccacctctgtaaaaaatcttaaagaattagccaagcatggtggtgcgcacctgtagtcctgactacctgggaggctgagggggaaggatcatttgagcccaggacttgtaggctgcattgagctacaatggtgccaccgcaccccagcttgcacaacagagccagaccctgtctcaaaaagatatatatatatatataaaatattcgatatctggaaaataatataatatgtaaattataaagtataataaatactcataaacttagccagtttaagaaaacatcaccaggctaggcatggtggctcatgcctgtaatcccaacactgggaggccaaggtgggaggatcactggaagccaggagttcaagaccagcctgggcaacatagtaagactcagtccctatggacaaaaaaaaaaaaaaaaaattagccaggcatggtggcagcacctatagtcccagctactggtgagggtttcggggtaagaggggggaggatcccttgaagccggaagttcaaggatgcagtgagccatgatcacactactgcactccagcttgggcaacagaacaacatcctgtctctaaaacaaacagaaagctaatacagattgtttgcttttttaatctaattgattttttctttttttttttttggagatcgagtcttgctctctcgcccaggctggagtgcagtggtgtgatcttggctcactgcaacctccgcctcctgggttcaagctattctcctgcctcagcctcctgagtagctgggactgcaggcacctgccaccacacctggctaattttttgtatttttagtagagacgaggtttcaccgtgttagccaggatggtctccatctcctgaccttgtgatccacccactttggcctcccaaagtgctgggattacaggcatgagccactgcacccagccccagagtaggtcttattgagaaggtgatattttataggggttaagccatgtgtggatatctagggggagaacatttcaggaagaggaaacagtggaaatgccttaaggcaggaatgtgcctggcatgtcaga

SEQ ID NO: 1242123 - DNA, 4001 bp, Homo sapiens
gaaaactggagagacaaactgtttcaggactcaggtgggtaagttgtcttttaaaaaaaaaaatagtgcctcatttcccaaaatggaaacactaagggatttgatatctcatcactacccacactcaattgcctaaaagcaaatggcagaaggaaatggaatccaaattgaggaagtctagttcttgctaccccagagctacatgtatgtcatttctcttgatgtttctcatctcctttatacaattacaggctgcatttaagtagggcttatcgggaaaagtaaagacagccaattcaaccttccctcggctggtctattagctggttctcaaagcacaatcctgagtgtgaagcccaccttccagcctttctgattctgtagaataactcaaaaccagaggatgtgtaatcaaagctctggtgttacaacagatttcatcccaaatcgccgggctttgtcactacaggctcaggaaagagggaaggcaaaagtgattgccggaacaagacaacattttgaggagcaggaaaaaaaaaaagataaaaacacttgccactctacttacaaaagcttgctcttcctaaaagaattctgtgaggggaaggccaggattgaagcacagcagcattgctctttcccttccttcctccctggcccatatccagatactgagggctgcaacaagaagcctctttggtgggggcactaggatggaaagaagaggggatgagtacattccccaccctccctaaattgtttctacttctcctaaggctttccacagccatgtcaacagtctaagaatgattatactcttttgtgaaagaacgtcataaacttatatttcagaaacaggaggggaacaggagaaagtgagtgatttaagaagccgtgtttgtgcccttctggccaggtgtactttttgggggacagcaaatagcccttgcttgaccccttcagtcagtagctacccagggtgtgggaggatatacatagaattctatgtgattatagcttctagtgcatatgtcaacaactatatacagggatctagaaatttaatgcatctctggccactgcaactaggttgacgtacctgagctccactacttttggtgccctcctcctttcgagagcttcagcttacttaaaaagagcccctacagctccatccttcccctgagtcttgggggaaagccccagtcacccctgcatgtaggatacaccagagcgagcggcgcagaagggtttggtgccgggatctccccacccctccccccatccccctacggctcagggccctggtgcagcacggtcctgggcagcaaacccccagccccccggcgaatcgtggtcccttggctgaagatctggctgcgggcctcccgctccggggccagccggcgatggtgggagtgtgaggggcgttcactctcgtgggggtcactcccgcgggctctccaccccatcctgctgcgaagtcctgcctctgggcttggggagaatggttcccggcggcccccagcgcggagggcttcaacgactcccgggcgccgccgccgtttcctcttcgtcctcgtccggcccccgaggccgctcgagcggcccggccggggggctgtccgcagggggctccggaggcgccggtcgcgccgcctgcagtgggggaacgtcgcgcggcgcctcgcggcgggacgacccagtggtgttgggccccgccgccgccgcccccgaagtcccagacgggccagtggcgttggagccgccggggggcgggccagcggctccccccgaggtcccggcgcccaccggctgccagatgaggctgtagtagacggcgagcacgatggcggccagcgacacggagagcacgtaggcgaacacggtggcgagccggacccacttcttgttggtcttggccgccatcttcgccttcttgtccccggtgtaggtggccggcttgccccgctcggccggggccgcgtcgcgctccttcatgggggggccccggcctttgccccggtgctccacggccccggctggagggggcctggcggcctgcaaggactgggcagggggcggcccggcgccctcggttcccggcggccccgcgctccgccgccgctcctcacgccgcccgcccgcagcccgccaccgcgttgctgcagccgccgccggggcctggaccagtcaccgccgccagcgccgccgccgccgccggcccgtcagctgcttccccgccgccgccacagccacagccgccacagccgccacagccgcccggctccgcgtccccatccgccgccacgccgccgcgcgctccgccgccgcctgcccggccgccggccgcctggtctccagtggccgcgcggaccgcgcgctccgctccagcccggctcccccgcctcgcgcgccggcaacagggggcggggagagcgctgctgggggctgccccttaaaagggcgacgccggggtccggaagtgccgcgaggggaggcggcggctgccgggagccgcgagccccgccgggacgccccgttaagagagagttaagggaggctggctcttaaacgggcgacgtcaccgcgacccctggtgggctggcgcggcgtagagtggagccccgggcacttctttaaaagggggaacggcgttgtgcgaggcggagtgcggagctagaagggggcggtcggagcgcgagctgtcaactctggcgcctccccgctccgccccgaggctccgaagtgacaggtggaatagcagcctgggcttcggactccaggcctaggtttatcctctgggaggggacggtaagagggatagggaagataccacgttccagctctcagcttgctccccgcaccgcgtaccccctgggtgggtctcccaggcccattcacagctaaagaacctggttgacgccaggggtaggcggttctggcacctggagcgctcactggggccgcagctggttgtgttccttccacccagtccaggctgggcttcggagctctactgaagtcgtcgcaattgcgtaccccagcccgcctcaccccgccaaccctgagcctccgggacagagccacggactgagctgttctccagactcgcttgccaccttagtcccaaagttcgccgcaggtcgctggtcccgctttttgggtcttccaattcctggttttggcctggatttggacccaaggagctgcactgaacctgaggagtttaactctcaggactcctagagcgttttcactctcagatcccctccagacctcaaggcttgggcggttgtcccctccccactttcccatgtgaggtttgtcttctttggctccaggccaggcgccaggcagtgggctctgtgcctggtctttggaccccctaggtgctaacaacccttcatgctcagactctcccttgcggctttacttgtgccctccccctccttccgctctctgctctccctgccttctctcctccccattccctctctataaggctttccagaattctggttccctcctccttggatgctacttcctgtgttcccagaactgggcatatggactgcctgggtgtctgaatgagtgagggagacttgtctgggcgtgtgttggggaacagaactgtggttctgatggggttctgtgggtgaaccctccctcaagcccctgcaagtgtgagcctgacctggcttctaccctgtggggcaggatcccctctgcccttctcacttccccccctcctccaggaatctttggcttccagaggaccccccttacacacacacacacacacacacacacacacacacacacacacgaggaagccctcccaaaacagctgccttgcccacctcagcagcacagaagtcaagtggctaccagaactgagtgtgctagtggactgctggaaccacaggcctctaacccagcctcagtctcattcctgatccaggcccaggtgtggggctgccactagtaatggctagcca

SEQ ID NO: 1242124 - DNA, 4001 bp, Homo sapiens
acagagccagactccgtctcaaaaaacaaaaaaaaaaaaacattcattttaaagtctagaaggtatgcaacttttaccacacataatgatctcaaattgttttataggaggaggagcttggaaatttcaaacataaaatgcaactagaacagaatattatttggcattaaaagcaaatgaggccatgtgcggtggctcatgcctataatcccagcactctgggaggccaaggcaggcggatcacttgaggtcaggagttcgagaccggcctagccaacatggtgaaaccccgtttctactaaaaatacaaaaattagccgggtgtggtggcagccgcctgtaatcccagctactggggaggctgaggcacgagaagtgcttgaacctgggaggcggaggtcgcagtgagtcgggaccccgccactgcactccagcctggacgacagagcgagactcagtctcaaaaaaaaaaaaaaaaaggaattaagtactgatacctgctacaacacggatgaaccttgaaaacaccatgttaagtgaaacaaactaggcaaagaaagatacatatgtttcttttttaggtaaatttaggcaaaaaatatattaatagttacctaagactggagggagggggaatggggagtgactgctaaatggcttctagagattctcttttagggtgatgaattaaatagtggttgatggctacagaatttaataaatatagtttcagaaaattacttaattatacgctttagaaagcggaattttttggtatttgaatcatatttcaataaagctattatttaatttaagttgccactgaaaagccacaataattttgttgtggaggaaataatgaaagtcactgactggaaaagtaacctgtgacgttagccaggtcaacctccaaattccttcccccatttctaacaagtacatcaaactagagacagtgtgtgaatcaaagaattccaggcacagttggctgttaactagaatagtaagtggctgcctaggttctgtcattcctaaactgtagggggcttctagcctcggagattacggaagtagtactttccattagcgagctcaagaaggaatgtcaaaataggatgacactttcctagtcgctatgtaaaaacctaaaaaaccagaagaggtgtcatctagacactcccaagtctatgcaggtgtcagcctgcccccacccaacaccagccagcagcgtgcaccattcaaccgtatctcaacttgccccttacaaaatgacacactaacaagcccttagatctcatttgtttaaaatgacagatacacaaccttcacggggttcccactcaaggccttccagcctccgccctgcccctgcccacccccaaacctacacacgtgttagcccgacaccgccccaccgggtcccacgtgcacctggtctaacacactccccacgtgtgggcgccccacgggcttcctcaggtggctgaggtcaccgcatgaccccgggtctccagagatatgaaacgggaaggacaaggccctagtccctgaggtcccaaccctgcggggagtgtccacacccatcctccatactaaccccaacaaatccaagggccgggggcgacggcccctttaagacgcggcccagttgtcgcccgcagagaggggcgcaacaagacctacacaacccccactccgttcgcccgcccacgtctagttgcctcacctcgggccgcctggccccgccgccgcgacggcggcggagggggggcggggtgcgggcggggtccggaggggggggtcgccccgccgacggtggagccgcggttcgctctctgaggccgtgggacggtgactgcgttgggcgtggacgctcctagctcgctccctccgcggctcctgggaccccaagatggcggcggcgctgaggcggctgcgggcgctgggccggcggcggcggcggccactttcactcactgagaggagcggagcagggacacggggagccatggcgggggggaggagaggcgccatagccaggccagaacaatcgagccgctacacgggtggcttacccccaccccgcccacactcactgctcgtcgcctgcccgtggccacccgtagtgccgctgccgtcggcctcgcgcagctcgcaccccgccgctgccacctgacgccccgtgcgaaccggggttcgaggggagaccctgatccatgccatctgagtacagattagtcgggactgggactggcgaagattgccgaaaggcggcggggaggaggaggaggatgtcatcgctacagtgagcaagcagatctcgcaggagaaaatgtcgcgagagctttccaggcccgcaaccgccgatgcaaggttacttttcccggaagtaacgtcaatcgaaaccgcccgggatcctgggatatttgttcccgcaggctagaggtgggaaggtgcagccaagttgataagatctctttaggggaaggagaggctcgcagctggtattttgttactagtttctgacccctttggatggggttgtagattgtcggggaagtgcctggtgtgtagttcgactactatacagtaattagtttggggctcccatttagactctgggagcaagaacgctataggttgggtaggacagcatagttagataagatgtctacgtgaaggttgtgggatacaaggacttgggaacacgcagacctgttatcggaaatgccagcctgttctcacatccacacagtgtgcctctgaaaagcgaataattgcttttacctgtgccaattctacaatttgagtccactgccacccacatttactaaacttggggtctcgctatgttgcccagtctactgggctggttcccagtctcctggcctgaagtgatcctcctgcctggaaggatcacctcaggccaaacgtctcagagcagtccattagactggtcaacatagcgagaccccgtctctacaaaaaagacaacataataaatgtaatcgacccaactaccaggatgtgtggtgagaattgcctagggtaaggcctaggtgtagataagaattagaacttactgaaagttaaatatgctgttaattcagttcctttgggtctcattctttaatccattttaacctggcccttagcatttaactaaaaagtactttattaaggtcatcaagtagccttcttgtgctgagttaactgacctttaaaaagttaaatttgtgtcagggtgcagtgccacacgcctgtaatcccagcactttgggaggtcaggtggtcgaatcacctgaggtcaggagctcgagaccagcctgaccaatatggtgaaaccccatctctactaaaaatacaaaaattagccgggcgtggtggcgggtgcctgtagtccagctacttgggagcctgaggcaggagaatcgcttgaacctgggaggcggaggttacagtgaaccgagatcgcaccattgcactccagcctgggcagcaagagcgaaattccgtatcaaaaagaaaaaaaaaaaaatccatctcaaaaagaaaaaaaaaaagttacatttgcaagccaagcgcggtagctcacgcgtgtaatcccggcactttgggaggctgaggcgggtggatcacttgaggtcgggattttgagaccagcctggccaacatggtgaaacctcgtctctactgaaaaaaaaaaaaaaaaaaaaaaaaaaagattagccgggcgtggtggcgggcacctgtaatcccagctactcgggagtctgaggcaggagaatctcttgaacctgggaggcaggggttgcagtgagccgagactgagccactgtactccaacctgggacagagcgagactctgcctcaagaaaaaaaaccaagagttaaatttgcttgaatgcatggccaggcacggtggctcacgcctgtaatcccagtactttgggaggcctaggcaggcagatcacgaggtcaggagtttgagaccagcctga

SEQ ID NO: 1242125 - DNA, 4001 bp, Homo sapiens
atccttttaaataagtaggggtgcagatcaacatggatatgactattagctcttctgacccatctcacaagtcagtgtcaacagttatctattactataatgttgtatcctaggtaagagtctccattattgttctaattatttggaatctataaaaagagtgggtatgtgcagcaaagaattaaccttacccaaagaggggtccagtcttcgctcctggctactgggaggtgatctctaggcgcctgggatgtcctgcctgatagaagtgtctttgtctgtgggctttggccaccagacagtctatcaacatgatttataatgggtgttttgatccacgctgtatcagctcagacctctggagcagcgggaaactaaaagtattcaggaggggctggagattaatggtcaaccacaagggcagtgtgagattgagccccagtaaaaactctggacatcaaagcctcagataagcttctctagttgcaatattctatgcatattgtcacatatcatggctgggaggaagtaatgcaggtaatgacgtcaatgactccacagggataagatgaccaaaagctctatgtttgtacccctcctggactctgtcctattcatctctttccttggctgattaatttgtatgccttcactataataaaattggagatgtgagcacagcacttccctgagctctgcgaatagttctagtgaatcattgaatgtgagggtggtgatggggcccctaagtttgtacccagctggtctgaagtgaggtggttctggggacccctgaacttgcaggtagtgagtgttgaagttagggcagttttttgtggaccgttccctcagacttcgcagtttggctaaactcattgctgcgtgatggtgaaagtgagggtgagaaaagatcaggtaagattaggtatgattcttaatggggaagtctatgaaattggtgagttcaggggcttgtatttgggaaaaggtacatttagggaagtctctcctagatgggaggtaagagatcaaaattctgccagaaaaattagatccctttgacgagtaagacccacttcagaccaactgagtgacagtcctgacagagtgaccttagacaaatgacttcaagacttagtcaaatgcagctattatatatgtgatagttaaaaccgatgatatatgtggaaatatcttaaagttacctcacataaatgtgaaaacaaaatgccatgatcatttcagaaacatctgagtgcaactattacaaattgagctgtattggacaagactttcttgacatttcccctctcaaattaaaaaggtctttcactaagtttttaaatgtcacattttttcattccaagttatcttgatttttctgtgtgttctccaatgaggaacatttagatctaaaaaactggggtgtttaagaaaagcaattcacatatttcaatttgtctccaaatttcttatcacctcctagagtgtccgatttgtctctcctccactcccgacgtcatgggttcaaatttttcagaatataacatttaaaaatgatgcctcagcgtgaggttaatttttctgaagtaaaggttccgggtgaacggttttagagttttcccagaggcagaaagtcctgcttctggggcgtaacctacagggtaagtcaccgggagtgtgctgggccgtgggggaaggtctgggtgggcatttttgggagcctctcgcgagttggagggagtctaggggcggcgcaccaaatgggtgagcgtcggtgaatcggcgcgcgggacctcgctcggaagtggcgcggctgggcagggcagggccgggggaagcccgtttcccacctggattaagatggatccgacagggtcgtggttttcagtgttctgtgccatggctaggtcagggaacggctacctccgcggaggcgcggtttccaagcacggaaaccttcagccggagccgctcgtccccatggcaacaccgcgcgcgacctggcctgttccacgctgggagcggaagggggtctaggggcggggtcaggccagcctggtcattccgagaacgccctctccggcctgtctccccctcgcgccggcggccgtggtgcagcccaaggcggaagcggctgcctgacggaaccggctcgcgagcgcagctatggctgctggcgtaccctgtgcgttagtcaccagctgctcctccgtcttctcaggagaccagctggtccaacgtgagtagataggcgcctgggccgacctccaaggcccctgagcctcagcgggcgacggacccagcaccacggcctctctgggccttgtccccgcagcgggccctgcgttcttcctccagtcagtggaggcgcccagtctccccaggtggctgcccctatctcttaatctcgtgcttttctgcccactcggccttcttcggcgttcctttcggcttcctgtgtaaagtgagactgatttcccgctctgctcagcccaggccacaggtttttgcgaggatccgttgagatgaacctgaaggctctccggaaattgcgctaggttacaggagtgtaaggtgctggaattgttgatatcgtgatgttgttatccttgctgctccgggagagagtgtttactctgaattctgaagtttattctgcgtatttactctgaagtttattctgcttcttaatgtgtacattataagacttgttagctttgtccgctccactctagttattcacgcctttcatctgaggcatgggctctccgccaacatgagtttttgggtatgattgggctagtgcttttgcttgtagaccctcataatggctgtcagacttactaactcttaaaagagagaacatgggactggataataagccaactctactaaagggctctgtgaagttgaattataggtaactcaagacttctgttttaagtgtatggcttagaatcagagcagtgacttagctgtatgatctcgagcaagtcacctaacctacctacattccttccttcttttctttttttttttttaaagagacgggaacttgctctgtcgcccgggctggagtgcagtgatgcgatcatagctcacttcagcctcgaactcctgggctcaagcgatcctcctgcctcagtctcccgagcaactgggactgcaggctcacaccacgaaccctggctaatttttttattttttgtagagccagagtcttgctatgttgctcaggctggtctccaactcgtggtttcaagtgatcctcctgtcttggccgccctaagtgctgagattacaggcgtgagccactgtgcctggctacccttcactttctcttttctctccttttttttatttttgttttgagatagggtctcactctgctgcccaggctgtagtgcagtggcgttatctcggctcactgcaacctctgcctcctgggctcaagccatccccctacctcagcctcccaagtatctgggactacaggtgtgtgccaccacgcccggctaattgcccccccccccccccgtcatacggggtttggccatgttgcccaggctggtctggaactcccgggctcaagtgatctgcctgcctttgccacccaaagtgctgggattacaggtgtgagtcaccaccgcgcccggccccttcaccttctatctataaaatagggataattttcgcaagattgtgcttatccccgagtctggcacatagtaaacatttgataaatcatagacattattattaaggcacattactatctctgtaaccctcaatttcctgatccttaaaatggggcatatgagcctatttcaggagtatttgaaggacagatgatgtgacattttgaacacactttgtaaactgtaaagcattgtataattataatttctttgctacacctgtcaaatgacagaattaggtaagatgtcccttcagtgcagatattatatgacttagttatcatttgtgatcacttagaa

SEQ ID NO: 1242126 - DNA, 4001 bp, Homo sapiens
gtctgtctccaaagcctgagcttaaccttgaagcaatctgcttccttcatgggcaccaggtgtggaataaattcctaactccttgggaaggcattcaaggcctttcccagtctggtcccaactatttttggaaactctcctcttcccttcctcccaccactgtgcagtctacatcactcagttcccaacacagtatccctctactttcaatacctttgtttatgctcttccctcaggtcctgtctcttgttccacatgccctatcaaacttttttttttttttttttgagacagggtcttgttctgtcactccggctcgagtgcagtggcacaatcatggcttactgcagcctcgactttctgggctcaaatgatcctcctacctcagccccaagcagctgggaccacaggcatgggccaccacgcctggctaatttttttttttttttttaagagatggagtctcactgtgctgcccaggctggtctcaaactcaaggcctcaaactatcctctcacctcggactcccaaagtgctgggattacacgcaggagtcactatgcctggccacctgtcaaactttctacacagcattcttcaaggctctgttcaaatgtcaccttcaggccaggtgcagtggctcacactttgggaggtcgaggcgtggggatcatttgagatcaggagtttgagaccagcctgaccaacacagtgaaaccctgtctctactaaaaatacaaaaattagccagtgtggtggccgacgcctgtactcgggagactgcaggagaatcgcttgaacctgggaggtggagtttgcagtgagctgagattgcaccactgaactccaggctgggcgaccagagcaagaccccctgtctccaaaaaaaaaaaaaaaaaagtcacctcccgtgctcatactgtcttccccaggccccttctccttacctacattactctgtatggctagtaagttcagcatcttttatcattattgcaccttataatcattagcttgcacacctgactctctgattaaaacgctctttggagacagggcctgatcttactcatctttaatttcacaaacgtggcacaatacctcacgtataactgttgatgcgtgaaatgttgatcctttaaaaaagaacattattcccacaatataaaataaaaccgaaaacctcaaaatcccaaagggtcctcctttagccaatcctgcctgcagttcaatgacgtccagggccgacaacagaaaatgaggaagtcagaggattttctgcttcttttttttttctttattactattttacttttgaaatcttgaggagggaactaagcccgagaaaactgaagtgacttgcccaggacggcacctcgtagctagcctgggaccggacaggtctggaccctggtctatcccttgggtctaccccgcaggcaacactagggcagcgcctttccacgaaacgggcagagcccgcgtacccagacccccaatccccgggacacgccctgcgcggtcatcctgccacctcactctaggccgtcttccccaatctcggccgagcctgggcggcgagaggcgctgggtggggctccccctaccgcggccccagctaaggcgggaggcctcgggggtcctctccgccgcctcggaccccgagggggcgcgaaccaggggcctccccgcccgccgcccgccgccccaccgggacggctcttccgggtccgagctgccggcagccgccctgccccacccgcccggccgagcccccaggaaaatcgcgcctcgtctgcaattagcccagcccgaagcccccgcgccgcggagccccgcactcacagccatagtgcggccgggccacgcccagcccgtcaacctcgtctgcggcggacatggcggacgagcccgagtctctgctgaggaagccgtgaaaccttggaggcgcggacggcggtagctacagctcctgccaagtgcgcgggcttgccggggtccccgaggccccgccccgtgccgtcagccccaccccgcaggccccgccccagcggcaccgccccagcgacaccgccctgagcggccggaaagaggcggggccagagtcaccgtgccccgcccctaactccgccccctcagcccggccccgccctgcatcccgctatggtctccgtaggcggaaggaagaaggtagagcccatcctccaatcgggctcacgctgagcttgccctgccgggaatgcccgcccaggtttatagccccgcccccaaggccactgccctatccgcaactctaaccgaaaggctgccggtgtctgctgcctgaaatcaaaatagtgggtcatctcccttctcttgccggcccagctaacctctgcaccaatatttggagaagacaccctttgaggtgacccaggttgtcttgttggacacaagcaggccccaaactgccatgaaagccctccaaccccactctccgcagtttggcaacctggcctcagtcctcttagattcggcagcagtcaccagattacccaggtacccaggtatttgagatgcggatgctaaagccgaactctgtccaaattccctacctttggatcccttgacattgttctttgcaagttctttttaaaataactcttttcccgtatcagggatgcctctgccccctgcaccttgtggcttgcccttcagatattggtattcaacggtattctgtccgcagccctcttctgtttattcttttttcttttctttctttctttttttttattttcttttttttttgagacggagtctcgctctgtcgcccaggctggagtgcagtggcgcgatccgggctcactgcaagctccgcctcccgggttcgcgccattctcctgcctcagcctcccgagtagctgagtctacaggcacccgccaccgcgcccggctaagtttttgtatttttagtagagacggggtttcaccgtgttagccaggatggtctcgatctcctgacctcgtgatccacccgcctcggcctcccacagtgctgggattacaggcgtgagccaccgcgcccggcattttttttttttttttttttttgagacggagttttgctcagtcgttcaggctggagtgcagtggcgcgatctcggctcactgcaacctccgcctcccgggttcaagcgactctcccgcctcagcctcccaagtagctgggattataggtgcccgccaccacgcccaactactttttttgtatttttagtagaggcagggtttcaccatgttgatcaggctggtctcgaactcctgacctcaggtaatccacccgcttctgcttcccaaagtgctgagattacaggtgtgagccaccgcgcccggccctcttccgtttattctttgcctactcagtaatcttttctacactcgcctataactgctgaggacccctcgatatgtatcaccagaccagatcgtctggaagtccctcagtattttcagctaatgaacactttcacctgtgtatagggcagacacttcaaatcccacgtgtcaaatactgaccctgctcctgctatattctctattcacagaagtactcaattcccagtgggaacaccccaggctccttgcctcgcaccctacatccaatctgtgtttatttctgagatgtctacttttgtctccatccctgttgtgattacactgtagtcgcccttctgccaactagatcctcacagttatcagggtgttctctctaaagtgcaaatgcaattgtgtttctctttttaaatttttttttctattcctcccttcaagataatgggccaagttcagcatgatttagcatgccaaatcatagcctgactccagatgttttgctccagctattttcaatgtattcactcttccttcagactattaaagatacttgaaaacctgtaagaacaaaacacccctgtagaaaagtgggcaagggtttcatttattaagcctacaaagtaaaa

SEQ ID NO: 1242127 - DNA, 4001 bp, Homo sapiens
tgtcttcacaaaaacaagaaaaaaaaaagtttgaaaactgcattattggtttctttgaggggaaaaactagtgcttaattaacttagatttttaaatgagaagttaaggtgtgggcctacatcttccctgaacagaagttgtcccaggaggagtttttaaaatggtataggtatgtgtaggtgtacctgttacaatacggtggaaatacatttaaaatttcttcagctcagcttgacaaatgcattttcattattagagactaaacaaacccaagaaaatgtaaagcaacattaccatacttggtgccaagtttagatacatcgaagaacttcttatgtgaactgtcatttaatgtttcaataaggtactcaaaggcgtatcctgaaaaaaaaattgtattttcattaaatgcagcaacaaaatattttattcagctgaaaatacctggaaactagctttatccaatagaattttctgcaatggtaaaaatattctatgtttgagctgtccagtaaagtagccattagcaacgtgtggctattgagcacctgaaatgtggctatcgtgcctgaggaactgaatttttaatttatttaattttgattaatttaaagtcacacagggctagtatccaccacactggaaagcatagttctaaaccataatttgtcaagtaaaaactagtaagataattcactcctgaaatgtgataagaatacctggaaagggacaataagaatgatttaaataatccacggggacgttttggaaagacatgtcttgaaaactgcagagacaggaatttgtgaattccacaattaacattagagggactgattaaaaaaaaaaactaaaagacggatttttacagagcattcaataaaccaaaacaaaaaaacttctcagttaagtccttaccagggcttagtactgaaaataaaagtaacagaatctctaggaaattagcatattctacccgaaagagacaagtcttctggttttgcacgaactgaagctgaactactaagtcaaagatccagaggtctcatttaaacgtgcctcagctcccaacattctagggggcagtggcggggaggcagccctgaggttgaaaagaaccttcagatcttttgtgcagactcatagcggtgggtggccaggaccctcaacattgttaaggctttcatccaaaaggagaaaacataagcacagcccattttcagaatgaatagtatttttttctctttttttttttttgtagagggaggtggacgggggaggagacagcggtgcaataaatggtcggagaactgactgaccaatgttcaaccttgactgcccctcattcggcttccagaggcacagagagactgaggggccttaggctggaccgtggaatcaacatctagctgcgtgagacccgaacacggagacgcaggcccccgccttcatcgctcgccaatggggggcgggcaggagaagacggtgggcctctccctgcccctggtgttgctgacgggggccaggaagccgctggcagcaggcagcggccaccggagagagaggggtgcgggtcaaggccagcggtggggtggcccgccctgcgggtgtcgcgcaggagggtggggatcgggagccccagcttccgcggcctaggctcaaagggcggcccagcaggcaggccccgaggggagcacaacccgagccccgagggcctgggcgcctgccgagcgactccaggcgagaaaagcaaggaattcggcgcctaggcagcgcgcgtttccaactgccagacccagctcggaggcccgaaactgacctgcttttggggcgtccatcgccggagaccatattatccctccggggagggggccagcgggggaagaagggggaggccgggcagggaagacggggaggaagacaggcggactggcaagggaggaaagaaggaagcaggctcgcgcaaatatcgcgagagcagcagagccagccccgggtctgcgctcgcgggatttgtcgcctaactcccgcgagatcgtcggacaggaaaacaaagaaagggaaggggcggagctaaccagaaagcgatttctcgcgccgtcgccgctgttctcgcgagcgggggcggagcgctggggaggctccagtgggggcgttggcgtggctagtttggccttcgcagcgatccgttacttagttgcggccttaagttttctattggggtcatgaattcgagcggtgtttgcgttcccgcaaggtgtctgttggagtcagggtcggaatcggaactgctaggagaaagagctcaaggagaaccgctttcccctaactataaagccttgcattaacttgtcagacgtgggcggcccacacgcgtgttttcaagtgggggcggccatactgatcgggcgcgtgggaggcgctcaactgttgaatgaatgaattttttcttaccctccggtagcttccgtgattgccgacttcttcccagtggcagttaacacatgcttaagcctctccatccttccgcctcagctcctccggtccctgtgttctccacctacccagcattatctcctgtcgcagcaacttaccagaaagagtcgctcatactcggctctcccccacccacttcttatcctcttccagtctggcttccactcccagaaatgcctttagccaaggccagctataactccactttctaatctcacatatctcaatcttgactggttctctcccattgttgaaaaatactcttccatcagcttctgtgacttcagactctacttttgtttcttctcctaagggtgcttgatctcaggctcctctgcagacctcttcctccgcccagcttttaaatgtactgggcacttgatgggcacagtagctcatgcctgtaattccagcactttaggaggccaaagtgggaggatggcttgagctgaaaagttcaagaccaaacacagcaacgtagtgagaccctatctctacaaaaaaaatttaaaaattagctgagtgtggtggcatgcacctgtagtctcagctactcaggaggctgaggtgggaggatcacttgggcccaggagattgaggctgtggtgagccatgattgcaccactgcactccagcctgagcaacacagcaagaccctgtctcaaaaaaaaatatattggacattaaatgtgtcccagggctctggccttgtacctcctccctctgtccattttccctggcccatctcacacttcctttgacttcagttattagttaatatgttgatgcttcccagtctgcctgtgacctgagcctatctcctaaacccggaggtgtatatcctagtacccatgggatgcctccacatcccaaggcacctcaaactaaaaatctccaaaactgaactcgtcatttccctccttaaacctactattccttttgtattgcctgtattagcgaatggcgccaccatccacctggttgcccaagccagaaatcaacacattatacctgactccttcatccactccctttaatcattgatccaagccctgtcaacccaaactccaatatatttcctttattcaccttgctatattttgtaacatctcctttacaatcccagcatgaaattcataggtaatataatctacatacacgataaataatctacttaatgacctaactgtaatataaaggagaaaaataggaaagtaatttattagaaaataatatgtattataatacgtagctgcacaggcatgtctatattagatgacaaaattgagtagtcagatgcttgtatctatttataacgaatgagtttggttttacaggacatataatattcgactgggccaggcacagttggtagctcaagcttgtaatcccagcactttgggaagccaaagctgcaggatcgcttgatgctaggagtttgagactagcctgggcaacatggtgagaccctgtctctacaaaaacttaaagagttagccagaca

SEQ ID NO: 1242128 - DNA, 4001 bp, Homo sapiens
ttttttttgtagagatggggtttctccatgttgcccaggatggtcttgaactcctgagctcaagccacccatctgcctccgcctcccaccgtgctgggattatagatgtgagccactgcacccagccaatagctaacatttttttgagtacctatttaggcactctatctagaccctttctcaatcctcgcaataacccaacaaagttgctactactattatccttcttttcttttactgggtacaaagaggttgagtaacttgtccaaggtaccttagctgttaagtaatgggaactgagattgaaactgaccctcttaactctgcgttaacagttcctgaggacctgcctggcagggctgtttgtgaggagtgaatgagctcaggaatggccagtgcttaggggagcggccagtgcatagtgagtgctcagtcaatagtagctattgttgtcatttcatccccagcacctggagcctggcacggattgggtgtgtgctgctgaggaacctgtgttcttcttggacttcctcaaaccctaccatggtgtctagaaactgacgagctcgcctgcccttctgagatttcccaggggtggctaaccgtgttgacacctttaagttttgctttccacttagtaattcagagaaacagaaagtgagacggggagatgacctcacaatcagctaagagcaagagtgcaggaaatccctggaccacgaactcaggattcaaactgagcagacagcctactctgggtcagaatgctagcctgagagcaaggtcctcagcccgaggctcagcctgttctccaggactgggagggccaaagcctcttgccagagcctcagccaagaatcctctcatttccccacaggtctcaccagtggcagcctggggtagagggaagaatggggaatgtagaccccaagtcactgtgtgggggaactcagtttccccattttaagaccggcaagttggaccagatccagatagatgccccaaaggcggcttccagatgtgagtctatggttctctgaagacaggaagccttctccaggatgtgatggagacaccaccggctttctcccaacagcagtgtgggaaatcttacaagtggggtcacaggtcacagatgggcaccagggaagaggggccagggaagtgggagaggggttatttccaaagcccctgctggccgggccttcactcacctctagcctggccacggcaaatggtgtggcccccaccatgtgctgaggggtgaccccgctgacccgggttctgtaatcggtgatctctccctcaggccggatgaacttgtcgtacagcacagcaccgtggacgttcacgaggctgcaacgagccaggccactctcccggtggggccccagccccaccatctcgcagtccatggccaccacctcacggctcccagccatgttccttggggaccctcagagatgctggagagaggggtatggggggcggtctcacgcttgggcaaaccaagcctccaggtgtcctcagccaaccccagctggccttaccctccgccctgccctttgtttccgacaccacctggccacagtggaagctggcctcttgcctcccccatcccctgccttaccctgcccgtgtgtcccagggcctctggcctgccccgcagcctggggaccgggaaggcccctcccgctgcctccccagctgctgctccagctcccgctctcacctgcctgcctctgcgccctcagctcacgtctgcctctctgctgccactgctcagctactgcagctgctctcagcggtgactcatctctaactccaagccggcatcggcatcccgaccctgtttcagtttctagtttgttatcaagtgaagtcaggggcggaaggccgggcacgtgggctgggctgctccatctcctgggctaccggcaggtggggagctcagctccgggccgagtcagggctgacggagctggcaggctccatgtcagggtgcccctcctttgccccggccctccccctcctcagatgacgcatttgacgttcgtggagtggattgcaacatctttgtttcctttctcaccctccgcccagagaataaacatccccaggactggagctcagggaatgtcccacaactaacttctggagcctgctaccagtctgatactcagtggtctcttatggggtagggaagctggctcttgggacatacaggcttttattggaatgggcaggagaaacttgtggtgggagtggctagcccccacttccaacccagggaaggcaaggagcagcgagggagcccttacaggcctccgtgggttccagatgcctcaatgagctctgcctccagtggggctgactctgtgagggtgaaggagaagcaggccttcggggaggccccaccagcccggccacacttccttgggtccacactctcccaggctaggactttgagctcttagaacagtgcctgccagatagggagggcttggtatttagtgaatgtcaaatgagttacaactggggcaaaaagaaaatcaactttcaatgagggaagtgcttgtctttcactgtggtgagatccaacaataagctgagcgttacccacgcttgcctcctaccccagatctgtgcagaatccacactgatccctccaatctgactgcctcccagtgtcatgaagatctgtggtttgaaaagtaacttccccaggtctgtagtattttcaccaagtgggatttggatgcccaactttaacaaacctcaaaaataaaaccaaagactgaaatacgtcttcatgagaaagccctgctcctgcttactgttcactggatgcaaatttgaggtgtgagagtttttgattcccatcctgaataagcaacttttgctttaattcagactgtgtggggactttatgcttttcaaatgcataaaggttaccctgatttaggaggaaatgaagtaacattcctgttactttatggaaacatgcacttaaaaagtaaccccctaaagatccaatcataggtttgattctacaatccccataggaccccccagtgccccgtggtgctcctcagacaggaacatgtttgctgcaacccctcatacctccacctctgctcacctcctcgggtctcagtcagaacacatcccactcctccaatattttccccatggttctgtgcctgctctgtctcacctgagctgcctctaattcttaccgtttcccctttcctgtggaagtcctaccctagtcctcacctgcctggcctgtgcggccgcaggagtcgctcccgggtctcccacctccatcttcatgccctgctcaaaagggtcctttgagtcctaccatgttacatttcccaaaatctaatctcttgtactgttcatcaccgaggcacttctctgctcaagaaattttgtgatttcctgatgtccaaaaaaaaaaaaaaaaaaaatcaaacctcaactccaggcagtttccagaccctcttccatcagtccaccagccttcccaacctcatcttgcatcactatccaatttaaggcctttcttttaggtttaaacccacatccagggctttggtttatgcacatggtgacttctgccaaaccatcagcaggttgttctgaaaccccctgcatctcccaaggactaggtctgatggccagagggaccagtaagatcaggtctctgcttcaggtggaagagacaggaagtgctacaaaggtaagcccctctcccatgcccttaccattcccacctcccacacttccaaccacactggctctttctgtcttcctccaacattctggtcatgctcctgtctcaaggcccaggcatttgctgtccccttactcttgaaaggtcttccaatgtggcctggggggtcacattgctcccattccatgacgtctttccatgaagctgtccctgacctctctatttaaaaccgcacttcctgccagggcgatggctagtg

SEQ ID NO: 1242129 - DNA, 4001 bp, Homo sapiens
tccactcttctgctcctagcactgtgccctgcatgttcctggtcatggagaacacgattctgcacaattctccgtgctcacacactcatacacacgcagtttctcccgagcacacgagaatacacacagccttgttcccagcacacagttccgcactgatacagaaaaacactatcccggcagacggaaccacacacaactgacaacttctcgttagggacacaagcgtacccctacacacacgcacgcacatacaccccgctcaccccggcacaggccccggcgcgcttaccgggcagatgcaggccgcgggcgccgggaagcgggccggggctgcgcgggctgccggccgcggcgcgctcgagcaggaggccgtggtcggcgcggcagagcagctcgtgctcccgcagcgagaactcgtccccaggcagcagctggcggctgcacacggagcagcggaagcactcgatgtggtacacgctgtcccgcgccctcatcaccaggtcgctgctgctgaagcccacctggcacttggcgcacttgatgccgaacagcctgcgggcccaaggtgcggcggtgtcagcgctgggcctgcggccgccctcatctccctggctgctacggctccggcgcgcgcccaggacactttgtggccaccaggagactgcggtgacccgcctgcgggcattcccgggcccgggggagcgctgcggcacccgtgcgggatgcggatggccttctccctgggcagggccggggcgcgcgggcaggccgccatccccagtcccggccccggcccctgcgcgcggtggcccagcccgcgttcccgccggcctcacctgacatagtcccgcttgcagtaggtcttcccgtctctcacgaagcacgtgcacgtctcgtccaggtactggctgcactcggcacacttgaggcaggccgcgtgccactcgaggtcgggcgacacccgcaggataaactggtcgtggatctgactcccgcagcccacgcacatggccgtcccgggcttctctgccggggaagggcgcggggccgcgtcaggcctgactgcccggacccaggccggcctcggctactccagccccaacccaacccgctcgctctcttgctctttctttcaagacttgcgaccataaggaaagatgatgagctctctaaaggtccagggcattggaaacgaaaaaccagtatcttgtggattgctgaaggtttcttctgtcccccaccccaaatatttcgttattacattcattaatgacagtcgttttgtcgacgtgtcttgaaactaaacgcaaacacgaaactaagaagagagtaaatacacaggcactgcggacgcctggatatcaacacctaacggtgctgtcctggcatttccgctcacacactcccactcacagcggctgcctcctatcccaacacagacacatcgtctttcggcagtccccgctcatcctctcagacatttcttagtttaaatatcccagagcaagcgaaagaaagcttcctagctttgaaaaaccgaaaggcaaacaaacaacaaccaaaaaaaaaaaaacccacatccctaaatcaaacctaattgcctttgcgcaaaacagaagcagatttcgcagcccgaagtcatcctagccggcttgagaaatagtgtttacttataaaataaaacaacaggattcccaaagataagcagtcctgcaggagacatgcattcgtttttcctctcctaaactattctgacaaatagaagccacttgtagaatccactaaacatttttctgcattagaaattttgcatattaagcatacacacacaccccaccccacacacacacagaaatacttactcttggaatgatcacccatagcacccagaaaaggataatgaaaaataatatccaccatgcagaaaaagagatgtgcgcaaagtgtgcggccaggggcagaaggacgagggtcgcgcgcccggcctcggctctttgctaactaactcctactgccccgcggagttgaaggagcgattccgcaccggcccgcacgcagcatgacgtcaacacgcactagccccgggccggagctgggggcgggacctgtggcgtcacgaagcttccccagaactgccggggatgcgggggaggtgatggggatccaggggctgatgggcggggtgggttgggttggaggctgggggtgaagggagattggctgggaggaagtgggccaaccctgattggcccggagtgaacaatggagtgcagcccccccacctccgaaacctacaaggatcctctctcatgccccgggcctggcaatctggactggaccttgcgtcaccgccgagctggctccgcggccgttacaactctgagcttcctcttggactttcggggcggttttcccaggcgcgctggagctgggtgatggatacctgagggtggagatggctctcctttaagagctcccttcttatataaattaaaaaaaaaaaaattaaacccactctcaggacgagagagccgaggacaagggggatccgtttggacgtgaccgtcatcgtccagctggtcacctttctcctctcatgtgcctttgttcttcgggtccaagctagagagagtgtagagaatgaccacctgggttctgataaactctatttagactttcctatccacacacacgtagaaaactttagattggggcattacgtgggttgagccagaacccagatccaaaagcgctcacccgggactgggacgggtcctgactccatccttgctgctgctgccgctgctgctgcccctcctccctctcctccaccaccacctcctcctcctgctccacttccttttttttgttgttttgttttgcttttaatttgttgctgttgttgttttaaatgtaacatggacttccccgccccctcatttttcccccatccaaatggcatagctccttttaggaacactgctggggtcgattgcgtgtccaacttccaaaataaaagatttttctaaactcttgtccttcattaacaaacccactgcaatgcaaataatcagaaacgaacgtaaggcgctgggtaatttacagtggtatctgcgaggcggcggctcgttggtcctgagaaaatctgagagctctgagcacagtccaggcattctttcaaagaaatcgctgtgggttttgtttgaaagggttcaaagaccggcccatgaattataaataacatttatccaaccatggtgtctgttcttgttttcccattaaaaggagtaccaagaacttggtgtgcgcctgggtggggcgcgaggtgaaacgcctgcggataaagtgtctccaccgccattccagaccctgcccagaccttcgggcttgtgggcctgagggcgcggtcgctactgccgttctactaagagcatgaggttggttggcgtcgaaacggatgcagccgagggcgcaggccgaggctttgcagaaggctagggcgaggccccgagtgcacgctaacattattcgaccatggtccacggtgaacgttcctcaccggccccgcgctggggcgagcgctttaagcctcgtccagtagcgtccggcttttgagctccgcctccacctttaggaggtctagtcttctcaccggtccggcttttttttttttttttttttttttttttttgagatagactcttgctgtgccgcccaggctggagtgtaatggtgcgatctcggctcactgcaacctccgcctcccgggttcaagcgattctcctgcctcagcctcctgagtagctgagattgcaggcgagcgccaccacgccccgctaatttttgtatttttagtagaaaccgggtttcaccatgtttgtcaggctggtctcgaactcctgacctcgtgatccgcccacctcggcttcccacagtgctgggattacaggcgtgagccaccgcgccgggccaccggaccggctcttgttacagtttac

SEQ ID NO: 1242130 - DNA, 4001 bp, Homo sapiens
aggggtgccaggcagggcacgcccatcagtgcccacgttggggctggtgatctccacaatgccactgggtatctggatgtgccagtgaagctgaggggccggctgcccgtccacatcacagtgcagtgccagcacaaaaccaggccgcagctcggcaccatcctggctgggttggtagctgagctgcactgagggcgccgagcatggcagtggcggcaggcggctcagcggcgtacccttgagcacatggggtgaggtgcaggcgatgttgtcctgctccgggatggacacggccgtggtcagggcccatgtcttgagccacacgatgccgcaggtgcagtcgaaggggttctcgttgatctgcaggtgggacagcgcggtgagcggggtgaaggtgccctcggccaatgtgtgcaagcggttgtggttgagttgcagcgagcgcagagcacggaggctgcggaaggcgtcgcgggggatgaaggtcagctcgttgctgtccatcttgagcaattggagggcactgaggttgtgcaggtcgctccaggcaaagtcagagatgagattgtggctgaggtccaggctcttgagatggctcagagaggccagggctccggcggccaccgtgcggatctcattgtgtgccagccacagcgactgcagcaggggcacctccctgaaggcaccctccggcaagcctggcagccggttggctgacaggctcagtgtagtcacattggccgggaagccaggcggcacggattctaggtcgcggtaggcacagtcggcgatctggaagccatacttttccccacagtcgcagggctcagggcaggcctgagccaggcccaggagaagcgcccaccagagcagatgcagctcctgcatggtgcctcctgcagagaaaggcatgtcacccaggggatcccgagaacctgccaaagggactcattcctcccacaagcccagccagagctctttcccatcaggaggccctgtcccacataacccagctaaatcccaacaccacctagcccaccgcccccatcctacggaaggagaaactgaggccaagagaagggcggagacttgcccgaggtcacgcagccaggcaggatgaagacgggatggaagaggaccccagctcctcctccgagtggagagttctccctgcctcggcctgttcctagctgactttatgacttgaaatctgttttccagccacccccctcccccagcactttgcagaacctccccctgccctcccacatcctggccgcagtccctcccaccggagccccccataggtatgctttgccttggcccagacgaggccccttgtgcagtgcacaccacccccatccactccacccgccctctcccgctcctccggccatgaccgcagcagacaccaggccttttctgtggaatcacacccgtggcctgttctgttcaaacttagccaggcagctgcctaaataaacccccgccaggacctctcagctgacttgggtgaggccagaggctcagcccaaacgcagctgggatttctggggcctcagttgtgggttgtggaagaagcagatgccccctggacggctccaagctagggattgtcccacgcacctcagaccagcagggatggaccaagagggaaccagcccctatgtccaacaggcctcccgctcccgccgctggccctggagccctcctccccactggcttaccttcaagctactcttagtcaagcggagcctcttctaaggtggaaccaaaaagcaacagaggaccttagccctgagagtctgcagggccacgggcgcccaagggaggacttggatgctggggcgaggggcagcctggtcccaccccaccttcgatgtgcaggcctgtgccctccctgccccagacagggtgcctggaaccatccactgagaggaggcggcagggaggagcccggggcagcccgcgcactccctccttccagcaaaacaactgcttctctgcagcaacaaggacctgtgtttcataagtgacaccagaaacttgaggggggaagagatgccaaatttttttgggttgtgttttttctctctctctcactcacttttagcagcttcaacttccttaaagacacagcactgtctggaaaggacccaagaaatgatggggccaggaggattttagcgggggaagggcgagaaattgaatctcatggaaggtgggagatttccacttcaaacaagaaaaaacgggaagcttttgtccaagccagggttgtatgtgtgttggtgtgtatacgtgtgtgtgtgtgtacaagtttgtgggtgtgagggtgcgtatttctggatttgtatgtgtgtttgcatggatgtgggtatgaaaccatgtacatgagtttgtgtgtgagtgtgtgtgtgtgtctgtcttggtgtgggtttgtgtgtggaagtgagtgtgcatccatgtgtgtgtgtttcagtgaaaagccaagaaggccaaagtgtacaaagcagataccaacccttcggtgaaagccaagatgttaggcattttttttttttttaagaaaacatatcctgctggctctgagactgagctgcgctaaatgcatgttgttgtccagggagctcccaagactccaggccccgcccctcactgcgctccccactggctggggaggaaacagggaggcctggctcagaaaactcagggcgggagcctgttgaccttcagtgctcctggctgggattctgagccacccaggcccactgcccactgggcacccagaggggaggccaaggggccgcactcccggagagttctctctgtgtcccccacagggcccaaaatcccactgttggtgctggacatctacgcggtcagcatcggcctctctgagctccactgttccaacaccaactgtgtggaaggggcagacgcctccagggtgaggatatgtgaccccttttccaaacgggaaggcccaggggaggggaatggggaaacaaaagaggcccaaaacgagggagctggaagagaaaccgaaagatgaaggagcccagaaaagaactttgtagactgaagaattttgctctccacagacaagcctaccgtatcccctcagtagccctccccaagcttccttggccttccatctgataactggttgaattctgctcatgactcaacttaccctctcagcagggccaagggcagacagggctcatctttggctgaaagcatccccaggaagcctgccccagctcatcacaccccattccctgtcaccaagcaaggccacagaagtccccagcatgctgcctgcaaaacacccgagtctgatgctgaggatattattatggtccaatggagagcaccctctctttcccctgcagaggaagccctctcttgcatcatcctgactgtgctggagaatttctaggaaagtcctgaatttggtgggccaaccagaggctgcaagaaacacatccagggttcagtaaaccagaggggagactcagtgacctcagtgtcagtcagggagggcttcctggtggagggggcttcactatgttctgcacagcccatacacacaccctcacctgcacaaagtctgtgccaccagctttacctccagggtgctctgaggagctcatagttcccaccccacctccctccttgcaagcacatcagggtcagagtacaagcacctcctcagccctcagttcccagtgactgttctctcagacattcctgacttttcttcatagctcctcctataagctgtgattatttattcatgcgtgcttaatgtgcgaccccttactagagaggaagcccactgagggcagaggccttaacttcccaggtgctattgatctccagcacagggaagacactctgtaagcgcccccttcatggcatgatggacaagttgggtggtcatcagaaggaagcattttagagctcacccacttcatctcctcatcaacttacag

SEQ ID NO: 1242131 - DNA, 4001 bp, Homo sapiens
ccattccctgtctgcttcagaccacctcccagctaagccccagctccattcccccaatcctggcccttgccagcttgacagtcacagtgcctggaattccaccactgaggcttctcccagttggattaggacgtcgccccgttagcatgctgcccctgagaggagagcacaggcaatgctgttagcagcaatgagcaccgcagacagtgagttaggggatcaaattctatcctagtcactagtttggagcaggtctagaagttggggatagcaggtgctctagaagagattagaaggagaggtaggaaaatgtgaagtcacccatgcaggcctcaggagttgccaaccccagacccctgcagcacttaaaggggcattggtaggggcaaggggaggagttagggaagccctgggtggggctagaaggaggtgaggaagaagaagaggaggaggctttggcccagcaggagcaggcctgggggcagctgcccagggaccccttctgcgactgcagcctcagggttcccagcacggctgaggtagatgatgaccacattgtcctccggccctgatggctgcacctcgttgtcaaccgtatagcagccctttccctcaaccgctttgccatggaacctgcgccccagtgtgtcctcaccaccctcaccgggcgtggccagtgccacgtccactgagctctcagcactgcccagctcattggtggccaggcagctgtaggtgccttcctccagcttgccaaagtcggggataagcaggctgccattggcaaaggcctggaagcgcggctgggagctggccacaggggtgccaggcagggcacgcccatcagtgcccacgttggggctggtgatctccacaatgccactgggtatctggatgtgccagtgaagctgaggggccggctgcccgtccacatcacagtgcagtgccagcacaaaaccaggccgcagctcggcaccatcctggctgggttggtagctgagctgcactgagggcgccgagcatggcagtggcggcaggcggctcagcggcgtacccttgagcacatggggtgaggtgcaggcgatgttgtcctgctccgggatggacacggccgtggtcagggcccatgtcttgagccacacgatgccgcaggtgcagtcgaaggggttctcgttgatctgcaggtgggacagcgcggtgagcggggtgaaggtgccctcggccaatgtgtgcaagcggttgtggttgagttgcagcgagcgcagagcacggaggctgcggaaggcgtcgcgggggatgaaggtcagctcgttgctgtccatcttgagcaattggagggcactgaggttgtgcaggtcgctccaggcaaagtcagagatgagattgtggctgaggtccaggctcttgagatggctcagagaggccagggctccggcggccaccgtgcggatctcattgtgtgccagccacagcgactgcagcaggggcacctccctgaaggcaccctccggcaagcctggcagccggttggctgacaggctcagtgtagtcacattggccgggaagccaggcggcacggattctaggtcgcggtaggcacagtcggcgatctggaagccatacttttccccacagtcgcagggctcagggcaggcctgagccaggcccaggagaagcgcccaccagagcagatgcagctcctgcatggtgcctcctgcagagaaaggcatgtcacccaggggatcccgagaacctgccaaagggactcattcctcccacaagcccagccagagctctttcccatcaggaggccctgtcccacataacccagctaaatcccaacaccacctagcccaccgcccccatcctacggaaggagaaactgaggccaagagaagggcggagacttgcccgaggtcacgcagccaggcaggatgaagacgggatggaagaggaccccagctcctcctccgagtggagagttctccctgcctcggcctgttcctagctgactttatgacttgaaatctgttttccagccacccccctcccccagcactttgcagaacctccccctgccctcccacatcctggccgcagtccctcccaccggagccccccataggtatgctttgccttggcccagacgaggccccttgtgcagtgcacaccacccccatccactccacccgccctctcccgctcctccggccatgaccgcagcagacaccaggccttttctgtggaatcacacccgtggcctgttctgttcaaacttagccaggcagctgcctaaataaacccccgccaggacctctcagctgacttgggtgaggccagaggctcagcccaaacgcagctgggatttctggggcctcagttgtgggttgtggaagaagcagatgccccctggacggctccaagctagggattgtcccacgcacctcagaccagcagggatggaccaagagggaaccagcccctatgtccaacaggcctcccgctcccgccgctggccctggagccctcctccccactggcttaccttcaagctactcttagtcaagcggagcctcttctaaggtggaaccaaaaagcaacagaggaccttagccctgagagtctgcagggccacgggcgcccaagggaggacttggatgctggggcgaggggcagcctggtcccaccccaccttcgatgtgcaggcctgtgccctccctgccccagacagggtgcctggaaccatccactgagaggaggcggcagggaggagcccggggcagcccgcgcactccctccttccagcaaaacaactgcttctctgcagcaacaaggacctgtgtttcataagtgacaccagaaacttgaggggggaagagatgccaaatttttttgggttgtgttttttctctctctctcactcacttttagcagcttcaacttccttaaagacacagcactgtctggaaaggacccaagaaatgatggggccaggaggattttagcgggggaagggcgagaaattgaatctcatggaaggtgggagatttccacttcaaacaagaaaaaacgggaagcttttgtccaagccagggttgtatgtgtgttggtgtgtatacgtgtgtgtgtgtgtacaagtttgtgggtgtgagggtgcgtatttctggatttgtatgtgtgtttgcatggatgtgggtatgaaaccatgtacatgagtttgtgtgtgagtgtgtgtgtgtgtctgtcttggtgtgggtttgtgtgtggaagtgagtgtgcatccatgtgtgtgtgtttcagtgaaaagccaagaaggccaaagtgtacaaagcagataccaacccttcggtgaaagccaagatgttaggcattttttttttttttaagaaaacatatcctgctggctctgagactgagctgcgctaaatgcatgttgttgtccagggagctcccaagactccaggccccgcccctcactgcgctccccactggctggggaggaaacagggaggcctggctcagaaaactcagggcgggagcctgttgaccttcagtgctcctggctgggattctgagccacccaggcccactgcccactgggcacccagaggggaggccaaggggccgcactcccggagagttctctctgtgtcccccacagggcccaaaatcccactgttggtgctggacatctacgcggtcagcatcggcctctctgagctccactgttccaacaccaactgtgtggaaggggcagacgcctccagggtgaggatatgtgaccccttttccaaacgggaaggcccaggggaggggaatggggaaacaaaagaggcccaaaacgagggagctggaagagaaaccgaaagatgaaggagcccagaaaagaactttgtagactgaagaattttgctctccacagacaagcctaccgtatcccctcagtagccctccccaagcttccttggccttccatctgataactggttgaattctgctca

SEQ ID NO: 1242132 - DNA, 4001 bp, Homo sapiens
cctaggctggacctaaccccacctgggtcaaggttgtggggtggcccccattgcttacccaatattcgccgactctcagtaaatgtcctggggctgaaaccccttctccagacccggcgtggcagagcagggaagatagcccaagcaagatacacgcatgtgttgtggctgtggggaaaacggggggcggggggcaaagaaagggacaggtaagtttggggacttggtggccccaaagtaccacttcaatttttccttttgcgtccgtttcccccacctctctggctgcaggttggagaaagtccttgcgcactcccgggcctggcggggacgcgcatagcctctcccgcctcctgcttggtctacttttgttaaagccacggagaccctccccaaggccaagacacgtcggtcataaggggcatcccacgcccactgtcctggctgggctcttcgcagcctactgcacccccataacccacgtacccccacatttacacagccgctggcattgttactgtccctgatcacaccacctcccccaccccacgttcaaacacattcgcgcacacagtccctcacaccctccccatagccgaccttcacagtttacaatcatccatggtcaggtaataatcgcatcaatgtgttcagcccctgctacattcacacgcattttcacgggcacacctgcacccgggacacttaccgttctcctctcgcacacgcatacacacattcacgcgaactcaccctcacgcgcctgtcccgccagcgcccgcgagcttcgctgctaattgaatgcaagccgcttttacgccctgcaacacgtgagacaaaccatctttgaggaatttgggggaaggaaaggcgcgcggctgaagtggggggggaaggcgtgtctttgcctttaaactctttttgcaaatgcaggcggtggcaccgacagacttcgagcgggacccgctgagctgcgcgcagccgagctcgcgcggacccttccctcccgcaccccccgctgctagccgcctcctccccgaagccacgttcaacatgatgcataattgatagtgttagcagagcgccgcaccctccctaccatttttgcctggatctgggctgatataagccctagtctcccccgccccgccgccccaacccccccgccccgcctgctagtctaacccgacaccagaacgcacagccctgcagggcgtgctgggaagggacacccccctccccagcccaccgcagccctgcccagcctcttaagccggaactctttacttctggtcttttgtggctaaaccagcgcttgaagcccactgcccgacgcgttggcctgcgcgcaccgcgggacaggtggagcagggggaagctctctcgagcgcacccaagcacctcactccaggtcttgcctgctccaggagaacggggcacggaagctgcagcagacagtagcacagacaaggatggtggcaaaacgtccgctactcttgagcacggtgggctggggacttcaggcccgagcatttctcccatatctgccccccatatcttcacagcctctcaagcagacacacggtcaaccccacacgcactatcccccaagccgcggtggcccctcaccgccccgccgtctcacaccctcacacaacagccggcttcggcagactcgctgttcccgactgtcgctccctagctctgatgaaaccccgacatttctttcagcgacgaggaggcggaggcgcggcgatgtcgaggcatttggctaaaacccggtttccgcccccctgcgctgcccacgttagccctggagacagctaccggccataaccaggaaaggggttcaggctccgggagacacgcagaatccccacccattctgtagccactgagctctctgggagcaccaagccccacagccatcaccccgggccatgggggtctctcgatggcgagggtttggggcttccgtggagatcaataccccgatttgagtgttgagcatcttaatgagctaggggagggggtggggaagagagacaggctaagagcgcagcgtctaaagagaccacccggcccggggttccgaggctgctttgtaaattaaatatgaacagactggtgcgctcacactccaagcgtccctccctctcccctactcctgccgtcgctacgggcggcccagcgggctgagaccatcgcatcttgctcagccccagttcagaacacagaacttcacaccgcctgctcgggcctggagtccccccccgccgacccatggggagggcgcaaggcgcctttcagggaaggtgtcttcgaaaatggtcgaggggtgagagcactgtgacccgtccctgccggggatcctgtggtgggacagccaggattgggtccctagcccggggtgagtccctgaggtttctaggccttgtggggtcgggagaaggaggcagacggcggggccagcacacccttctttgtctgccgaacaaggtgggggtgggggcggggagcggcgtcttgggcagttgtccgggtgttgggaaccctgagggggcggtcttgggagcctgtgcctgggaaggatatttggaggcaggggcccagcagcgggagctgagtccggtccggcatggcgtgtccaggggacttttcgggactgagtgaggggcgccaggcggggaggctcaaggccctccgccggtttttacctattttctttctttcttttttgccttccgcagggaggcagaatctgggtaatggaagggagaatgggctcgctatctgcccagagcttccctggactgcaggaacccgtcctataagcaaccccgaaacttcggggcccgaggaccagggaagaccccctttccttgctgtcttgacagggttgcagaagccaaggagttcggcagggagacggggctcctggggtggttaaggacgcggtgaccacccctgggcgggagctgactcccgcgggcccggaggctctagctcactctacagcaaatgcttttgttcccggaggctgccctgggggaaagacgccccttacccctgccttcgaccctggagagcccagtgcccgcccgggcagggctggagcccgagtcgccccaggcagagtccgccgaggcctggggtgggagccgcgacttctggatctgcctccgagctcagctagaagactgcgcgcacctcgtccggcgccgtccggcgcgcagaagcgggtctaatgtttataacgttaataatgacagttagggagggctgtggagccgggaaccaagacctcatcccgccgccgcccacgtctttgatcattaaagaaacagacaactaatcaggtgtgtggaagtaggggtgggggaggggagggtgacaaggttccaagccgctagcgcagagggtcccagattcagaatctgccgaatccagactaaggcttctaaccaggctggagccgaccccagacagacccaggaatggagagctggagcccctggccgctttctgcggatcgacccttaacttcaacgtcgcgaacccggagcgtcgggagggtggggagggttgaaaccggttggatctggggacttgctccagcgactccatccgcgctgttctagggcccaagcctggtccgcgcgcgccccctgctggaagccgcttgccgggcgcagaggcgggtcaacggcagagggtgctggctgggcgaggaagatgtggctggaaccctgcaccaaggcgaccgctgctcacggctctgcagtcccgcggcgcgatacgccagtggggcgcgcttaaccaaagtcccgaggctttacttcccgtgcccacccagtctatgtcccaggtatcagcaacctctggtccactacacaacacaggcgctgtccctacttcgcgctgcgtagtttccagtgcccagggcgtctcctaattcttgagcgactagtccctggcacaaaaccttcctatacacctct

SEQ ID NO: 1242133 - DNA, 4001 bp, Homo sapiens
tgaagctggagaagatgaaagattctgcgcctttctccacagctctgcggtgcctaaggaccccctccccataacaccttaagcccggtcacacaaacgaacttgcacagactccctgcccccatttggagcgcctgtcaggtttggcagagcccctcccacaacttgtctttgggaacctgctccttcactctgcctttgctcttctgggagggtcccttccctcccttcccggttcctgccagacagcacccccaccagccccgcaccccatcaggtgccctaggctggacctaaccccacctgggtcaaggttgtggggtggcccccattgcttacccaatattcgccgactctcagtaaatgtcctggggctgaaaccccttctccagacccggcgtggcagagcagggaagatagcccaagcaagatacacgcatgtgttgtggctgtggggaaaacggggggcggggggcaaagaaagggacaggtaagtttggggacttggtggccccaaagtaccacttcaatttttccttttgcgtccgtttcccccacctctctggctgcaggttggagaaagtccttgcgcactcccgggcctggcggggacgcgcatagcctctcccgcctcctgcttggtctacttttgttaaagccacggagaccctccccaaggccaagacacgtcggtcataaggggcatcccacgcccactgtcctggctgggctcttcgcagcctactgcacccccataacccacgtacccccacatttacacagccgctggcattgttactgtccctgatcacaccacctcccccaccccacgttcaaacacattcgcgcacacagtccctcacaccctccccatagccgaccttcacagtttacaatcatccatggtcaggtaataatcgcatcaatgtgttcagcccctgctacattcacacgcattttcacgggcacacctgcacccgggacacttaccgttctcctctcgcacacgcatacacacattcacgcgaactcaccctcacgcgcctgtcccgccagcgcccgcgagcttcgctgctaattgaatgcaagccgcttttacgccctgcaacacgtgagacaaaccatctttgaggaatttgggggaaggaaaggcgcgcggctgaagtggggggggaaggcgtgtctttgcctttaaactctttttgcaaatgcaggcggtggcaccgacagacttcgagcgggacccgctgagctgcgcgcagccgagctcgcgcggacccttccctcccgcaccccccgctgctagccgcctcctccccgaagccacgttcaacatgatgcataattgatagtgttagcagagcgccgcaccctccctaccatttttgcctggatctgggctgatataagccctagtctcccccgccccgccgccccaacccccccgccccgcctgctagtctaacccgacaccagaacgcacagccctgcagggcgtgctgggaagggacacccccctccccagcccaccgcagccctgcccagcctcttaagccggaactctttacttctggtcttttgtggctaaaccagcgcttgaagcccactgcccgacgcgttggcctgcgcgcaccgcgggacaggtggagcagggggaagctctctcgagcgcacccaagcacctcactccaggtcttgcctgctccaggagaacggggcacggaagctgcagcagacagtagcacagacaaggatggtggcaaaacgtccgctactcttgagcacggtgggctggggacttcaggcccgagcatttctcccatatctgccccccatatcttcacagcctctcaagcagacacacggtcaaccccacacgcactatcccccaagccgcggtggcccctcaccgccccgccgtctcacaccctcacacaacagccggcttcggcagactcgctgttcccgactgtcgctccctagctctgatgaaaccccgacatttctttcagcgacgaggaggcggaggcgcggcgatgtcgaggcatttggctaaaacccggtttccgcccccctgcgctgcccacgttagccctggagacagctaccggccataaccaggaaaggggttcaggctccgggagacacgcagaatccccacccattctgtagccactgagctctctgggagcaccaagccccacagccatcaccccgggccatgggggtctctcgatggcgagggtttggggcttccgtggagatcaataccccgatttgagtgttgagcatcttaatgagctaggggagggggtggggaagagagacaggctaagagcgcagcgtctaaagagaccacccggcccggggttccgaggctgctttgtaaattaaatatgaacagactggtgcgctcacactccaagcgtccctccctctcccctactcctgccgtcgctacgggcggcccagcgggctgagaccatcgcatcttgctcagccccagttcagaacacagaacttcacaccgcctgctcgggcctggagtccccccccgccgacccatggggagggcgcaaggcgcctttcagggaaggtgtcttcgaaaatggtcgaggggtgagagcactgtgacccgtccctgccggggatcctgtggtgggacagccaggattgggtccctagcccggggtgagtccctgaggtttctaggccttgtggggtcgggagaaggaggcagacggcggggccagcacacccttctttgtctgccgaacaaggtgggggtgggggcggggagcggcgtcttgggcagttgtccgggtgttgggaaccctgagggggcggtcttgggagcctgtgcctgggaaggatatttggaggcaggggcccagcagcgggagctgagtccggtccggcatggcgtgtccaggggacttttcgggactgagtgaggggcgccaggcggggaggctcaaggccctccgccggtttttacctattttctttctttcttttttgccttccgcagggaggcagaatctgggtaatggaagggagaatgggctcgctatctgcccagagcttccctggactgcaggaacccgtcctataagcaaccccgaaacttcggggcccgaggaccagggaagaccccctttccttgctgtcttgacagggttgcagaagccaaggagttcggcagggagacggggctcctggggtggttaaggacgcggtgaccacccctgggcgggagctgactcccgcgggcccggaggctctagctcactctacagcaaatgcttttgttcccggaggctgccctgggggaaagacgccccttacccctgccttcgaccctggagagcccagtgcccgcccgggcagggctggagcccgagtcgccccaggcagagtccgccgaggcctggggtgggagccgcgacttctggatctgcctccgagctcagctagaagactgcgcgcacctcgtccggcgccgtccggcgcgcagaagcgggtctaatgtttataacgttaataatgacagttagggagggctgtggagccgggaaccaagacctcatcccgccgccgcccacgtctttgatcattaaagaaacagacaactaatcaggtgtgtggaagtaggggtgggggaggggagggtgacaaggttccaagccgctagcgcagagggtcccagattcagaatctgccgaatccagactaaggcttctaaccaggctggagccgaccccagacagacccaggaatggagagctggagcccctggccgctttctgcggatcgacccttaacttcaacgtcgcgaacccggagcgtcgggagggtggggagggttgaaaccggttggatctggggacttgctccagcgactccatccgcgctgttctagggcccaagcctggtccgcgcgcgccccctgctggaagccgcttgccgggcgcagaggcgggtcaacggcagagggtgct

SEQ ID NO: 1242134 - DNA, 4001 bp, Homo sapiens
accgccaacttctgcaggggtttagaggacctgatgctcaattaggaggctcacaacacatttcctaaactcacaaacacatatgcacccagacatggacacaatagaccctgcagacctcattgttctcttaaccagcatttgtacgtgttttccaccacggtacaaagcgctttcctgtccattgtgacaattgacagacacaaggacacaagtcctcacacgaaccgacccacccacaagaacacaggcatgtgcctgtgtgtgcatacagccctccactgtgaccgaaacccagcagagaagcaataggaggacctgcactgcacgacttgagatgtgggatctggggaagcccatccccatgccctactgcatctaaggccaaagtcacctgcccggggctgcagctcctgtgaggggagaagaagggctgctctgccaaccttccttacggggaaggaggttctcccccatgtttggaccaggtgtgttgggaaagcggtcactagagcttcctctcaggtccctcaggcggctcccattgggcagaggcgtcctcagccaacaggtcatggggctgccactagctaatgaagctggagaagatgaaagattctgcgcctttctccacagctctgcggtgcctaaggaccccctccccataacaccttaagcccggtcacacaaacgaacttgcacagactccctgcccccatttggagcgcctgtcaggtttggcagagcccctcccacaacttgtctttgggaacctgctccttcactctgcctttgctcttctgggagggtcccttccctcccttcccggttcctgccagacagcacccccaccagccccgcaccccatcaggtgccctaggctggacctaaccccacctgggtcaaggttgtggggtggcccccattgcttacccaatattcgccgactctcagtaaatgtcctggggctgaaaccccttctccagacccggcgtggcagagcagggaagatagcccaagcaagatacacgcatgtgttgtggctgtggggaaaacggggggcggggggcaaagaaagggacaggtaagtttggggacttggtggccccaaagtaccacttcaatttttccttttgcgtccgtttcccccacctctctggctgcaggttggagaaagtccttgcgcactcccgggcctggcggggacgcgcatagcctctcccgcctcctgcttggtctacttttgttaaagccacggagaccctccccaaggccaagacacgtcggtcataaggggcatcccacgcccactgtcctggctgggctcttcgcagcctactgcacccccataacccacgtacccccacatttacacagccgctggcattgttactgtccctgatcacaccacctcccccaccccacgttcaaacacattcgcgcacacagtccctcacaccctccccatagccgaccttcacagtttacaatcatccatggtcaggtaataatcgcatcaatgtgttcagcccctgctacattcacacgcattttcacgggcacacctgcacccgggacacttaccgttctcctctcgcacacgcatacacacattcacgcgaactcaccctcacgcgcctgtcccgccagcgcccgcgagcttcgctgctaattgaatgcaagccgcttttacgccctgcaacacgtgagacaaaccatctttgaggaatttgggggaaggaaaggcgcgcggctgaagtggggggggaaggcgtgtctttgcctttaaactctttttgcaaatgcaggcggtggcaccgacagacttcgagcgggacccgctgagctgcgcgcagccgagctcgcgcggacccttccctcccgcaccccccgctgctagccgcctcctccccgaagccacgttcaacatgatgcataattgatagtgttagcagagcgccgcaccctccctaccatttttgcctggatctgggctgatataagccctagtctcccccgccccgccgccccaacccccccgccccgcctgctagtctaacccgacaccagaacgcacagccctgcagggcgtgctgggaagggacacccccctccccagcccaccgcagccctgcccagcctcttaagccggaactctttacttctggtcttttgtggctaaaccagcgcttgaagcccactgcccgacgcgttggcctgcgcgcaccgcgggacaggtggagcagggggaagctctctcgagcgcacccaagcacctcactccaggtcttgcctgctccaggagaacggggcacggaagctgcagcagacagtagcacagacaaggatggtggcaaaacgtccgctactcttgagcacggtgggctggggacttcaggcccgagcatttctcccatatctgccccccatatcttcacagcctctcaagcagacacacggtcaaccccacacgcactatcccccaagccgcggtggcccctcaccgccccgccgtctcacaccctcacacaacagccggcttcggcagactcgctgttcccgactgtcgctccctagctctgatgaaaccccgacatttctttcagcgacgaggaggcggaggcgcggcgatgtcgaggcatttggctaaaacccggtttccgcccccctgcgctgcccacgttagccctggagacagctaccggccataaccaggaaaggggttcaggctccgggagacacgcagaatccccacccattctgtagccactgagctctctgggagcaccaagccccacagccatcaccccgggccatgggggtctctcgatggcgagggtttggggcttccgtggagatcaataccccgatttgagtgttgagcatcttaatgagctaggggagggggtggggaagagagacaggctaagagcgcagcgtctaaagagaccacccggcccggggttccgaggctgctttgtaaattaaatatgaacagactggtgcgctcacactccaagcgtccctccctctcccctactcctgccgtcgctacgggcggcccagcgggctgagaccatcgcatcttgctcagccccagttcagaacacagaacttcacaccgcctgctcgggcctggagtccccccccgccgacccatggggagggcgcaaggcgcctttcagggaaggtgtcttcgaaaatggtcgaggggtgagagcactgtgacccgtccctgccggggatcctgtggtgggacagccaggattgggtccctagcccggggtgagtccctgaggtttctaggccttgtggggtcgggagaaggaggcagacggcggggccagcacacccttctttgtctgccgaacaaggtgggggtgggggcggggagcggcgtcttgggcagttgtccgggtgttgggaaccctgagggggcggtcttgggagcctgtgcctgggaaggatatttggaggcaggggcccagcagcgggagctgagtccggtccggcatggcgtgtccaggggacttttcgggactgagtgaggggcgccaggcggggaggctcaaggccctccgccggtttttacctattttctttctttcttttttgccttccgcagggaggcagaatctgggtaatggaagggagaatgggctcgctatctgcccagagcttccctggactgcaggaacccgtcctataagcaaccccgaaacttcggggcccgaggaccagggaagaccccctttccttgctgtcttgacagggttgcagaagccaaggagttcggcagggagacggggctcctggggtggttaaggacgcggtgaccacccctgggcgggagctgactcccgcgggcccggaggctctagctcactctacagcaaatgcttttgttcccggaggctgccctgggggaaagacgccccttacccctgccttcgaccctggagagcccagtgcccgcccgggcagggctggagcccgagtcg

SEQ ID NO: 1242135 - DNA, 4001 bp, Homo sapiens
tcgtttaacctggtgaaatggatcctacccaagaaggacatttttgtccgtgactggctgtcctccctggaacctttgtcccacgcacagcactcgcacacacgcccatgcaggcacacaacaatacaaacagacgcggggcttcataatcaaaccgccaacttctgcaggggtttagaggacctgatgctcaattaggaggctcacaacacatttcctaaactcacaaacacatatgcacccagacatggacacaatagaccctgcagacctcattgttctcttaaccagcatttgtacgtgttttccaccacggtacaaagcgctttcctgtccattgtgacaattgacagacacaaggacacaagtcctcacacgaaccgacccacccacaagaacacaggcatgtgcctgtgtgtgcatacagccctccactgtgaccgaaacccagcagagaagcaataggaggacctgcactgcacgacttgagatgtgggatctggggaagcccatccccatgccctactgcatctaaggccaaagtcacctgcccggggctgcagctcctgtgaggggagaagaagggctgctctgccaaccttccttacggggaaggaggttctcccccatgtttggaccaggtgtgttgggaaagcggtcactagagcttcctctcaggtccctcaggcggctcccattgggcagaggcgtcctcagccaacaggtcatggggctgccactagctaatgaagctggagaagatgaaagattctgcgcctttctccacagctctgcggtgcctaaggaccccctccccataacaccttaagcccggtcacacaaacgaacttgcacagactccctgcccccatttggagcgcctgtcaggtttggcagagcccctcccacaacttgtctttgggaacctgctccttcactctgcctttgctcttctgggagggtcccttccctcccttcccggttcctgccagacagcacccccaccagccccgcaccccatcaggtgccctaggctggacctaaccccacctgggtcaaggttgtggggtggcccccattgcttacccaatattcgccgactctcagtaaatgtcctggggctgaaaccccttctccagacccggcgtggcagagcagggaagatagcccaagcaagatacacgcatgtgttgtggctgtggggaaaacggggggcggggggcaaagaaagggacaggtaagtttggggacttggtggccccaaagtaccacttcaatttttccttttgcgtccgtttcccccacctctctggctgcaggttggagaaagtccttgcgcactcccgggcctggcggggacgcgcatagcctctcccgcctcctgcttggtctacttttgttaaagccacggagaccctccccaaggccaagacacgtcggtcataaggggcatcccacgcccactgtcctggctgggctcttcgcagcctactgcacccccataacccacgtacccccacatttacacagccgctggcattgttactgtccctgatcacaccacctcccccaccccacgttcaaacacattcgcgcacacagtccctcacaccctccccatagccgaccttcacagtttacaatcatccatggtcaggtaataatcgcatcaatgtgttcagcccctgctacattcacacgcattttcacgggcacacctgcacccgggacacttaccgttctcctctcgcacacgcatacacacattcacgcgaactcaccctcacgcgcctgtcccgccagcgcccgcgagcttcgctgctaattgaatgcaagccgcttttacgccctgcaacacgtgagacaaaccatctttgaggaatttgggggaaggaaaggcgcgcggctgaagtggggggggaaggcgtgtctttgcctttaaactctttttgcaaatgcaggcggtggcaccgacagacttcgagcgggacccgctgagctgcgcgcagccgagctcgcgcggacccttccctcccgcaccccccgctgctagccgcctcctccccgaagccacgttcaacatgatgcataattgatagtgttagcagagcgccgcaccctccctaccatttttgcctggatctgggctgatataagccctagtctcccccgccccgccgccccaacccccccgccccgcctgctagtctaacccgacaccagaacgcacagccctgcagggcgtgctgggaagggacacccccctccccagcccaccgcagccctgcccagcctcttaagccggaactctttacttctggtcttttgtggctaaaccagcgcttgaagcccactgcccgacgcgttggcctgcgcgcaccgcgggacaggtggagcagggggaagctctctcgagcgcacccaagcacctcactccaggtcttgcctgctccaggagaacggggcacggaagctgcagcagacagtagcacagacaaggatggtggcaaaacgtccgctactcttgagcacggtgggctggggacttcaggcccgagcatttctcccatatctgccccccatatcttcacagcctctcaagcagacacacggtcaaccccacacgcactatcccccaagccgcggtggcccctcaccgccccgccgtctcacaccctcacacaacagccggcttcggcagactcgctgttcccgactgtcgctccctagctctgatgaaaccccgacatttctttcagcgacgaggaggcggaggcgcggcgatgtcgaggcatttggctaaaacccggtttccgcccccctgcgctgcccacgttagccctggagacagctaccggccataaccaggaaaggggttcaggctccgggagacacgcagaatccccacccattctgtagccactgagctctctgggagcaccaagccccacagccatcaccccgggccatgggggtctctcgatggcgagggtttggggcttccgtggagatcaataccccgatttgagtgttgagcatcttaatgagctaggggagggggtggggaagagagacaggctaagagcgcagcgtctaaagagaccacccggcccggggttccgaggctgctttgtaaattaaatatgaacagactggtgcgctcacactccaagcgtccctccctctcccctactcctgccgtcgctacgggcggcccagcgggctgagaccatcgcatcttgctcagccccagttcagaacacagaacttcacaccgcctgctcgggcctggagtccccccccgccgacccatggggagggcgcaaggcgcctttcagggaaggtgtcttcgaaaatggtcgaggggtgagagcactgtgacccgtccctgccggggatcctgtggtgggacagccaggattgggtccctagcccggggtgagtccctgaggtttctaggccttgtggggtcgggagaaggaggcagacggcggggccagcacacccttctttgtctgccgaacaaggtgggggtgggggcggggagcggcgtcttgggcagttgtccgggtgttgggaaccctgagggggcggtcttgggagcctgtgcctgggaaggatatttggaggcaggggcccagcagcgggagctgagtccggtccggcatggcgtgtccaggggacttttcgggactgagtgaggggcgccaggcggggaggctcaaggccctccgccggtttttacctattttctttctttcttttttgccttccgcagggaggcagaatctgggtaatggaagggagaatgggctcgctatctgcccagagcttccctggactgcaggaacccgtcctataagcaaccccgaaacttcggggcccgaggaccagggaagaccccctttccttgctgtcttgacagggttgcagaagccaaggagttcggcagggagacggggctcctggggtggttaaggacgcggtgaccacccctgggc

SEQ ID NO: 1242136 - DNA, 4001 bp, Homo sapiens
aggagtggttttcgccatataagcggagctctgagtcacaaatcctgtgtcttcagaggtcctttaatgtcattctctgccccctcctccttgagtagcaacaacattaacaaccattgattaaagcctactgtgcacccagccctgtgttaagggcctttcttacagtgccttagtgcatcctgacaactttacaggacacggaatttgtgtctccattcttcacataaggaaacctgttggaaaggtcgcataaccagtccaagattgaacagctagcagggtgcagagccagaagtggaagccaggtctgattccaaagccattgctcttagcttcctgaggtccaggctgtccctagcccctaaggcagccactccttcccaaggttctgatgcagccacctatctggagtcacacaggagtgcgtctcttttcttgtggctggatctcctagtgatatgaggacagttcctggagaagattctcccctcctgtctaaacacacctaaatgggcttggcctcctcccgcagctggcttctagttgcatattggcctggtggcagttcttcccctgctctcccttccaagcccccacaactcaatgtatcaatgattgttttaaactgtgactctaggattccactagccagaggccctttcaaccatgggccctctgagaagctcctctgtaggccgacaggagggtggacttgcttcgcgtggtacccggggactggggcaagcggctgcgggataggggtctccacctgagctccctgagggcacctctcccactaccaccgcatctgacccccactactggccccagctcgggcctggagcccacgcagaaggggaggcaaggttgagcgcccacacccggccagtaaccgaggcgctggcccttgccggagcacttggccgtcttccgcagaacagcatcactggcagccgccccgcgtggagggtggagccggggagcccggtgtgggacggccggggccagggtaccctagggcggagagctcagggctggcttcccgctcccagccgcgcgcccctcgggccggaggttcctgccgcgccccgacacctggagtgcattaggcggcggcgcgcgtctaggcgacggcggctttccccagattattgaataattgcataattccgagcgcgggttgggaggcaatgccgggtccctaccccgggtgtcaggtaacgtttcgggggtcctgcgctgcgcgactgtgtcccgccgctgctggccgggcagacgagagctagcccccgcctaccggccatcgccccggggctttgctctgtctttggccggaggcactctgcgcagccctcacccccacccttcagccctccggggccgccgcgcccggctctccaaactttgagatgcttccccggagccaggcaggagggcagccagggcacactctcttggcgctgattcccttccccagccggggccgtgcgccctcggcgctcccgggacacccgagtgcccctggcagccgtgcgggaaccccggcatgggccttggaggcacctaaggcgcccaggagggccaccagatctgggagcttttcaactcaagcctcttcaactcttcccaaacacaccaaagagtcccggctttcaatagccttcgcacctccctctttagcgaaacttgactgaaccgctagactggggccagtccctgggggacccacgtccccaagagcagctgaggtctgaccctgggaggagggtcgcgtcccgatcctggccgctggatccaagccccgagggcccagggagggactccgagaggcaaggggaggcagagggtgggcacctacctggccacaggctgagcgcccaggccaccaccaggcccctgggcaggtccatggcccgcggcacggcggctgggtccggtgtgcagcggcggcggggggcggcaagccagagcggcagcctcctcggcgcggcgcctgcagcctgcactgcgcggggcgccgggctccctgacagctgcggctcattcagaggaagtgggagggctcgagcggaggggaggggcgccggacaccactccggctcgggctctgggccagtctcggccgctctgccacctgggcaggcggcgcgctgcctcgacgcgcctgtgcagcgctccttctccgccaaccccacgtcagcctctggagaaaactccagagaaccgctcctgggaaccccctcaccagtgtagcaccgcaccgcctcagtcagattctgttcaggaaaagtggtttttattcccatttcccagtgaaaagagattcacaaaactcagagggtacccaagctggctcaggaacacctgctggaacgcaggtctcccttggccaagtgagtggatgtccctcaaaggtccattctaagacatccccgtgtctccctgcaccctgcggcttgaattgtagaggctagtgtttcttctgaccctggaatacatgcagattcgcctccactgccactccctgagcctccacacctgaggcattccaaagcacccagggacaccgtgcaccccctcttaacctaacgtgaagctcttctttgtaaccctgccaccttctttccctcttctaatcactggtagttaaattcaatgcacatttatctcaagagctttaaatccaggccccggacctccaccgcgcttgtggaggcttttccagcaatggaggaagccgaggcagagggtaggaaggccaagatgcagggaaagccacagcagagcgcccttcccccactttctcaggaaaggcttccttcaccccctcttcccgtccccaccaggttgagtcccagacacatgctgatattccccagcccgctctccctcatttctcttcattgtgcttagtagagaagcaaggcatcaattggtgtgatcatttaacttttctctcctgtgcagactgaaaacaccatcagggtagaaatctctggttcacaatggagtactcagcccctaacacccaggaacaaagtaggtgggcgggtggatggatgggtgagtacaggtggtgtgtgggtgcacaaaggatagagttttctatctgggaggtattggaagggcttcccagaggaggtgatgttcagtcagggcccctgaagatgagctggagtttgagaagacccaggttcacataagtgaagtgggcttgtgctcgtctcccaacctcactatctttcggttggctatctgggttttacttcatcttcacctcacccattcagccacagactcggggaaggtgattccgtccctggtgtgtgtgtgtgtgtgtgtgtgtgtgtaaggaggcatgcggttcaggctgaaatgaatcagtatgttgcccttcccagcccatcgtttcagaaagggcaatatgacaaaagaaaaagtttttttgggaagcaagctttcttgcctttctaaaagagcccctagaacaaacaaacaaatgaactaactctctctcctcacctctcccactcctgcctcctctcccagcctgggacaaggaactttgtaggctcagaagttgacagggtcagggtagggaaggaggatctggccttgagatgaggtggacactggatgacagaatggaggatcttgttgaactcctgaatgaagccaccccttaaccccactccccttgggacttatcagttatacgacagtgagtcctcttcactgagttgagtttaagccagctgagttgaatgtagaacacccctacagctagggaatgggctgcagcccacattcctgccttgcacaaatctccaggtgcatcagaacgacctggagcacgtgcaaagaatgcaaattccccaaggatcagggcatgctggtgggtgccccaggcacctctgacgtgtgggtggtctgcagcttgtgctcagagtctgcatgctgcttgctgaaggggcgcactgtagtggctgtcctagctg

SEQ ID NO: 1242137 - DNA, 4001 bp, Homo sapiens
gggcggaagagggaagcgggacgcgcccgcgcttcgcgccctttcgcctgcaccggctctcaggtgtcagagcttccgcgccccgggagctgctgctcaggcttttccgaagaggcggggcggggggcctctcactgccccacactccacatcctgggaagccccggcatccgccccccgacctaggcaagggttaccccagaaacgatcctgggtccggggctgctctgaccaccggggaagaaggggaagcggcaggctagtgaccgagccggcgcacccagcacctggcggcggggggtgttcctgctctgtgaggcttttcccctctggtgtcactgacaaaccccatcggcctccgggcttgtgaacccctgcaggtcgccacagcttccctgccttgtcccagccgattgtgcggcggagcaggcgcgcggccacagctctccccgccccgccgcgccgacccggacttatgggcaggccccagacgcccgaggccgggggcgcccctcgcctcttcctcggcctcagggacacttgcgaaacgtggatctaaagaaagtccttcgcgctgaccacggacagttattcaaggtatttggccttggttaaaacgaggggaacaaggagggtgtcccgggagccgcacatccctaagtggcgggcgtcaggaatgacttaacagtgcccagggctgtgttttccgagggtcagacctggtcccagaacacccaggctatcagaggcagagactagcagagtgatcctgcccccttgcagcctcagtttaccgcccctctctgccgcgctcaggagcggcgagccgggaagatgggaggcagggcgcgcactgggtgggctgcgttccgctcccagccagagctcccaggcccacgcccctccctcccctgcgtccacgcctcgtgcgggcgctgggagcagacggcagcggctcccgagcagagcctggagcgccgctccactcccactcaggagagggaaaccgtggcaacggcgggggtgcggccgcggcaccggagagggggcggggggtaagggaaactctccttcgcctctctccttccgagggttcacccggcaaggctcagcccctccgatccctcctgtcctaacccacagccaacaaggtccgctacccccgcttcgcccagtccccgcggcgggtcgcctgctcctcgccccgcttcttagacgccccagggccagcgccacgacccgccggcggagccgaggtgaaagttgcccaggcgagaggtcggccaggcgcctccctctgacccccagattcctcctaaaccgcgagaacaggaccttccgctggagggagcatggacaggagcgggtcctccgggagcacccagccaggtcccccgtgcagcccccgcgcccggcgctggccccgcccccgcggcccgtacctgacccacgtcctcgcccgcttccagctgcacgttgccgcggctccggctctcactgtcgctcagcaggtcgtcctccgagtcctcgagcagcgacgaggagccagtggaggagaccgacgaggtggaaaggcggcgcggctgctgcaggtgcgaagagcccgctgccgggaggcagtccctctcccgctccggcggcccagggctggtcgggggcacgtcgggctcctcggctgtcacggtcagctgagggatcaccggggccgggggagcccgcggaagcccgttggggacctgtcccccacgccgcttggccccgcgggcccggggctcccccgcggcggcggccgcagcgaccgccgcacagcgcgcctcgaagagcaggcgcagctccccgacactccggcgcggggcccgctccagccccgggctgcagggcctcgcgccccccggccgcgccatgcccgttgggcccccgggcagggtcatttcccagtgccggcgccgccgctgagcccaccagcccgcggcgcgccggggactggagcggctcggcgcccccggctggagacggccccggggcggagcctgcgccgctgcacgcccgcgccccgcctcggccgcgccccccgcccactccttccactttcagagaaagcgcgggcctcccagggcccctgcgagggagagaaggctctcggtgactcctcggggtggcggggaagtccagcctccgtaggcacaaaacctgggcccgggccccgaggcttcgctccgcctgccctcggggaggtgggaggggccgctccgcgctggggcctcgcagccttcccgggcttcgcggctgggagagattcctccaggccgctccacaggccctgtccccgcgcaggagaagctggtcctactcttggtcccctaccccgttcctcgggttcctttgcgtgttcatccctcccgggcaagggcttcaagtctcggggcctttctccggcccgagctcctgagcagagttgaaggcccccggcttcccgaagaagccccaccccagggcgtgcacccaagtggagactctgccccagggactagctgaggctgctccccgcaagttccccacttcccggcgggcagagaacaaggtcagggggcggggcctggatctgtccccatggcccagcctagtcccgggctgcatctcccccgctgctgggtggcaggagctgagcccgccttcctcctcctctgttataggagctcggggcttggagtccgccgtgtggcgttcagcaagtcatttcacctccctcgactgcggattctcccgttgctgcgagaataaaataaaagacttgaaatcaggtacaccacactctagatgtgatttgtaggcagtccctttactccctccgtatatttctgcatttgtacatttagaaaaacctcatccaacccacagagttgtgtctgtaaaactaggaagacagcactgatgtttaagagtttcagacactgcaaagtgcttatcagtgtcattccatgtggatcttcggccacttcccatgttggtagtcagctgaccgaccggcgaggctgctttgaggagaagccactgtttcctatcttaccatagtgccacaggagtgagggtcccccctcaggcactcagtgtctggggatggctggggccctggagacagagcagccccagaaggattgccttggatgctgagatggccgcaggaggggctttccttcccttctctcccctcagccagggctcaggaatggcccaggagaaggaaagaagaaggttcagtgggaagacgggaatcttcggcaaagcatagtggctcaggcttgtaaccccagcactttgggagggcaaggcgggcagattgcttgatcccaggagttcgagaccagcctgggcaacatggcaaaaccctgtctctactaaaaatacagaatattaggcaggtgtggtggtgtgcacttgtagtctcagctactcggggagaggctgaagtggaaggatcacttgagcctgggaggtcgaggctgcagtgagctgagatcaccaccacactccaccaccacactccacactctagcctgggcaacagagtgataacttgtctcaaaaaaaaaaaaaaaaaaaaaaaaaaaagctgagtgtggtggcatgcacctgtggtcccagctacttaggaggctgaggtgagaggattatttgagcccaggaggtcgaggctgcagagagccatgacattccactgcactgcagtctgggtgacaagtcatacgctatctcaaaataaacaaataggtgaagatcctggagaactgaggaaggaagcaaaataatgtaagaaagaatggcaatgagagaggcaggagaaatagagggaatgaaggggtaagaggaagaagggcatagaggagtttgaatacttgactacttcacggagaacctgggaaatcacatcgccaccttctctaggacaaccatctggaggaatcttgagtatgtgtgtgagggatgtactctgcagcttgaag

SEQ ID NO: 1242138 - DNA, 4001 bp, Homo sapiens
tcacccctctttcttaaggtcttcagcctagacagcttgatggtaatttttaaaacgtcacactttacataaaaatcattccattggtttccactgtacttagaataaaacacaagcttctcacccaggcctactaggccctgcaggagctgaccccagctgactctcctagcttccccagcaccttcccacctcccaccctctgtgctccagctgcattccaggcagctgccagatctcaatagttgtcaggctcttttaagcccccgaacctttggctaaaagggtctgattacccaaagagattagaaacgcctcttggcggctgggcatggtggctcatgcctgtaatcccagcactttgggaggccgaggcaggaggatcacctgaggttgggagtttgagaccagcctgaccaacatggagaaactccgtctctactaaaaacacaaaattagccgggcgtggtggtgcatgcctgtaatcccagctacctgggaggctgaggcaggagaatcacttgaacccgggaggcggacgttgtggtgagcggagatcgcgccattacactccagcctgggcaacaagagtgaaactccgtctcaaaaaaaaaaaaaaaagaaaaaagaaaagaaactcctcttgccaggaaagcttgagaatagggattgaaccctttccacttgaggtggttcacggaagctctgagcgctcgctggctataaacataaactacggagttgctgggaggctcatacctccgccaactccatccagcctccaagtgaaacctcaggaaggactctggttctgctccatttgtaaatactacttcgtcttcttttctattttttatgagatgggggtctggctatgttgcttaggctgatctcaaacccctgagctcaaacaatcctcccacctcggcctcccaaagtgctaggattacaggtgtgagccacggcgcctggcctccaactacttctttcaagtacttgttcaacttttgtgttttgacccaatgggctgaagagcgacaggagagctcactgtggctttttaaaacccccaaactgtttatacaaaaaagactccctggtgattacgatgaccacccaggtgtgagaagcatacctcagcctgttcaggtgtaagtgaactacatacagattgagggcccttgtgccacaagcggtaggtagcctggccaatcctccaccaaaacaccatcagtctctcaggagctctcccagcctcgactcctcctctctacttccagcagtactgtcccacggtctcaaatcttcactccacagacgtgaggccgaggtcagaggactggacccgaggtcggaggccccgcgtcccgcccccgcgctggcgctcccaacggcccacgggcaaaagccaaggctgggtgggcgctgggccgatggggaccaggcaggaaggaggccttggggaccaggcaggaaggaggccttggggccaggaagggggtcagtctcctcacctgcctctgctcctcgcttagcccattgattgcatcgtccacgggcaaaagcgagtgggcccgctgggaaacgaagccggcaagcggcggccgcagcctccagctcgccacacgccaccccagcagccgagtcgcagtcgccatctctgccatgcacgaagagccagcgctgaaactgagccagctcttagctccaccaatccaggcttcgccgcccaccaaaccggctagggggtgggctgcagcagccaatcaccctaggcggcccgccgaaggcgttgctgcccttggaccgcacccgagccaatcaaccgtgatcgcctgccagcttccagccagtgcaacggccgcaggccgagtggccctgccccgaacgctgcaaatgctggcgtgctccctaggatgagtgtttttagcggggtagaagagcaagtgtttttttctttttatctccctgcgttgaaatagcagcccctaactgcggaaatctctctgtgggaaagcagagtgtggaaacagcaatcagaaaactgcccacgtacccagtaaattggtcaagcatctctggaataattaagatcggaaaagtagtgcttgctctaacgtgcacactgatcataacagagtacatcttgctttattatataacaaggtttgtagatttagattcatgttttatgggaaaggggttattaaggagtagctgccttctagattggagatgcgcctcgatttacagtggggttacttctcgataaacccatcataaatggaaaatattgtaagtcaaaaatgcactttgaaaatacacttaggccgggcatgatggctcacacctgtaatcccagcactttgggaggccgaggcgggtgagtcacctgaggcggagagttttagaccagcctggccaacatggagaaatcctgtctctactacaaatacaaaaattagctgggcgtggtggtgcatgcctgtaatcccagctactcaggaggttgaggcaggagaatcgcttgaacccgggaggtggaggttgcggtgagctgagatcacgccattgcactccagcctgggcaacaagagtgacactccgtctcaaaacagaaaacaaaaaaacacctaacctaccaaacatcatagcttagactagtggaccttaaacgtacttggaacacttataatagcttataacggcacaatcatgtaacacaaagcatattttataagacagtgttagatatcatttattgaatattgtacagtttctattcaatgtctatcactttcacaccatcataaagttgaaaaatcttaagttgaactattgtaagttggggaccatttgtatttaatatgtgttaaatattaaatagtacatatttacgtattatactatatattaaataagatgtattaaataggctgggcatggttgctcatgcctgtaatcctaggactttgggagcttaggtgggaagatcgctcgaggccaggagtccaagaccatcctgtgcaacatagggagaccctgtctccacaaaaaatttgagaaaacaaacaacaacaaaagatgtattaaatagtaaatagtatgtatttaatacaccagaataatagcagtcaggacttagaaacacgggttcgggacacagggaaaggaagagtggtgaggggaaagaggggagctgatggaattaagtctctatcccctctccacttgctctattttcctcctccatgttgtgtcaatgttatttttaaaatttaattaattaattagagatggggccggggtgggggtgggcagtctcactatgttgcccaagctgatcttgaactcctgggctcatgtgatcctcctgtcttggcctcccaaagtgctaggattacaggcatgagccacggaacccagccaagtcaatgctcttgaacaactcatctcaggttggtaccctgagtccaggagtctatgcaatcccactacatagctgtgggactttcggcaagtttcttagatcttttcagtcactgtttcatcatctttaaaacgaaaatgataccaaccaactttaaggctactatgaggaataaaagagattgcatacttaatgattcagcacagtacttggcacattgctctcatttttagatcattcataccacatccaacttccctgcacccattcctcagcttctaactcaccccctcaccataatttgaagtactactgagaagttaacacccgatcatagcactgcttttttgttgttgttgttgtttaagacggagtctcactctgtcgcccaggctggagtgcagtggcgccatctcggctcactgccagctccgcctcccgggttcacaccattctcctgcatcagtctcccgagtagttgggactacaggcgcctgccaccacgcctggctaattttttgtacttttagtagagacggggtttcaccgtgttagccaggatgatcttgat

SEQ ID NO: 1242139 - DNA, 4001 bp, Homo sapiens
acaggggactcactaccaccactgctgctcccagagccacttctgctgcccgacttgtgcctccccactgcagccagcatgatgacagcatctgcttccaactgcccgccactgtcatcaaaactgctggactcaaacaatcctcttgcctcaggaggtgggactacaggcacatgccaccacacgatggtgtctcactatgttgcccacgctggtcttgaactcctggcctcaagagatgcctcccaccttggtctcctgaagtgctaggattacaggcgtgagtactgcacacagcctgggattctgaaaatacatggaaactgccattttttcaccctttggacttctgcaattagggatttgttttacttgctcaccatttcctttagagaatggctgctttcctctcctggggcttccaagtgagaaaatttcaaaagggatccaaacaattgctttgaccccataactctgctaagaatttaacaaggccgggagcagtggcttatgtgttccatggcgttccaaaactttggaatgctgaggtggaaggattgtttgaggaatctgagaccagccttgtctctactaaaattcaaaaaaattagccaggcgtggtggcgcatgcctgtagtctcagctactcccaggtgctgaagcaggaggatctcttgaacctgggaggtcgaggtgcagcgagctatgatcgtgccactgcactccagcctgtgtgacagagtaagaccctgtctcaaaaaatataaagtatttaaccaacaaacatactcacacatgcgcagaagacgctgctcctgcagactggcttcttcactgtttcctaaacacatcaggcatactcccaaagagggctttgcctgcacttaccttctaacctacttcttctactctacaatgtactcattcagtacacctgtggttgattgtccacgttctcacttagaatgtaacaggacatagactgtaaaagacagatttgttttgttcagtgatgtatctcaaacacactgaacagagcctggcacacagagatgctgaataagtatttgttaaatcaatcctcaaagtattcgttgcagcattattgaaaacaacggattggacatgacctaaatgactaagtgaatacagcactagcacacagacgtgaaaaagactgaggtagaggaatgtgaaatgatctccaagatacacggtgcagaagagtgtgtttagcaggctactatttgtacaaaaaaagggtaaaaagtcgtgtgtgcacggatataaacaatctttctgtaagaatgcaaactggggctgggaggaaaccttgcttcatttacattgcgtaccactgtatattacatacccatcacatacacatgagcctgtgttgctgttcagtggtaagaaatcatttaaaaatagaaaaaagaaggaaggagggaagagagaaagaaagaaaaggaataaaaaccaagcaggggaagagccagggaccatttggtcagcctgcaatcctcccaaagtgcgacaagggagttgaggtcggaggtggggcgcgtgggggaggaatccgaccaccagctgtgtgccttcgatgagctttcaacaagggtaacagcaagctgctcaagactgtaggaaacacagggcttcgccgcgaccacggtcaagacggcaccgggccttgggaacaacgtgaacagaatcacccaggaagccgcgggagcgcgcgaacacgggagaagggaagcaggttgccacagaagagcaacccgagcggggcctcagggcagtcgcacacacgaggttccgagcccccggtgtcagcggcatcccagggcccctcccgtgttcggaaatcgccgcagcctgtgggagagccactcaccccttgcagcggccgggaattctcgtaactcgctccgcacggcttccaaagccgcctccgccatggctgcgtcagcgccggccgagaccccgcctttccccgacgccccgccgcaggccacaccccaagcactcgccccgccctccccagagtccccgccgcaggccacacccccagaccctcgccccgcccttccagaggcacccgccgcaggccacacccccagcaccccgccccgtcctgcccctggacacacaccgggttctgccaccgaagcggtggagcgactggcagcgcccgcttcggcctgccccactggccggcatcccagggttaacaaacaattgtgtttattgacaagttcatacatcagtacaaacgggcacgttaaaaacagcgcccccgccccatgcagccgaggatgaggcaggaagcgccgcgacctgcacaaagtataaaagttataaataaggggctttcaaaacaaggcgggggcaaatctggagtggggcggcggttgccggtggcctcagacatgcagaaggggacggggcgccggccgggccacgaggccccccacccacatggggcagagggcaggaaaagggcggccacattctcacaaacttctggcgaagggtagctccctcctcgtgaaggacctggcccagagggcgaacctgagtcccacctgcggtgggcgcggctggtgtgggaagtcggggcacagcaggcacgggcccgcccccgccgccgcgggagttccagggccatgcgggtggcgatgctagaggagtggggaagggccaggtttggagcagctcaagcgcactcaggctgatgccccggagctgggaaccttttgtaaccctttttcttttttttttttgagatggcgtgtagctttgtcacctaggttggagtgcaatggcgcgatctcggctcactgcaacctccacctccacctccagggttcaagcgattctcctgcctaaacctcccgagtagctgggattacaggcgcccaccaccacgcccagctaatttttttatttttagtagacagggtttcaccatgttggccaggctgatctcgaactcctaacctcaggtgatccacccgcctcggcctcccaaagtgctgggattacaggcttgagccaccacacctggcccagaacccatttctttataagcctctgcctatggcgcagcagggcgggtgaaggggctctcgtggcctgaagctgtggtaaagctgctctgacttacctgcagcagaggggagcagtagggcccagaaaaacctttcctcaactcttcaactgcctcacgacatggtcccactctacctcctagggtcccctatctcctttccctcacccctaattactgcccttttacattctaacttatcccctcacctctgccacttacctgtcccatctaccacttttctagtgtctcctttggccccagcacctccctcctctcaaactccagtatccagcacacccgtgggtgcccagcactgcctttgaggaggctccttctacctaaaccaggtgtcctatgggctatctcgtatcagctaggctgtggacaccaagaatccagaatctgggttcacttagtgtactgcaccccttttctgctccctgataggtgttccacataagccagggtggtgaagctgaggcaggatgtgaggaaaccaggcacacagcagccagccagatactctagcaaccaacactcaacagcgtgctgtgcaggtaggtgtgtgtgtgtacatgtgtgcacgtgcatgcgtgtgatctcatctgtggctgaggtcctcaggaggtaggccagcgccccgtaaacgagggatgttccaacacaggcttctgactaagcatcattcaggatgcagggagaaggtggcctctgggctccagcagccggctggggtccagggtggaggacagggaagaacaaggggctgaggaaaggaggccagagcttcatgtttgcccaggtgagggcttactgtcctgcagcaacatcccacagctggctcaagttctggccaggagagtaaggggtcacagggaaatacaat

SEQ ID NO: 1242140 - DNA, 4001 bp, Homo sapiens; identical to SEQ ID NO: 1242139

SEQ ID NO: 1242141 - DNA, 4001 bp, Homo sapiens
attattttttatttcaataggtttttggggaacaagtggtgtttggttacatgaatcagttcttcaggggtgatttccgagattctggtgcacccattacctgagcagtgaacactgtatccaatgtgtagtcttctatccttcatccccctcccactctctttctaccaagtccccaaagtccatagtgtcattcttgcggcacatttcttttgtatagccaattgggtctaccaccctgttgggcatacaggcaatcgaaagctttgtaactgatgaatgacatttaaaagctctgctatagataagtataaactgctgatttcttactaagtgattttgcttttgaaatttattccttgtcaaggaggtattagtttaagtataaccatttcaagtacagaataaccactcaataagttttagggatgaaaacatttaacatgtaattttttattttaaagtaatacataagttgctaagactaacactttcaaaactttcaggaaaggatataaaggaattgaaaacataaattataacacacataaagcttatgaactccatttatcttaaaatagtcaatggattttttgctcaggcacaaaccttaagtataatcatcaagagcagaaaacttgaatgaatggtgtgtgaatgaatgtatgtgtacacaaaagcacactcaggtctccgaagtttaagtaaatgaaatgaaagggctttgtaaactaaaaagagccacagataaaggaggtagtagagcaacagagttaaaagcgtggagccagcctgctcgggtgttaattatattagctgtgtaaccctgtacggtacaaaagttacaatactaaaatttcctgtgccttagtttcttcactgtcaaaatggggacaacagtatatatcccaaagtaaagctcttaatacgcccagcgcatagaaagcacaaaataaatattgcccatcattatgatcacactggctaatattattattggctaatattagttattagccaagtaaaagcctcaatggatgacgtttcaattcaagtctgaagctggctatccaaagaaactccaaaaaacccagcagatttaagctattaggtggactagtttctcataattctcgcaagtgctgaactgatgattattacacacctaatttctcttacaattttttttaaatcagcaaagaaactgacataggtatctctgttttcaaggaactttataagccacaagaaaacaaaccaactctttgttatctccatatttaagcaatataagagcgtagtaaaagcctagatactttacagaacaacttttcagaaaatacagtaaggtttttaaagttgcaatcgacaattcttatgcagttatgtcaagtttttgtcctgcgaaacaaaagctcatccgtcaggaatccgaggacccgtcggaaaataaggaaatgcctgggccgggcctaggcgctctgcggaaaacctgtcctcaaaaatgctcgccccacactcgttctgtccttccccttccccaggtgcagctgtcgactccacccgaagataaataagtgacaacaggttcggtccacgcctctcccggcccagtcccctggagccccccagcgcccgctgcccgactctccccgcagggaccggcagaggggctccgccccggccttgccgccccgccccgggacccggcagcgctgccgcgagcccggccgagccgaggccgccgcggggcctgcaggtgggcccagggcgcggccaagcccggctggagtagccctgccagggcagggcagctgcgggcgcggggctcgcaccggctcggcagtcacttaccggcgcctcatggtaccgcggcgcctcagcccagcctcggcgctgacgaccagcgcccggcagcctagagagtccctcggcttctgggccgagtcccactcagggccattcaaacgcggccgcgcgcgcggcccgccgggatagctggcgctgtgggcggctcgcgggctccgcccaacgttggctccgcccctctgggggtcgctaagggccggaggggaaaaggacctgtggccacagtgccccctggtggctagagcttcgcacggtagccttgctatggcgcgagaagtgatactgcgataggaactgagggtgggtaaaggtcaacgaatgaccgaccgtgcgctaggaacaacctagtgtgggagaccgtgccttagtggtgtaccaggaggtgcaaacaatttcctataaagttatggttccgggagagatttattcattcacacctatttaaatacactaagagtctgggcacagtggctcacacctgtaatcccagcactttgggaggccgaggcaggaggttcacctaagcccaggaattcaagaccagcctggacgacatggggacaactaccccccaccccccacctccgcccccgtctctataaaaataaaaatgatactaataaacgctctaaggcatagtttctaaaagcatggattgtggaactatgtgaccttgagcaagtcacataaactcctaggtgctttgctttccccttctgtaaaatggggacaataacaatagtatctgtctcttagtgttgtgaggattaaatgaattaatacatataaaatgcttagaggagtgcccggcatatggtaagcccttcgtgtttgttagtcatcatttttttagttcctattatgtgccaaactttgtgctagactcttaagaacacaagaaatgtacatgatgcagaacctgtcctcaggaagctggttcggtcttgttgggatggggaacactaaattagattatgaggttagggttgggtctgtagatgatgaacttttaattactgagggcagttctcttcattagaaccaggctgctcaccttcatagataagccaccggtcaaggttagccaagctgtgacaggagcaagtttgtctatggtggttctctcgccccttgcagaaaccaaccaagcagtgcctttggtggaaatacttcctcaccacaagactacatcccttggcttgctttttcaggcactcatttcggaactcaaggcttgcctagggagcaggctgcttaagtttggtttaacaatctttttgaaggcccgccatgtgccaggcaaattgtgcctggtgctggaaatcgcctgaagcagctctcagtggcttgaaaaacaggaaaagagatcattccaatacactgcagtgataaaaggtatctcctaaatgccgtgggagttccgagcaatgggaggcctgtcagataaactgatcagaactaagatgtcatcaggttgttataactttatgtatttttcctccctagtaacagagtccttacttaatcaaaaaaaaaaaaaaagtcatgttgaaaattgaggcaagaccttagggcagtgggaaaatagttttaggatatttggcataagcaacacctttgagagcttctcgattgtaccaagcataagcaaggcacatacatgcctatgtgtggggccacatctgttaacaggtggtactgttgagagagtccagctaggtgagtaaaggaagctggagccctaggttccatgtatgtacaataaagaatatttcctgaatatgacttccactaagtagatgtgttgttttaaagaaaataaaaattcaacacacatgggtgaagtcactttctctcaagtcatttcttcatcatcatgaacaggaatttcttgatgacccactatgcaaaaggcactgtgctggcctctcatcagaagaatagggtaaaaagagtgtactatatgatcgttatcctcaagggaggctaaagaattaagacaagtaatggagtcctggaactcagggaatctgctgtgttaacacagaagaatctcagctaatacaaggcctccagttgctggaggccagagaagaaccttgatattctcatttctggagcttgttagggca

SEQ ID NO: 1242142 - DNA, 4001 bp, Homo sapiens
acactctcttcttttctggagttatatattttttctcttcctattttccctttgccctgatttcttcagcactttattttattatattgtatgcggttttaaatttttttgcatgttgccttcaactctgtggatcaagttgtgtgtaaacctttttgttgtcctgtaactgttaagattgttttctgggttatcctttaagcttcctggatccctgtgtggcaactacggctctcattacgcataacactgtattgggcatacagtaggtgcctaattcttgcctactacttgcagtttgattaacatcatttaagtcgctcccagcgatgctcaatcactagcccattacatataagcccggattattcaaatcccaactccccctaccctgttcactgacattgtgacccaccagctctcagcagagcccaagtaatttgagggcatcatcactgctccctgagcttcttgaacatgtccacaccaccagaaggcaccaaacctgggtgtctcagtagaaagagggaagttgccagctacttctaaggccggcctcacacactcagccatagctcagggaggagtcgcggcgtctcctccctcctaaagccagcccagaggtcacagttctgccgttgtcgaagtcacaggcccaggagcgccaggaggcagccttaggagaaaggtctgcaaggagccgggccgcgggaagccggctttctccctgagcagccgccaggtgccgccctcgatggcgtagagcagcgtgaacatgcggttgaccgtatagacggtgtcaccgcgcaccacggccgtgaagagcgctcccttgctgttgacgaactggccgggcagcgccgtccactggcccgtggccaggttgagacagtcgatggcgcagtgcaggaagtcgtcggaaggtccgttgcgcaccacatagaggctgtcgcggtgggccaccatgcagtggccatagctctgcggacgccgcagctcggccactggcagccacgcgtcggtccgcactgcgtactccaccacggcggtggtgtcggccggccgccacaggcacacgaagagacggccacaagcctgggcgcagggcacgccggcggccggctgcggcaggtcggccacgaaactccagcagcccgcggctgggtcgtagcgctccacggagctgatgggcgtcctctggaattcgccgccgatggcgtagaggcggccgtcgaagccggccagcgctgtgtcatagcgcggctggtgcgggctggggaactcgtgccacgtgccgccgtcggggtcgtagcagaagcccagctctaccacctccttgctggcgccgcgcacgccccccacgatgtaaagcttgttgcccagcgtggccaccccggccagcaacgtgctggcctccaggggcagcgcagccagcgtgcgccacgcgtcctcttcctcgtccaggtaacacagcgtgcgcgaggcgtcctccaggaagccgggcgcgggcgtgtgcgtgctcacggccgcgtagctgctgggccgcagggccgccacgtaggcgcgggcctcaggcagcgccagttcggccgccagctcgcgctcgccgtcgcagatgaagagcgcggcactgtggaacacgtcgcgcaggccgaaggcggcggccgcgtcgcacagcaatgcgcagttgtccgacgtgaggttgtgctccagaaagcgagccagcgccggcgcctggaggaaggcggcgcactccacggcctgcagcagctcgtcctccgccgccagcgccggccggtcgccgcgcagcacctgcagcgtggcgcggaaacctcccgcgctcagaacgcccaggcgcacctctgctgcgcgggtctcccgcatgccggagcggaagaggcctcggaagaagccacagtgctccaccagcagggcgcggtcggcttggaagagctggccgcccacccacacctgcaccagggtctgtggaccccgtgccatggcgagctggccgggcggaggctgccgctggggccttgggttagccagccaccaactctggggctcccctggagcaaaaaacttccctgggggctataaatatctctccctggctaaagatagtatggctcatgtgatgtggtggcccgcaggctgtatggctgcaggcccggagggcatctggagacctgtgtgatcactcatatccttagaagaaatggtaataatgggtccagaattggtgggttcttggtctgacttcaagaatgaagccgcggaccctcgaggtgagtgttacagctcttaaggtagcgtgtctggagtctgtcctttctgatgttcagatgtgtttggagtttcttccttctggtgggttcatggtctcgctggctcaggagtgaagctgcagaccttcgctgtgagtgttacagctcttaaggcagcgtgtctggagttgttcgttcctcccagtgggcttgtggtctcgctggcctcaggagtgaagctgcagactttcacggtgagtgttacagctcataaaagcagtgtggacccaaaagagtgagcagcagcaagatttattgcaaagaggaaaagaataaagcgtccacagtgtggaaggggatatgagcgggttgccactgctggctcgggtagcctgcgtttattctcttatctggccccactcacatcctgctgattggtagagccaagtggcctgttttgacagggcgctgattggtgggtttacaatccctgagctagatacaaaagttctccacgtccccatcagattagttagatacagagtttccacatacaggttctccaaggccccaccagagcagctagatacagagtgtcgactggtgcactcacaaaccttgaactaaactcagggtgctgattggtgtgtttacaaaccttgagctagatacagagtgccgattggtgtatttacaatccctgagctagacataaaggttttccaaggccccaccagagcagctagatacagagtgttgattggtgcactcacaaaccctgagctagacacagggtgctgattggtgtgtttacaaaccttgagctagatacagagtgccaattggtgtatttacaatccctgagctagacataaaggttctccagggccccaccagagcagctagatacagagtgtcaattggtgcactcacaaaccctgagctagacacagggtgctgattagtgtgtttacaaaccttgagctagatacagagtgccgattggtgtattcacaatccctgagctagacataaagactctccacgtccccaccagactcaggagcccagctggcttcacctagtggatcctgcaccagggctgcaggtggagttgcctgccagtcctgcaccatgcgctcgcattcctcagcccttgggtggttgatgggactgggcaccgtggagcagggggtagtgctcgtcggggaggctcgggccgcacaggagcccatggagtggatgggaggctcaggcatggcgggctgcaggtcctgagccctgccctgcgggaaggcagctaaggcccggtgagaaatcaagcacagcgccggtgggctggcattgctgggggacccagtacaccctccgcagccactggcccgggtgcaaagtccctcattgcccggggccagcagggctggctgactgctccgagtgcggggcccgccaagcccacgcccacctggaactccagctggcccgcaagcgccacacgcagccccggttcccgctcgcgcctctccctccacacctccctgcaagctgagggagtgggctccagccttggccagcccagaaaggggctcccacagtgcagtggtgggctgaagggctccacaagtgccgccaaagtgggagcccaggcagaggaggtgccgagagcaagcgagggctctgaggactgccagcatgctgtcacctctcaataatagtgaccatataccgtgcacc

SEQ ID NO: 1242143 - DNA, 4001 bp, Homo sapiens
gaaacttagtctagtggtacagggtataagttactctaaaaaaattcatcaacttctatttccttttatctgaagagatagaaatagtaaatgttttctaatgaaatgtttataatagggagaaatttgaattgactttaaaacccatgaagtcctaaacagtgttcacctttatgttcttaattaaatcttgtagcgttaatctccctgtctgccaaatttcctactgaaaggaatgaggcaccagatggcagggcattttctcatctactccacgcacagaaggagcagcgtgaagctatttcctttgccgggtttcactcctactctcccaaagacagtattaggagctgcaaagttggagaaaacccacagacatcatactcaaacaaacaaacaaacaaaaaagagtaaggaagaaaggaaaaacaagcaaacaaaaacaaaaacatttttattaaagtttagtagacattgcaatgagcactcagcactgttaacgattgttcaaacccttaatctactaagggggcttttaaatagcctctaacaatatttaaatagcctctgttattattaagaaaaataatagctgggcgtggtggatcacgtctgtgttcccatcactttgggaagctgaggcaggcagatcatgaggtcaggagtttgagatcagtctggccaacatagtgaaaccccatctctactaaaaatacaaaaaaattagctgggtgtggtggcgtgcacctgtaatcccagctactcaggaggcagaggcaggagaatcgtgtgaacccgagaggcggaggttgcagtgaaccaagatcacaccgttgcactgcagcctgggcaacagtgcaagactctgtctcaaaaaaagaaagagaaagaaaaaggaaaatactaaaccaaaaaacaaaaattgataggctggctgtggtggctcatgcctgtaatcccagtaggaggattgtttgagcccaggagtttgagaccagcttaggcaacatagtgagacccccatctctacaaaaaatagaaaaaaaagcccggcgtggtggcatgtacctgtagccccagctactttggaggctgaggtgggaggattgcttaagccccataagtggaggatgtagtgaccagtgattgcaccactgcactccaacctgagcaacaaagagaggccctgtctaaaaaaagaaaagaaaagaaaaataggcttgaagataaggtgtgtcggtccttaactccaaggcttgaaattcccttccatgagacctcccccccacctctaccctagccggccaaaaggcccagcctctcttattatatcacagggcaaggaagaaattcgggcgtgagtacctcaagaaaaagaaattcatggcaagccaggggcttgcaggtgccaggactgatcccctaactttaggagggctcttcttacctttcctcgatgaaactgatgtcgaattagtggcagaggtggaagaaccaagcacctttctgggggctcgagcagccaccactgtgaagagaggcaaaaaagggtgttcagaaggggcaggagggttccgacaccgagtcctggaccccagcagcttggagaggagagcctggcgatccagaacagcaggataaccttaccctgcccctgcgacttcctcttctaggtaaaggggccaggcggctactccctggctagctagatgagtttggcgcacagggcccagggggacctctggcgtctgtcgcccgtggccaggctgccgggaggacccccccgccctccagtaccacactcgatcgcctcaccttttctgtaagtgcctggaacactgtctgctttagtccgcaccatgttcaaacaagaagagaggagaggagagaacgaactgacttcccagccgagggtgtttcactggacaaggacccgaaaactatcccgccacagtttatattggtctctttcccgcgcgctccaaggtctctcccgagccaccgctcccattggttccgcgccgttccccctgaaccaattgccaatgcccagtggtgacagcggcgaggcttcttgcagcgcgaatccgtccatcaacacgcaaaggcctaggattcgtaggcgccccaggtgggcggtaccaggactctccaggggtacccgactagtgggtgctaagtttctgaactacagaaatgagcctgcttagaaaagaaaacctagcaaagacagcgaattacaaacgatcttcaaaagttactatagctttaagtccataatgattgactcctggaggtgaaacctgaaattaagcggactttttgatgcaaatcaaaattaaaagaacttgagaactttcctttagtcccccaggcatgaactctttgtacagcatccatactaaaacaattctatggaatggggaaaaggaagctaatacaacttgtttacaagggtttttttaaatgtctttaggatgatgtgagactaaacaaaaactagggggattgtatatacatacacacataaaaagaaactaataaaacgtcttcttgagaaccgaatggtgtcagagctcctaaataatctgccaaatctgccaggagcggggactcatggctgtaatcccagcactttgagaggccgaggcgggcagatcgcttgaccccaggaggtcgagaccagcctgaccaacacggtgaaacccgtctctacaaaaaatatacaaaaattagccgggtgcagtggcatgttcctgtaatcccaactactcgggaggctgaggtgggaggatggcttgagttcaggagacgggagattgcttgtgcctaggagggagaggttgcagtgagccataatcacaccatgcactccagcctgggcgacagagcgagatcctgtctcaaaaaaaaaaaagaaagaaagaaagaaaagaaaagaaagaaagaaaagaaaagaaaaaagaaaagaaaggcaaggcaaggcaaggaaatgaaatgaaacgaaacgaaacgaaaagaccctgccaaatgtggtaagaccacatcgctgtcacacagtgagcataactctaggataaagggtcataatttttttctatctttatgcttaccttctaattactcacaacacccctggggagtgattttcactctctaaataccatacataaaacagaatcggtcaggcatggtggctcacacctgtaatcctagcactttgggaggccgaggcaggcagattgcctgagctcaggagttcgagaccagcgtgggcaacatggtgaaacccagtctctactaaaataaaaataaaaataaaaaataaaaaattagctgggagtggcggcatgtgcctgtagtcccagctactctggaggctgaggcaggagaattccttgaacccgggaggcggaggttgcagtgagccgagatcacgctactgcactccagcctgggcgacagggcgagtctccgtctctaaaaacaacaacaaaaaacaggatcagatgaacttgctttgggatgtattctgttaaatgctcacttgaaaggctactctagaagtgtaaacacagcattaattctctccaatgaattgctcgaacttagaattaggctactcagtactttaacagaatcaacaactgcactctgtaacacagatttaaggaatctaggcaacaggttaaattaacacaataatagaaaatgtattggcaattacctgtagttttgtcttaaccttggtatctaaggttacagccaaatcaaccggaaaaatccacaagacccagggcattcctttgttttttgtcctcatggcccatctcattgcacagtggtttttttgtgtgtgtgtttttttttttttgagatggagtctcacttcttcgcccaggttggaatgcagtggcgtgttctcggctcactgcaatctccgcctcccgggttcaagcaattctcctgcctcagcctcccacgtagctgggattacagac

SEQ ID NO: 1242144 - DNA, 4001 bp, Homo sapiens
gcttctgctgcacgtttgtcaagatttgagaaagggctcattttgggaatcctgagtgagaaaattcccagatcagttctgtgcgtctgctgtgaatagaggcaggagagatatttcaacctcacaggagcacgactgtttcagacagagtatcagagagttcataaatatgatgggttttagaaagtggaaagacatcaattttgcctggagcattggccagaaaaaaaatcgcattatgtatctaaaattcaaaaggaacataacaccaacaacaaaaccttttgtctgccttccaaatgttaagtgctatacacttcctcaccaaactcatcagaaattcaaataaactgtttgatctattctttctctggcaactgacatttattttcacatactccctgatctatgcaagtctctcagacacacacaataaaaatcagactttatttatcagacatttaaggtttttccctccaggctccagtagcctgagaaaatctctaagtttgccctctctgcagactcaccaccgtctcctgctctaccctcctctgatacacaagaggaaaacccattaaagggtattgtacaactccaggcatcctactctctctaatccacttctcttatttcaacaatacccaaaatattgccgccgggctctcaatgagggtcaattcaaaagacatcctgtggccacagcagtgagctagcttccacctgcagggcgggcccagtaatgctggtgtctgagaaatgacaaggaagggccatttaccgtccctctccatcagagagaggtagcagtggcagctcgtttgctggaataaaggatgcataactggccacataagctgcttccacactcctcctagcaactcttcatgccatgcataatatcacagagcataaaattgcagagcccagcaatgaggcctccaaccacagcctcagggatggcggcatggttctaccacctcccaaccacatggctccatccacaagagaaatgggtgagaagcctttaagatagatgtacattgtttatagcagaaactctggatttttcctctccttagatcttcaccaaacataacttaattcccgctgaattaagcgcacctgaacacaaccttatcttccctgctgcttaacacaggctaccagccgcttaccacagtaacaatcttccagcaaaacaatgctggagtgcgcgctgtgagagttaggctactcaaatgttacgctccccgcaccgccggcgaggggacaaatgactactctgatggattcggtagcccaaggaaattatcgctttcggagggatggcggcagagcaggtcgggcatgctgcatttgcctgagttggaccgcgtgtgagcgagcttacgctccccgcgggccaggcccagctcccgtgctttctgacaggtgaagttgagcatccttatcaaaccctcgggaagaacaacgatcccattccacatcaacgtgactggaaatctcaatttaagaattggatgcaccggtcggtccacctggggcttgtccagctttccatcttacttcgcgcctctgatgtgtcaggctttttgcacagatagctcacatatttaaccctcaaaacaccgtttcctgaagcgatgctcaaccaggaaaacttgccccaaactgcatgatcatcttccgtggcttctcttcccgaatccctgctctgtccaccaggtgcggccccgccccgcatccgcacacaccttttccgccgctgccctgagcgcagcgacaagggcccccacacctccgcggcccgcaatgctccggggccaagccgaggcagggaggcgctcccgcagctcctgactttacaacccgcgcgcgtgtgcaccgagccgcgggcacaccgcgaacacacacacacacacacacactcgtgcgctcccgccctccgcccggcccgggctctccgaacttacctccgaggcgccccgggcgcagggcccgcccttctctgcgggtctccagcggctgttcggcagtggtccgcacggcctccgatgccgcgcctccggtaggctccagagtcagctggtcactgtcacccggcagcccggattccgcgcccagggttgcaccccgcggatggagcgactttcgcctccgccgcccgagtccaggtctgcgctcacacgcgcggcgctcacacgcgcggcgcccacctggctgcagtcccggccagggccagcgcgccgcggctgaagggggcgctcggactcctctggggcggcgcgcagccgggacagtctcgcatgacgcccgcgctccagcggccccgggacgcggcctcaccctcaacccctggcggtctcagcctcggtctttgtgtctcggtcggcgtcgccacgtcatgggcttgcaggctgggagcagcgcgggccgggaacgcggctggggagagctgggctgggcttctccaccgccgcccgcccggggcgctcaagctggcggggcgcacgggcagcaactgagcgcaccctgggggaccgagggggcggtcccggggaggggcgcggcgtcgcgccaagggggtgccctgccagaggctgcggcggaggaaagtgggagtcagagcgccgccggagccccgggaaggcggtgtccgttcggtcccaggtcgcggctgcagcgccgaggggaaagcgagcggaagctgcgcgctggagggagcccaccacccggagccacccgcggggttcgcgtctccccactcccctatgctgaaggtgactgcggcccccagtggcaagcaggggcgaagagtgtcctcggctctcctcttcccagggagcactcggggcttcggactctgcagtggtttgcaaggccagggccaagtggtcacttcactcactgatttcttcttttggctggtgtcggcttaattgggatccagattggaaagactgtcacgtgaccacccctccctgtttctctccccccccacacacacacacatactcactcattcacacacccccaaaccccacgaaactgggatgggtttccaaaagcttactggatacatggatcagaaatggaggccttccgtgtcaccctgtgtgctggagtggagccgaaacacagcagctgcctctggtggccccatctagacagatcctgtccctgtggctggggaagctcacgttaacagcactttgcatccccaagacaagaacaacacaaacaaaaagggtgagggagggaatcatagtttcggggccatggaatctcatttcaaaaggaaagcaacacccccacccccaccaccccacctccttccctgccaccgagttaccgaacagagctgctaaggagcatacctccccagggacagagccctctcgggggctgtggcggcttttccctggccagcttctccctgacatttgctacctgtgatcggagcaaaggccctggggggacgcagatctcagtctcagcctccctcagctgtctggatgtgggtggcaacaacgctttaaaagtgaacttgcagctagtcccaagattcattatctgattctattttttggtgcatgttcaaattttacctaataaaaagttttttaaaaacaaaacaagcaaacaaaagtgaacttgctaataaatggatactttaaataacgccctatcagggtgatacgtgttgacaactagattttcccagagctcctctctgcccaagtttttaaaatccatttgcctttattaccttattgtgaggcaagttcaaacctattctagtaagggcaaacggatttgaaaatgtaaagtaggagtgaagtttgtttgattcactgtaccttgcctagtgattttaaatttgtaagtagtgctggctctgtctttgggtcccaatattgtttgtggcaaaagggagcataagcttaaggagtaaagggggtccccagggtaagaagcctgtttggtaatagctaaag

SEQ ID NO: 1242145 - DNA, 4001 bp, Homo sapiens
tatagagaaaatttcacagctagcactagttttacacaatgtagtacatccatttaactaaatgttctttgattatacttccacatgtcttcttctttcccttccaagcatacacataagacagaaaggactgaagagataagtttcttaaacaccacacataaatttacagggataccttaccccaactgggtctttaaggttcgtttgggacccttttttcacggtaggtttccggggtgtcttagctctcctggtcatagattaaaaaataataataacttttttttcagttcaacacgaatacaaaagcctcacctaaaacttatacaatctttctaggttatctgtaaattatcccttagcagttgcaaaacactgcatcccaaataacattaataatcatagtagcagagtgtttgtggcatgcgtaatccaaaagtaattaaaatttgctttagaatacatttttggtaccaaagctacctacttattctctgattagttctatacttaaaatggcttgcatattttcttgagcaacaatttaacagaggcactacaaattataactgcccacactttacagactgacaagcgattaacttcaatacactataaaaatgcacatggaggaaaccattctttcgtcaagggttacgcctgtactttcaaggaacaaccagtcattgaatgctcaaaacattactctttgtctccaaacaaaatctggtcccaaactgccaatttcttggtttcttaagtaggggcaatcaaaaagttattttgattgatttcaccatttctctagcatctcatctttttcccttcacatttatctataggctagatatacatttaacacattaaaattaagtaagattattggcttcgactgtagtttaaaaatatttttccaaacatattctcagatgaaacacaagcaaattcgtgttattcagtgcaaaatactttgtggtgggcttaagttaaactcaacgtatatttcttatatataatttttttcatctaaagattttgacttcggcctcttaataaacaagttgtcttttgcaaacgactccctaaatggtaataaagccaatcctctcctttgcacgacaaatatttctttacccaggaatgatgctgcgccgaaaatattagcttaggaatgtgggcggaggttctctgcggccacaaaatacagcagaagtaactggcctgtgtaagcggatgggctcggcctcaaggacagggtgctcggctgaaaaaaaagctagcggcgatcaccggtgccagggctctccagaaacggagcccatctaaccaatgcccagcacactcgctctgctccacacacgagaccacctccgacccgcactaagttggccaactgcactctggaggcggcggcagccagcgagggagaagggaaaggctgtcccgggaccccgaggaggactgccccgcccccgggaaccgggtgcggcgtaaaacaaccccggctccgggccgacccttcctggccccttggaggcccaggcggggcggcggggggcgacgcggcaggggtctccgcgcccaggctcccgcggagcggccacacgtggaggttcccactttggggtcgcggccgcagcagcaccgggcgggatgctgtccgcgctgcccgcgtacggccgcggcctgagtggagacgcctgcccccagccccgaggcctcggcccccgtccgccctctctccctgctcggcggcctcgtactcacgctgacttcatggcagcaggctccacgccgcccaaacgcgcatgcgggacggctggctggcgaagactgcgggacgttaggaccggcagcaagaactagaacttcgcggctaaggcgcggtgctctgcgaagccggcggcgacgctaagagcccaggtgagctcccgcctggcgcatttcaaacgggccaatcagcgcccgtccgcagggagaggcaggacctccgcggaagtgacttcgctgccggaagtggcgcttgtctcctaggcgaccgacgctgaaagggccgcggagtcgcgtgtcagggctggagggagatcttgaggtatggtatttaaactcttccgccttgcgatgacgaaactgagggtttcttttcctccatcacaagaagttcaatggaagggcctttccagggttgattcagaggtcggaatgtcgttctggtgaaaagtgttgtattcctgtgctgtgccctgctccaagtctcaggctccgtctctctggctcccaagtcaccacattatcttggcgtcttttctctctctgattcacctttcctgggtttccctccagctctgtcctatatgtacattattttatcaaatcttttttttttccttttttattttttgaggtggagttgctctgtcgcccagcctggactgcagtcttcagctcactgcaacctccacctcctaggttcaagcaattctcttgcctcagcctcccgagtagctgggattacaggcgcgcaccaccacgcccagctaatttttgtatttttagtagagatgaggtttcaccatattggccagggtggtctagaactcctgacttaaggtgatctgcctaccttggcctcccaaagtgctgggattacaggcgtgagccactgcgcccggcctgttttatcaaatcttgattgtgtttgatcctggccttacggagatgaataaaatttggtccttacccttaaggggcaaccttttgaacctactcttgccttagatgaactgattctatatcacttctgtctttgaccctaagccgatgactaccaaatacacatctacacctgggctctcatggaactctagccccttctcaacttcctaaaggaccacagcactggtaaggatagtcacaatgtccttggccaatattgttggtgctcaggaaacgacaccccagagtatggctctttggcacactgagtgctttgaactaaagaagactgaaagtgcctcagagaagccttaaaagcaaagtctgtctctgactttctcctgccctcttgtctcccacccctctgtgtctcctaaagcaaataatagaaaccagaatttctgttccccaaggcgggtcatggaaactagaaccccttttctcccaagcaagccagaaacattattctagaaaaacctagaaatattaatctagccttcccccacctttttgtgtaagagctggccataaagacattctttgatgtaccttgtcataagaccctcgttccaaaagggtcttgccctacactcaggaagaaggaaagctgcacagagaggccaagaagaatctgaacagacaggacttgctggattcctccttcagtctgttactattagatcatactccttttgtacaatcacatttctacacagctgtccattcttcatctcatctaagcataaaaatggacagctttccctgggtctttgggtcttcatttctgaaggcacttacatcccataaaactgtgattcaataagttatccatttatcttgctaacctgttttttgttatggtagtgtcagctgtgacccttaagatgggtaaagaaaagtatcacaccttttccacccctacattgcacattaggatggttccaacttttcctattacagatacagctatagtgaatgaatgtggaaatttatacaatgcaggtaaatatgtaggaaacatttctagaaacagaattgctgagtcaaagagtatacatatgtgtaacatttcacagatattgcaaatcattctccataaaagctgtccaaatgtacactcccaccagcctgtatgagagtgcctatttctccacaattctcaaagtgttatcaaacttttcagtagctaccaatctattgatatctcatatcaattggtgagaaaaaacatgtagttaaatttttcatttattttcagataaatgttgtctattcatatattt

SEQ ID NO: 1242146 - DNA, 4001 bp, Homo sapiens
acctgctgcttcccattctgttgctaaagccctggtcctggccactgacatcgtgccaggatgactttgagcagccttccccctggcatcagtctccctgtcccctcccgcagggcaaccagggacatctttctttttcttcttgagacagggtctctctctttcacccagactggagtacagtggcatgatcactgcttactgtagccaaggcttcccaggttcaagtgatcctcccacctcagccttcagagtagccgggaccacagacatgtacctggctaattttattattagtattagtattagtattagtattagtattagtattagtattttgtagagacagtctggctatgttgcccaggctggtcttgaactcctgggctcaagggatccttccaaagtgcagtgactacaggcatcagccactgcgcctcagaggcatctctcaaaatgcaaatgcaattatttcactccctgcctaaccccaactcccccaaaaaaaggctctccactgcccttgggattcaaaatatttttgtttttgtttttgttttgttttgttttttatttgagacggagtcttgctctgttgcccaggctggactgcagtggcccgatctccgctcactgcaagctctgcctcctgggttcacaccattctcctgcctcagcctcccaagtagctgggactacaggcgcccgccaccacgcccggctaattttttgtatttttcatagagacagggtttcaccgtgttagccaggatggtctcgatctcctgacctcgtgatctgcccgcctcggcctcccaaagtgctgggattccaggcgtaagtcaccgtgcccggcctgggattcaaaatattaaggggaaaaaaaaaaaagacaagccttaaatcaggccctgcctccctggactactcacttcccacaccccaggcctttcctcgcctcctctctctgcctgcaacggctaggtgttacccaagcctcctcatccctcccggctgaggctgcagccaccttctaattcagggagccacggaagctcccctcctctgtaaccccaccacgacacgcacacaacccccagtgctgttccacccgcccgtgaccactccaactgcaggttactacccgcttctctccccgacctcccagaccaggagctggaaggcagggaccctctgggtccactttgcactttatcaccagcgcccaacacaaggtcccacgctgcccaacagatagtgatggataatcttcatccagggaactttccctgccctccctcctcctaccgcgttcctcacccccaccgccagcccggcacttcattctttacccttcaacctctctctcagcacagtaacctttcgttaattcaatcacccagcccctattgggctcccgaccctgggcacacagcggtaaactctgcctcgcaataccgtgtgggccttcgcgcacccctccgcgtgagcgttccgagcccggtgcagtcccggcttccgcgcgcccctgctctccgcacagcgctcccgctccgaaggtgctctgacaaccccgcaggcgctattcggagccggggcagggcagctggggctggaggcggcgggcgcgggacggagctccatgaaagttggaagaagtgattacaaatcgggacccgactctcgcagccttggcgctcgcccctccacgcaggcccgggatgccggcctcagcccccagatgtcgggaagacggcgccggccagtccaaggaagagcttccaggaggctggggagcaagggtgccgggctcctcatgccgggtcaggtctcccaggagtgccggctcccagggccactaggcccaggcctgcgcgaggagggagcgcgcgcctccctccacccacccggtcctcgcccctaacccgctctccggcccacactcacctgcctggctgcaagcgccgtcccgggccaggcagtcaggtttccatccccagtgcggcgcgctccgatgccgtcatcgggacccccgccccccaaaccagcccccccctcacccgcaactccgcccgccggggcgctcgggggcggaggcgcgagccggtcggcgtcgcggagtcggcccgcagacagggcgggcggggcccgtgctcaagggctgggcctggagagtgtgcagcatcctcatgatggcatcgccttattttctagaatttgtctccaaactggactccagaccatcctgtcctcagccccgagtcaccttcatccccggtctctgttttccactcccagtcccaaaccacgcctcctgcacgccactcacacagccggcagaaactttaatctccccacgtttaaaaaagttttctcagttataagactctctttttctcacattttagcattcctaaaattgagttccatcttacactcattgtcaagggaaacttggcaccaggaggggcaggagaggtgatctgggggtgtccacggcagcctcaaagagatggttggtgtcttcacctctgagacctctgatccattgtttgcactggaagcaccatgaatgggtgaattttaaaatctgaaaacatatttgtcacttaaaacgccattagaaaaagtaaactccagtgtagtttctagtgaaattttattatgtatatagaagattacctgtcatagacaggcaacataattaaaggccatagaaattgccaggctcgtcagatagatctatattaggaaaccctcagcctccagtaacagaaaccacaatttgaagtggcttgaaccataaggtcatgtgttatctcggggaacagtgaaacccagagggatgagggctcctgggcaggttgagtcagtggcaacattaccaaggaggtggcctttttaactctttttttttttttgccatcaacttcagacacaaaacgtccagaggaagaagacagcagtgtgtggtgaagcatgccctttggatcaagagcactccaagctgatttccttcccattccatgtaccacacagcttaggcctgtccacccccaaactaatcactgtcaaggggatggaactaccatgattggcttgcaataccagtgtgagacagcgtggatataggaaagtcatccacaatctccacaaccacatcctcgaagcttcatagaggagaggctggccaactgattcgtgtatcacaaaggaccatgattcaggtaccaagcatctatctgtcagatgccaggagctgtgccatttcctccaatagacaattcaattaaggagaaactaaaacctcgagcaattggaaagagcacatgaaaccccagtgttctttgacatgctgtagaatgacactgttgttcccaaatattctaaatcaattggggtcctgaacaagaacaacacagagcagcctgccgccgtgatgcccaaagagaatcattttagaccctgaaaatgtgaagaagctgaaaactgaacttggattttcatatgtgtaaaatgtaataaaaggtgatgatgattaatgaaacatcatgctttaagaggtacaattctgggccagccaaggtggctcatgcctgtaaacccatcactctaggaggctgaggcaggcagatcccttcagcccaggagtttgagaccaacctgggcaatagggcaaagctgtttccacaaaaaatgcaaaacataggcaggcgtagtggcatgggcctatagtcccagctacttgggaggttgaagtaggaagatacactggcttgagcctgggaggtggaggttgcagtgagccgagatggtgccactgcactccaacctgtgtgagagagtgagaccctgtctcaaaaaaaaaaaaaaaaaaagagagagagacagaggtacaattctaattacaattatagtaattaaattgtagagaaaataaaaactttcatgttacaataaatttttaaagaatttcatgatggtggaactatcaatgttca

SEQ ID NO: 1242147 - DNA, 4001 bp, Homo sapiens
gaagaactcacgtgagctcagaggaagcatacaattctttacaccaaaatggggaaggattgccgtccattaaaatattttcatctttatgttaaaaacgaaacaaaaaggggggagggaaccgccacagatgaatcaactacaaagtatcgggccgcgcgtgggaactgttgccgctgggctggcgggggcgggcggtgatccccaggctggaggctcagcgcccgccctggtgcaggtgccgcccgccccgcaccggcccagggcaggtgagaggtgggcaggcgagagggcagcacggaggatgggcagcggccagggcattcctttccggagagagcctcgaggccgaggagcctagggccgggcgcgcccccgccgggccggatgggcgggggctcccacaaagagccgcaggcggggagcgggacccgggaccgccccccgcatcgccaagcgccgccgctgactttggttacgacaaattaaaccttagagcgctggaaaaattacaggaagaagagagcgaagaatgtgccgagtggcgaaggaaaccttgtccctgcgtgaacttcgcccgccgcgcgccggggccggcccctcccctcctgagcgcgcgcccgggcagcgggggaggaaacgaggagggaccccggagagcgtcccctgcccccgctccgggcgccccaccgtcacgagtgccgcctgcggtccacacccaggccgcccgcacctgcccgcgccgcctcccggccgggaggggtccccgcccccagcccagatgactatatccgcccccgcggccccacccgagcgcgcccggggagggggcgtgcccggcgggggcgcggtcgcctggcgggcgccggctccgagagccaagacccgcctcgcgcgacgcgcggggccagccgcgggtcggagcggcaggggaaggggcgaggccccgggcgttccggcccgcccggcccccacctcgcgccccatcggggactccgggggcgtggtcgggcagctcgcgccgaccccgtccgcgcgatccgggcgcccgcgccgccccactgacctgtgtgagttctcaggtgcgccttgaggtgcgaagatttcccgtaaactttctcgcagcccgcgtagtggcacttgtgcttcctctgcggggactcgaggtcggcgcgacttcggccccgccggaccctttgtctgaggccgggctcgccgctccccgcgggccccggctcccgctcgggctccagccccgcctcgggctccggctcgctccacgccgggctggggggcgcggccgccgcgccttcggcgccgggggaggtgggctcgggggcgggcggcggcaggcggcagggggtcctcgccttccgggccgcggcgccctccctgcgctccgccggggcgggcgccggcgcttgctggttgaggtccgctaggatccgcgccaccacgaagagcgaggcgctgtccttaccgtcgcggcgctcctcgacgcggggcagcgtgggggtggcggccacggccgcgccctcgggccgggactccggcccctcccgcggcccgtgcacgaccgcgcggctcgacatggacacgaggcactcggcggcgaagtggtccacataggcggcggctgccatgctgcgggctggggccggcggcggtgctcttgctgcgagtcgtcagccgcgcatccgcacccacggcctcgggagagcgggcggggggcgggggcgcggcgcgccctctcctcgggctgggctgggctgggctgggcgcgcagccgcctgtgccgtcacccgcgcggctccgcgtctgcgaggcgccggcccggccgggcaccgaagagtgagcgcatggggcgcgcgggcgactggggtccccgcgcggcgtcaggggcggccggttctaaggatgccgagcggcaacgttagggaccacctcgccaagtcgcggccgcagcttcgccgcgcattgtggcaggcgggacagctgccgtgcgcgccgcggctccgtgtgggcggcccggccccgggggtgggcggggccggggccacatctggacccgacgtcagcccccagccacatcctggcggcgcaggttacaggcggcggcggctgcggggagctgcgcgcgcggagggggcggggaccccagagcgcgcaccggcggaacggagcggtcgcgtgcccgcgcctgggcaagggggcgtgaccgagggccgggacagacgccattggtccgtgagtgcacggccaggccaatccgagccgttagaggggcgtgcccggtcccgggccctgcgcgcgccagtgggcgtgtcccctgggccggtgggaggaggggcggaaactggagcggggcgcgctgacgcatgacgtccgggggcggcgggccgggtagtcgcggcgcggagcggctgcttgtaccccccgcggcggggacacagcgagcacttctctgccggagcttttatgtggtgacagccttggcccccggcatggaggggagcggtttctggagggcgccatttgttcctcccgcgatgggcgccggcggggaggcgtgtctgcccggccgggcgcggggctgcctaggggcggaacgcactcgcgccgcgccctccgccgccggcttgccgggtggccgcgcctagagcctcaggccgctcgccctccccacgcccctgccttgcagagctccgggagtccgggcggggcagctcccgcgggagggacagactcgggctcgttcctggggtccggggtgcggccgcgctgcccttcagctcgggtcagcccgagcaggactggcctcggctggcggtgagcctggcagcccgggtggcgcgcccaccgcggcctgtgcctccagaagcgaactacgtgccagggcggccggcgccgctgctgagggaacgcggggccccttcctccccatcccgccgcaggcccgctgccaactcttctaggctgcccctctcccaccgcggtcgggggggcttcaaacgccaccagctgcgaggaccccgcccaccgcgccccacccgcccgctgtctgggcctcccggaggaaatgctcggctgcgcccagcccgcgcctcccagcccgggctgggccaccttgcccttgactctcacggtaacccctaccccagcccgcggccccagccattctccaggcctgggccgtcctcggagacgccggtgaataacttcccaccgccgcggaaccgggctcagcaaaccccctactgcctcgccccgttgcattgtgcttaatggacgttcgaaggagtcagccacccttgctgtgttctgagaggagcctggagaatgaaggagcccgggcactcaccctcagtggaccctcgcagtgggaggggggtgtcattcttctctcagaattaaggttaatagccgagttcgagttctcaccaaattaatttggggttggagctcagtaagactggttttcaggtaaccgacgagggaccgaaacggccattctgggttgcgtgttacggtgaacagcaaactgcatggatgtttgagcaccctcagtatctgtaactaaaaccctgaaatgcggtctcgctgattgagttgctaccctctggggagactaaaggtgctggactgggtctggtccctttaggagggtctgtgcttggtagaaagtaatcgtgtttcttccaggcagattgtgttgatgacatttaataagagacgtgtgtcctgaccaagtaatgattcggaatgttcctctattcccaccacatgtcacaattagtcacttcttaaggaaggagtggtcctacaccagcttatcagccacccataccctcctggcccctttccagccagcagaattctccccaatcttcaaggtgccacgtctccccactgggtcaccccagccggcatacacaatggtaggccgtctagagtctgcactattctagtattaggctactacagccatgaacaaaacaggc

SEQ ID NO: 1242148 - DNA, 4001 bp, Homo sapiens
ggcacacagcaggtgcccaatcaagtctgttcaaacaatgaatcaatcaatcaatcagtcacaaaccacccactaaataacactctcactcatcctacccttccccccgcccccgcccaagtgatagacgggacgaaccaagcttgctttcactgggtaattgttctcttttcttcctgctctcttctgcccacacggggtgcccgcagatttaaaacgctattaaggggcatcgggctgcagaacctgcttccgatgtggagcatgcaatttgcctatagctcttctctccgcaccacatacataaatccaactgcagcccaagaccccaggatgaaggtgtcttccatttctacctcccttttatcaaccaccctggagtcactgcctgacaaatgactcaaaactgaaatagctgccaggccggaaaaagactgactacgtcaaccttcacaggcacagcttgtggacccaagagcctccggtcttgggacaccaaatggaccctgaggtggggtagactttgtgtcctactcttccccagacccccacgcaagccttcaccaacatgccaggaatcctcacagctcagatcagcacactgagcatcagttcctcctatgaatggggagactgggacccagggtcccagagggcttggccccataacggtcactggaatctggtccaggatacagaccgtggaatcctgcctcctctcctggtgctactgctaacttccttcccttcctctctctattgggccgatagagtggaaccaaatggtccagacacctggcattctctgccctgactaccgaggagagtcaaagtccagcccgccttccccaaggtcaaattcaccgggatccagcaggacccaagagcgtccagattaaatctgcaggggcctgggtccgccccctcacccacagttcgttgggtcaggcctctagagagatgtttctttgttcaaagacaatgggaatgcactttgggggcttagagcagcaacacaaaaaaagtatctggtatctcccgggcacaatcccccaagagaaaagcttctaaagcaactacgaaagagacagggggagtgggggcgtaacatcgcgcggtgtgtctcggagccagggcaagtgtggtaattagagtcaggctagagggcttgctctggacctgccagtctggccgccacccaggtggacaggtgggtgtgcctttgagtgcgacctttctctgccgctggacagttctgcaaaccgaaacgagggaccctggcaggcggaacgtgaacggctcggggctccgcggccaggcccgcgcaaaccctccccttgtgaaccccgggccctcgctctgcgccaggcaggcagccatccggcctgggcgtccaaggcgcggggcatcgccgctcgcgtcctcaaagacaagcagtctctctttccaggatcaatagtaattttttaaaaaaaagagtctgcggactcaatgaatcaaccactccctggggaaagagtagcggctcccgcgcgcaacatccatttgccaaacaattcattccctcgcgcagagctctcggcgaattccctcgcggagccgcggggtgccggccggccgccgctccccaccattgtcccagggccccggccccagccgcggggccccctcccgggacacgtagtcccgcgggggctccgagcgcttggtcccggcccggcccggggtggtgagtccccagcgcagggagcgggggcgcgggtgctgcggccagagcacggcgtccccgcccggcctggatactcactgccggagacgatccccgccgccgccgccgcctcagagaccactcccggcagcccgcgcgagctcaacaggctccgccgcggctcccgtcggccggctctccacaggcaaaaacgctctcgctgcgatacagcctaggcgccgccaacaaactagtttctccggccttcccgccccgcctcccggcccgaagagcagcagccaatcagaggcatcgcctctgtgacggatgggcagccgaacccttcagtgcagccgcagaaaagaagggggtgggccccaggccgcgccggcaccggggggtggggggccgggggcggggagggggggggaccgggggcggggcggggcgaggaaaaggacttcgaccagattcttaaagagacaggcgcctgcccaaccccgccgcccaagtttgggaacaaaacgcgacggtgttctagagctttccagagggagcactgtagattgcatatgcctcttttgtgttcgggtcacaagtgttgtagatctctttagactcttcagagccacactagtagttgcccgagtgttaatgaaaccctgtctttcactctgggcttgtttgaatgtttgggactttctgcagcctccaaaccccacctgtacttgaaatctgtattttttggagtatttcagctctcctctctgtgtcatttctcactaaactcctttcgtaagccagcctttaaatgttcgttcattcattcattcatccatccatccaataatttcttccaggaacgtttcctggacgcccacaccatgcactcatcttggagggggagaacggtttgtgattcttcgtccttttccctcctgactactacttcagcttactgtgtgtgtccaatctcatccgtaaagcggcagataaaaactcctcatcggattatttgggggattaaaggagacaaattcccagacaaatgagtgcgcaataaatgtcctctcttttctccctcccaatgaaaatcgataattcaagtaggttgcttaaggatacaaaaggtaaagcatagaaagtgataagaacgaaagagccaagcctggggcggggaaattcccaggaagcagaggtcaccctgacggaggtggaggtgggaggtgcaaggaaggtctaagaaagtgtacaaagatttgggagaggggataggattgtgactagtggaacctgggaaatagagcccctgggtagaaagctgcttagacaggacagatatgccagggttaaaagactgggagatgatgagaagataccaccagggaaggcatttttgggaaacagcttgatgttctgggtttgaagccccgccctgcccctcaagagctgggtaggactgaagcagatggctcagactctctggtgtctggttcttactggtgaagaggattctaaaacctttcttgcaggggtatgggaaagattaagataacatatggaataggcctggcatgtagtaagtgctcagtacagatttgtgcttccatttggcccagatctgcagacatctaaggcaccagggttctgatatttatgaacaatattggccagaggtaagaagcttgccaagtgcactgttaaggtgccttctgaagagaaaaggtagtgagaggtgaagccagctggactttctgggtccagtggggacttggagaacttttctgtcttacaagaggattgtaaaatgcaccaatcagcgctctgtatctagctagaggtttgtaaaatgtaccaattagtgctctgtagaaatgcaccaatcagcactctgtggctagctagaggtttgtaaaacggaccaatcagcactctgtaaaatggaccaatcagcagcacatgggcctggacaaataagctaataaaagctggccgccccccagccaggagcagcaacccacttgggtcccctttggcgctgtgggggctttgttctttcgctctccacggtaaatttttctgctgctcactctttgggttcacgccacctctaagagctgtaacactcaccgtgaaggtccgcagcttcattcctgaagtcagcgagaccaccaacccaccggaaggaaccagctccaacacattagcatcaaagtaattacttcattaaggaaatgacagagatcacatttgtagttttatcctgccgattttctagcactagagtgtttat

SEQ ID NO: 1242149 - DNA, 4001 bp, Homo sapiens
tccagcccacgctcaaaatcaaaacaaaaatcctgggaggcagcctaaaaatttgaaactgttccagttacatatgatcataaagctgggacagagatagaaatcaaagagatgaacacttccaacttggctgagagagctagtcactgcccactgactcaggggcaccgcatctaagggaaagacacagcagctgagagacctggctccagttcttccagcaactcctagtccccgctggtgccaggattaccattcaggtgttctgcggcaacacaagacaacaaacaacccattaagcctttggagaaaagcctatttacttcagagctcaatctttttttttttgagacggagtctcgctctgtcgcccaggctggagtgcagtggcgcaatatcggctcactgcaagctccgcctcccgggttcacgccattctcctgcctcagcctcccaagtagctgggactacaggcgcccgccaccacgcccggctaagtttttgtattttttagtagagacggtgcttcaccgtgttagccaggatggtctccatctcctgacctcgtgatctgcccacctcgccctcccaaagtgctgggattacaggcgtgagccaccgtgcctggccacttcagcgctccatcttgccaaggtttatgtaccagctgagtggaatcatctgggaagggatcataaatagctactccataatctcccacaacagttttctgatgtctgaagcttactctgtactataatctctagattaggcagttccccgactgcagaccccatgagatgactttcaaccacaagcaaagcaacacaaagcagatggcaaagcaattaaaaactatttttaatcatgtctctctcttcgcccaagtttctcaaatactgtgcctaggtctaacccctctctcccacttcactcaacaaacgtgtattgagaatgtggtaatgagaaacacggtgcagatataaaggtgaacaaagaaccctaagtatcccacttctcaaatgattctcctctttcctccctgaaaacaaacccaatccctcaagatagcccaagtctggaaataagacgataaccgattagaaggggattcctagcttaatgggaataacattgtacaataaccaacaacttgaatctaactgatgaatacagtacacatgcgggcagaaaagtgcagagcacgtctaaaatcctaccacatggtccttcccttaactcccatcataaacctacatagcctggttatagggggctcacaggttttcagggccgacgggacgcccttccccgtgcccgcgccacccattcgatctccacactcccgagaccatccccggccaggccgcagtgccccgggcgtggcttggaccctcacctgccggctggccgccgctcagcgcagaggggggctgcaggctatacactgtcttaaccacactggtcatcgtaacgaggcggcacggctgaaccctggaaggtacaggatgaatgttacccagcgctgggccactgggcccgagagagtggagggcccggggatagcgcgacccgacaggccccggctcggggttggaaaagagaaaatcctcctttcccagctcattccgtccttcctcccatccagcccagtccctcgccccgggagagccgaacccaggagcccgccggtcctgcccgcagtccttctcgctctcgtttaaaagattccctgcagcaactgtcgtgccaccggctaagtcggccgcctgggtttcaaatagaaacttccggtagctaggcggaagtgggtgggaatcgcactctgtagacagccatgttgtacggaaaactctgtccaggggcggggcttcgggagccgccatactgtacggaaggttcgctcagaggccagagccagacctagcgaaaggtgttggagcccccaggtctgggcagaggaggagggtgatgcaatttgtaggcttgaatggagctaatgagctaccagcgtcatattccgggatggagacgcaaacgtggcgacatttagggtccatgtcacaatcctctttatttagtttgggattgttagggatattgccaggagcacaggttatttggatgaaaactacacgttacaggtggagagtggcaggtgaggcttgaagaaaaggacctatgggctgagatacctgaggcacctacctgaggtcctaattttaatagcacttatccagattttcagtagtgattcaaagctactcccaataaacagggtagcttccattactaaatgcactagctcattcatttcatctggcatttattgagtacctgctgattacccaacagtgttctcagtgggtggaagggagtgagggagggcaaatatcaagattgaccttggctctgccctcctggagtttacaacttagaaaacagacagtgaacaaataatcacataaataaatatatatttacggattgtggtgaaattgtgaagaaggctgggcacagtggctcacagctgtaattatagcactttgggaggtggaggcgggtgaattgcttgagtccaggagtttgagaccaccctgggcgacatggtgcaaccccgtctctacaaaaaatacagaaattagccaggtgtcgtggcatgctcctgtagtcccagctaccctggaggctgaggtgggggaattatgtgaccctgggcggggcagaggttgcagtgagcggagatcgcgccactgcacttcaccctgggtgacagagcgtgatctcaaaaatcaaaccaaaacacacacactatgaagaaaaagtacaaaatcgtataagatagaaaagcagggaaacttagattatattgggggctcagggaagacctctctgagatgatgtttgattaaggaaggagagggagttaatttcattggggaaaggggaaaatgcaaagtcccaaggcagaaatgggttcttctataggcacagaaagataggaagagagtggtacagataaagctggagaaataagcagtcaaaagacagattttacaggccaaggtatagagattagattttatctaaaagtaatggaaagccactgaagtattatagcaggagagtgtcatccaatttatattttattttattttattattattttttgagacagggtctcactctgttgcccaggctggagtgcaatcatagttcactgcaaccttgaactcctgggctcaggagatcctcccacctcggcctcctgagtagctaagactaaaggtgcctgccaccagacccagctaatttttgtagagatggggtcctgctatgatgcccaggctggtcttaaacccctggcctcaaatgatcctcccacttcagcctcccaaagtgttggaattacaggcatgagccactgtacctggctcaatttatatatactttatatatatattcttttctttctttttttttttggagacggagtctcactctgttgcccaggctggagtgcagtggcacgatctcggctcactgcaacctccgcctcctgagttaaagcgattctcctgcctcagtctcccgagtagctgggtctacagtgccaccaccacgcttggctaattttttatatttttagtagagacggggtttcaccatgttggccagactggtctcaaactcctgacctcaggtgatctgctcgcttcggcctcccaaagtactgggattacaggcgtgagccaccacgcccagtcctttttcttttcgaataattgggcttgaataattgtgtggatagagtcactattttctgctgggggagattgagagttgggttttgaacgtggaaaacctcgacatatctttgaggcattccggtggagtggtcaagtaggcaattggaaatacaggccctgagcccagaagagagcctggattggagatacacccttgggagttgttgacatatgaatgtacttaaaatcttg

SEQ ID NO: 1242150 - DNA, 4001 bp, Homo sapiens
gtgaaagtactaaaagtctctgatatgcagaaataatggcataagctgtctttccctctgtctcctctccctctctgcctcggctgccaggcagggaagggccccctgtccagtggacacgtgacccacgtgaccttacctatcattggagatgacccacactctttaccctgccccttttgctttgtatccaataaataacagcgcagccagacattcggggccactaccggtctccgcgcattggtggtagcggtcccccgggcccagctgtcttttcttttatctctttgtcttgtgtctttatttctacactctctcgtcgccgcacacagggagagacccaccgaccctgtggggctggtccctacaatagtgtataaccccagtacttagcactttgctttttacggaagagaggcctcaagaaattgttaacttaattaaaaaagaaaacttcacaaattctgagttttatctacccataagtgttacctgcaagtactcagttaatggattgttctacacagtagttaccccttatctgtggtttcgctttcctcagtttcagttatccatggtccgaaagtattaaatggaaaattccagaaataaacaattcgtaagctttaaattgcatgccactcagagtattgttgtgattgttctattttattattgttgctaatctcttactatgcctgatttataaactttatcatagatatgtatatataagataaaatatagtatatacagggttcaatatcatccactttttcaggcatccactgagggtcttggaatatatccccaggataaggagggactactgtataaaactttcagactaataaatccagtcctaagagaaaagtgggagtgggtagccatcctcatgactccaatttattagtcacattttaaaccttaccgtgatttaaaaacacctgactctttattatgttagatgttttctctacaatatgcatcgttttatgtaaatgcaatagcatttcatgggatccactctaaccagtaaaacaatattttatttaccaactggcacagaacaaaacaacaattttctgaacccaccttctgaccagacttcttttccatctacagaaactccaaccactatgcccggtgcgcccacctcatcctaagaccgaaggggaaagaaccgacagttacgggcctgctgaaaaagcccagcgctctcctcggggaccttccaaggccccgccccctgagcctgggccccgccccctccacctgggccccgcccacctcgtcccaggccatggtcactcactaacagcaagggatgtgcctgtccgccccctagggggaaggggcggtccccgagacaggcggtgacctccacccagatttggggaacccccaagagcgtctgaccacggctcggcggtggggaaatgggaagtctttctcggaagccgatcgcgggcaccccgccgccccgggtggggtccactcagcccccgacagcaccgccgacaggggtggatccccggccccctacgccccccgctccagtggccgcaccttgatcctgtgcagcaggtcgcggctgctctcgatggctctggcgaagcacctggagcagggcggcgccggggtctgcggagaccacggggcgagggactgctcctgtggcggctcggccagaggcgacgcctcagggtcgggggccgcgggggactgcgccggggccgcgcccctcagcccacctgccagcttcaccccgagcgccagccccagccccagcccgaggcccccgacccagccgtggccgagaggcggcagcccggcgcgctgatggaccccgcgtcgtccgcagcttgaggccaagcccccgggggcggcagcccgggcagtcactgctgacatgagccggtacatggcgtctctgcacagccggccgccaccaaactcacgcacaccctgccagccgcggcgcggggcggagggaagggcagggggcgggacgggggtggggaccgcggtcagaccctagcagtcgacgcctgactacccgagcgccgatcgcatcgagcccttcttcctctcccttttcttgtctcttccttgtttttcctttctgtctctctttcctttttttcctttgcttaccctcagatcaagcgtcacctcccagaagccttcctagttcccgtcccatgggagttctcgcccttaccatcttgcccctcagtgtgcacacttctttaacaacagttaacactttgtatcatttaactacttgtcagattccttaccagagtgggacttctttggggagcctagacttagttttggatcctcaacttctggaacagcgcagggcacacagtagacgctcagcaggcatctcctttccctttagagatgcctttctcctttcctttccctttctcctttccccctttagaacgcgcttcttttcactctcttgccatctcccttatgtctcatttcaattcacccatttccctaaagatgttttaaaatctattgcttctggaattctagctccacaccgtaccaaagacatgaagttacatccagaccttatattacctttcttttgctataaaagataaagtgttttttaaaaatttcgtgcttgaaaaattttaatccaaaagtaactattataatttacaattacctatgatttctcagcatctgtaaatgatcagacattcttgtgaaataagaaacctaatctcaaattgctacaaaatgtaaaatgtgtataaaatcctagtttaacgtgtaatgaaattgatatgttaatttgaagttacttaaacatttatcagttttgtaatttttatattttgggatacatacatacacacacacacacacacacacacacacacaatctttgaaagcttgtaggctttataccttcagcactggggcaatatgccccatatacaaaatggccctgtcttttcttgcaggtggaataaagaagagagctcacagacttgaactgacaagccatcaggacaaacatattgaggtaataaacttactgagtaaacatatacatacctcaaaataaatatattgaggtaataattatttaataggaggaaaaggcaataatggtatccatacctagcaagaaaatagtggggctaaataagtaaagcttctggggctactcacaaaacccaagactccaagagaccagaatatcctaggacccagagcgtttgacactgaaactgcagttatagtggacagatgtactctattaagatagtactggaggttcccacggtgggggtcaccactactccaagaacatgagagaaaaaatataaagagaaaaatgtaaaagacgcagtcagtggtggttatgagtgcccacttttatttaaactgtacataatttttctttaaactgtacatatgttactgaaacaccaagggtttagcctagatcccattgctcgccacacagaaagccagtcaccaagacaatgagtatcgccgggggaaaacaaagctttttcaggtgctgcagccagggaaacgggagttcagtctcaagtccatttcctcagctaactaaaattaggggtttatatagcaaggaagaaatgtaactatgtgtggggaaacaggaaatagggagggataaggaagaagaattgttcaacaggaagcaggtggttggttaggccgggggtcccaacccctgggccatggactagttaggaactgggccacacagcaggaggtgagtggcaggtgagggagcattattgcctgagctccacctcctgtcagatcagtcatgaccttagatgctcataggagctcgaaccctattgtgaactgcgcatgtgagggatctaggttgcttgctccttatgataatctaactaatgcctgatgatctgaggtggaacagtttcatcctgaaaccatacccatcagccccaaccccacac

SEQ ID NO: 1242151 - DNA, 4001 bp, Homo sapiens
tcatttattctgttcccttatataagctaggtattaggctaggtatggaaatacaaaaaggaataagataaggcagctgccttcaaggatctcactgtctagggaaggggaaacacaaatatctcaacaccattgagtgagtgtgatgatagagatacgcattcagtcaacaaacatgtcctatgtgctgggtgctgtgctaggtgctgaagatacaatgaacgaagcaagcatggtccttgaattcaccgagctcctattcctgtgagggagacacaatgatagaatcacaattgtggaaggtgctaggcataaaatgtacagagtactacagcaacagagaagaaaggaaacacagccagctctggggtggggattgggggtggtggagaagaggcagcgaagttttaaaggctgactagaaatcagtcaatcagaggacctagaggtgggggtgcagaggcatgtagacacaaaatagccccctatgctcagggaactagctggaatcacgggagcgtgaactgttgacagcgtgaactgttgaggcaatgggctgaggagatgatgtgagtgggtgtcacatcttaatgagcagattgaggaatctgggttttctcctgtaggctccaggagctgagaacattcacatcgggtgatggctgctgccatgcgagcctgggtccaaacaggggatagtgtggatcctgttcttggctacatctcctcctgctctgggtgcctgcccactgggctctgtcagctcaccgaagaaccccagggattttctggggtcaactctatgccagtgggcagcaggaagggcttcagactgaacacttgctgagactcaagccacgggagctgggcagttctggaggaagagcaagaggggttcaggcaagaggcctacccatactgaggcttggtttctcctagacctccataggggatctttccaggccttaaacataagtagagctttaatcctggctaatgatacaatctcacaaatttagccctcaggatagggatggctatttgccactgccacaggaaaataaagttataaggataaaccacttggggctattttacatactctgatattgtctgactaggggactgccttctcgagactgtgagctgtcagtgactaagggttcatcatttttatgctctcggtacttggcacagagctaaacgaatcaggccttgcattataaagcactgatctatctactttgtcatacactatggtccagctttcctgccctaccctggtgggctgacttttctcccctaacaactgtctctactggtctgccccgaatctctgggtccagaagtctgaccctttaacctggggaagggtgagccagtaatagagaatggctctgggcccagtattcttccacccttgagttgagtattctcccagtgaagtagatatacgcttgccaggacaatcctgcagaaccttaacagctaaacgcctgggacagggtcctagaagaaagagagctcctaataagtgcctgttggcatccaccagaatgtgcaagttctgtcatttccccactctcatgtctatgtctatgttttatctcctttcaacagcaggaacaaaacaccagtccttaagggcctgggcattagtggacaggagccaaggtgcctgaggacaaagctcgggacccgggacaaggttaaacaagtgccatagcagctccaaactacccaaaacccaggaacaccccccccccgccccccgcaaggcagcaagatgatgcaaacataaaggtctggtgggaaaggctgtgtgaaaatgggaatcccccagggcggaggaagtaaagcagcaagtcctctatccgtctcaaattaccttgaaatcccacctcctggaatcccccatcagcaagtgtccgctgtacctggcctgctaccacctaaagactgagcgcagccagcaggactgggaaaggcagggcgatgatggcagtgaagggtaagcgggaccactcgcaaggggaggggaaggcgggtagggatggactttgcggcgatggggaggtggtgtcttgagggagcccacagagaagaggcctcctccagaggagggggtggcttggatggcccgtgaaagtcctcctcctggatccctgaacatccccacgtccaggcccctcagatcccggccgccagccctgggagcctcggttgggcgacgaagctgcgggctggggcaccggctgcctccacgggccggttctgactcaggggctcggcccggagctgcttccccggcggcggggctgactcaaccccctctgcccgaggagttgtcgcgcgcagtcagcgccccgaactcgcgcgcggcccggcgccccctcggggcccacctcccgggccagccgccgcgcctacctgtgcccgcggctcggctcctcctcgctcgcgctgccccagccggggctgaggtaccgggccgggtccccggcgccccgagtctccgccccctcctcctcgtcctccaactcgtccacgtcctcggcctcctggatggcgacgcggatctgcaccgccgtcttgggcccgggccgagcctccccgccggactgggccatggctcgcgggactgcggcgccgccggggtcctcacgccgcaaggcccagccagccggtcggcagcgactgcgacgagggggcgggggcggtgcgagcgcgcctgccgctcggcccaggggagggacaggggtcgcggcgccccgccccgcgccgccgccgccgccgccgccgccgccaccaccccgaccgctagtggagcgcccgcgcaggcggggcctcggaggtggagggcggctttccggagctcctccgacggaggcccgtcccggaaggatccccgcgacccccgatcactccctccgtcttttcgccgctgtggggccccagcccgagaggaggtgtcagggctccctcctcctgcgccttctttcacggcgccgcagggatgggcgcagcacagctgacttctgtttgtgcttgactccgggggtggcagccagagaccacagctccaggggcttccaggcctcctgcgtgtctcccccactggcctgccaagatcagaaaatttccatcgttagtctccttgacataataaccaccctagaccgcgtcttaggaggtcaggggcttggctcctgccttgccctgtatcagtttttctccaagtgtggttcccagaccaggagcatcagctgcaccggggaacttgttagaaattgaattctcagggctcatccagacctcctgaatcagaatctatgattcagaactttgtgttttaacaaggcctctaggtgatgctgaagttcacaaaagttcgaaagccgatggcctatagagtatgccctgcacatagtatgcactcagatgtttgttgaatgaataaagggagctattgaaatgtcaggatgttctaaaacactgccaccttttcacgtgtaacttcaaattgagttccatctcacctctccaaatgtgacccagaaactagggacaggagcatagaaatgaataagaccggccgggcgcagtggctcaagcctgtaatctcagcactttgggaggcccaggcgggcggatcacgaggtcaagagatcgagaccatcctggccaacatggtgaaaccctgtctttactaaaaaaaatacaaaaattagctggacgtggtggcacgtgcctgtaatcccagctactcgggaggctgaggcaggagaatcacttgaacctgggaagcagaggttgtggtgagccgagattgtgccactgcactccagcctgggcaacagagcgagactccgtctcaaaaaaaaaaaaaagaaaaagaaaaaaaaagaaagaaggaaagaagaaaaagaaatgaataagacctgaatctgctttcatgtagcactttatttagagccttaaacataatttatcatattaat

SEQ ID NO: 1242152 - DNA, 4001 bp, Homo sapiens
agtgggcagcaggaagggcttcagactgaacacttgctgagactcaagccacgggagctgggcagttctggaggaagagcaagaggggttcaggcaagaggcctacccatactgaggcttggtttctcctagacctccataggggatctttccaggccttaaacataagtagagctttaatcctggctaatgatacaatctcacaaatttagccctcaggatagggatggctatttgccactgccacaggaaaataaagttataaggataaaccacttggggctattttacatactctgatattgtctgactaggggactgccttctcgagactgtgagctgtcagtgactaagggttcatcatttttatgctctcggtacttggcacagagctaaacgaatcaggccttgcattataaagcactgatctatctactttgtcatacactatggtccagctttcctgccctaccctggtgggctgacttttctcccctaacaactgtctctactggtctgccccgaatctctgggtccagaagtctgaccctttaacctggggaagggtgagccagtaatagagaatggctctgggcccagtattcttccacccttgagttgagtattctcccagtgaagtagatatacgcttgccaggacaatcctgcagaaccttaacagctaaacgcctgggacagggtcctagaagaaagagagctcctaataagtgcctgttggcatccaccagaatgtgcaagttctgtcatttccccactctcatgtctatgtctatgttttatctcctttcaacagcaggaacaaaacaccagtccttaagggcctgggcattagtggacaggagccaaggtgcctgaggacaaagctcgggacccgggacaaggttaaacaagtgccatagcagctccaaactacccaaaacccaggaacaccccccccccgccccccgcaaggcagcaagatgatgcaaacataaaggtctggtgggaaaggctgtgtgaaaatgggaatcccccagggcggaggaagtaaagcagcaagtcctctatccgtctcaaattaccttgaaatcccacctcctggaatcccccatcagcaagtgtccgctgtacctggcctgctaccacctaaagactgagcgcagccagcaggactgggaaaggcagggcgatgatggcagtgaagggtaagcgggaccactcgcaaggggaggggaaggcgggtagggatggactttgcggcgatggggaggtggtgtcttgagggagcccacagagaagaggcctcctccagaggagggggtggcttggatggcccgtgaaagtcctcctcctggatccctgaacatccccacgtccaggcccctcagatcccggccgccagccctgggagcctcggttgggcgacgaagctgcgggctggggcaccggctgcctccacgggccggttctgactcaggggctcggcccggagctgcttccccggcggcggggctgactcaaccccctctgcccgaggagttgtcgcgcgcagtcagcgccccgaactcgcgcgcggcccggcgccccctcggggcccacctcccgggccagccgccgcgcctacctgtgcccgcggctcggctcctcctcgctcgcgctgccccagccggggctgaggtaccgggccgggtccccggcgccccgagtctccgccccctcctcctcgtcctccaactcgtccacgtcctcggcctcctggatggcgacgcggatctgcaccgccgtcttgggcccgggccgagcctccccgccggactgggccatggctcgcgggactgcggcgccgccggggtcctcacgccgcaaggcccagccagccggtcggcagcgactgcgacgagggggcgggggcggtgcgagcgcgcctgccgctcggcccaggggagggacaggggtcgcggcgccccgccccgcgccgccgccgccgccgccgccgccgccaccaccccgaccgctagtggagcgcccgcgcaggcggggcctcggaggtggagggcggctttccggagctcctccgacggaggcccgtcccggaaggatccccgcgacccccgatcactccctccgtcttttcgccgctgtggggccccagcccgagaggaggtgtcagggctccctcctcctgcgccttctttcacggcgccgcagggatgggcgcagcacagctgacttctgtttgtgcttgactccgggggtggcagccagagaccacagctccaggggcttccaggcctcctgcgtgtctcccccactggcctgccaagatcagaaaatttccatcgttagtctccttgacataataaccaccctagaccgcgtcttaggaggtcaggggcttggctcctgccttgccctgtatcagtttttctccaagtgtggttcccagaccaggagcatcagctgcaccggggaacttgttagaaattgaattctcagggctcatccagacctcctgaatcagaatctatgattcagaactttgtgttttaacaaggcctctaggtgatgctgaagttcacaaaagttcgaaagccgatggcctatagagtatgccctgcacatagtatgcactcagatgtttgttgaatgaataaagggagctattgaaatgtcaggatgttctaaaacactgccaccttttcacgtgtaacttcaaattgagttccatctcacctctccaaatgtgacccagaaactagggacaggagcatagaaatgaataagaccggccgggcgcagtggctcaagcctgtaatctcagcactttgggaggcccaggcgggcggatcacgaggtcaagagatcgagaccatcctggccaacatggtgaaaccctgtctttactaaaaaaaatacaaaaattagctggacgtggtggcacgtgcctgtaatcccagctactcgggaggctgaggcaggagaatcacttgaacctgggaagcagaggttgtggtgagccgagattgtgccactgcactccagcctgggcaacagagcgagactccgtctcaaaaaaaaaaaaaagaaaaagaaaaaaaaagaaagaaggaaagaagaaaaagaaatgaataagacctgaatctgctttcatgtagcactttatttagagccttaaacataatttatcatattaatttgccacactgggaccccaaaacaacagaaccctggaccaatacatttgttttgatatagaaagacaagttaggataggcttaggaaatgaggtctcctggagggcagtgtccttgtaaaagaacaccatgtatagggtcctgggtgtctgggcagggctggggagagacccaggggcccagcgaggacagcccctcttcttaaggacactagaatctgtgtccctttctttgtcggacctctgttttgatagaagaggtcctaaaataagtaagtaaaggaagagagagagacctttggtgctattgctgtttctgcaccagaacagctcacagccctggatctgagctactgggaaaggaagaggcaagaggctgacagtgtctttttccagccagctgtgcctccctccagggctatagatcctctgcaaacacctgtgatgaggctcagaaggaaagagctgcagcagccaccatgccttccagtttgataatttcggttcctgaatttcacaaagtgatacccattatctatctcatttaagccatctcgtgtggcaaagacatcaggggttgttatccttacccacaatgatggctcacattcatctcaggttttatagtttatgaacaattcatacatgtcttttcagggtttccaaatgcctgatcataagagtcccctggggacttttcttaaaatatagattctgaaaatacagtttgaaaactgacagttggtgggtgaatctgggctgtagaagcgttttacttggtgagagttttgaaaaaaagaaattgaatt

SEQ ID NO: 1242153 - DNA, 4001 bp, Homo sapiens
atcctgtagtcaaattgatcacagtcactccaggaaatgaggaggaatgaatccagatccctccaaccagtaacagctttccattgagcacatgagctgtgtgggagtaccttggggtaatgggaggctggatgtctactgactcccagaggaatccacaagagattggtctcagaaagagcacagagttcaatggctcctcagaagccccgagacctccagcaataagggctcccccttgccaagtgcaggcactgtgagaatgccgggcttcaggtacttctccctccactgggatcctgacccaagccattgtccctacatggaggaaatgccagtcacttagtacaggttccaccacgcttcgacccccatacacaaacaaatattcctgattctgacaggacacttctgttgttgaatgccgccaacaacacaaagtggaatcatcctttcggccagcctttgttattgtcactttcaggtcctcagtgttattatcctcactcttaaaaaaatgaagctggagaacccccaaggctggacttactggggacagtctccctcccagaaccagaacccgactctctgagagtcttgtcatggtgtgataaaggcgtccatcccactgaactccagtcccacaactgcctatttggctgcctttccattcagagtcacaatctcttgagagcaagtgaaactggctcactcggcagtgccgcccctcctgctctccaaatcctcctgcactgagaataacgtctgggctcaagaagacagaggcgtggccatatctcttcaggtttgggacctggccctcgctactgactacgctggcagggaatacccctgaaggcgaagcaggatttacgcgaggaaatgcctctgaggatggaaacactagggtgtgggagagggtgtctcccctagaagctgccagaatgaaataatgggcgcacttcagatgccactcctcaaattcgtcaaagggttcaatattttccacccgccggcgttcttctgcgggaagaaagcagtgatagaattcattcatgtccacggcaccgcaggcggtccagccagcttgaaggaagcggcgccgctgcgcctccacgtcaggaaaacgctccaggccatgcaggggggagtttagctgccgaaaatgttgcagcatgaactggccaaaggcgtcttgaggcctcatctgctcatagaccacgaaaagggcattaggaaaacgctgggctgcccaggcgatgagggccgcggcactctccggctcgaggtaggtcagcaccgcctcggccaggagcagagtgggtgaggctgcgtcgagccccgcggcgcccagggcctcctccactcgctggagctgccgcaagtccagacccaggatgcagtagtctgcgctctcaaagcacagcgcggacgcgggctcccccctctcgaaaggcccggttaacgcgcacagctctggcgtctctccaatcctttctgctttgcgccgcgccacgtccggaaaatccacctcccagactgcagcccgggccaggcggcccgcggtttttaagcgaaaatagagcgagtcgaagccagcgccgagagacaagatctgcgcgcgaagcgcggcctggggcgcgccaatctgctccaaaaaagcgcgcacgcagtgcctcacggcgcgtgcgcggacgtagtagcctcggtgaatgagcggtgcgcggcgcgccgcgcccggaaccagcaacgcggcaaaggggtcctgcacgtacccgcgcgcggccagggaacgcttgctgagggcgctgctgtcgttggtgttctgtaccgcgcctgcccgacgctcacggctccgggggcccatggccagaagagactcaggaatggcagtctgtcacggttgtgagccgccccttggttagcacacacctcacggacctcggtagggggaaaaaaaccacccatgctcctggacttccccttccgccggcacttgtgcgtcacttccgggaagagcgcatctcgccaaccagaattgaggagggtgtagccagtgctaagttcgcttgcggctgacctttctttggaatgtcgtgagttccatttgtcccagaatacggtccgctaccgctgtgacatgagtgttagggaaggcgggttgtcacgtttctacaagccttccagtcaaaagggaaaccttgcctaagtccttgtagttgagaaatctctaagaggtgagtctgtggggactgacgacttggcttccttggaccgccaaggaagggtctggtaggagccaagaagggtcggcaccacggaccttcagtaggcaaggattagttagcttccttgggtgctaatagttgctgatttatttaatgctctcacagttgcaaaagagaaccccatttaaaacttgaaaacaagtcactaaggccagggtgcaaactgaagaaaccgacctttacaaataatttatagacacctaacaagaagacgtttccccacagatagtagactgttgattcccttgtattcccagccctatgttagactgacggtgaataaaccactcagcctctctttctcatcacaccgccttggagaattctgtggattttaaagtagtgttgaatatgtccccagaaaggggagtcactgaagagaggtgattgttccctgtgatatgttctgagctttgtttttaaggagtaaatccaggttagacttcagaataatcataaagtttctaaattgggtgtctgggagtcatccataggaaaccacttccagagacatttaggaaatttatcatttgttcactgggatttggtgactgactggctgaaatagaaaaggaaatcagataactttatggttaactacaggtggtactgcataatggttaagagtgtgagttttggagtccagcagatttggatactggagtcaagaaaaagtttcgtattttccaatgttttcttgtggaacaaaatgaaataagaaagaaaaggtttggatcaggataaagattcggtaattgaaaagtgacatttagatttggtgtttaaaagctcattaatggccttagggagagcagtttctgtggagcaataagggcagaatccatgtttcagtgaataggaggtgagttaaaggaggtatccagtctaaattattatactttcgaggagcttaactcagaaggaaaaaagggtcagggcagtggctaaagaatattgtgggataaaagagtcttttgttttgttttcaggtggaagcaaatactgcacatgcgtgttggtcctgtgagggaaaccagctagtggagagggagaggttgaaggaacagaaaaatgagaagacaactcactggtagagtaacttggaatagatagaaatgggatcctgggcacgtattagttgtggggataggagaatgaatcctttatctgtgactcctgatggggtaaaaaaaagattatggataatcataagctcaggtgtgaggtagggcagagagaaaaagaaggaatttgcacctgatggcttctgttttctctgtaaagttggtgacagagttgtcagtttagtgtaaggcattcagatctgatggaacatttgagcagtttgagaattgcttctgaagggattagaagaagggctcacctatgcctgctgggtcagtggatcctcacctctaaaatgagattaagtactgcttcgtgaggtatctcagggttgattgaggggcaaatagaaaaaaaaaaaaagttgaaggactttgaaaaatacgtagcaccatagaaacaaatttatttaatgacaggttcctaaaatgtaggtgttatgtcaaaaatactacttgttttgcaaagaccagatcaagaaaagtaattaaagaagaaagagaatggagtaaaatttctgatttcgatgccttatgatttaggccgggggaggaggggccattgtttaaatctcagtttattcttata

SEQ ID NO: 1242154 - DNA, 4001 bp, Homo sapiens
tcagcagaatgatgtcctcctgtgcagacaggggtggggagacaggtcacctgggccctgggtatgggaggtaggggtccatcgggctctagggccgaggctcactcttgtctgtagctgttagtgggcaaggaagaacctgcttcctcacctgtacaacagaggtgatgccacctgcccacttcatgcaggggatatgccaagagtcaaagaaaacgcaggacagggaggcactgagagaagtccatcagggtgcccctagtaaacctgggtgatgagttcctcaagaagccatccagagaggaaagtgggtgctgaggatgagcgggtcccactccctccacagggtgcaactgacaagcagggaccaggggttcaggccactgtggctgtaggccctgaggctgtgggatcagcccttcagctcccccttcacttggcctgaggcactggctcaggtgaggccccactttcctttcctcctacatccacctcacatcctggcccctcccaaaccttcacccccactggccctgccccctctggctgcactggggtagagggtgtttggcagagcatggggatgacattgtcatcagagctcccccaaacgtcactccctgcctcccagctaggcatgtactcacatgtgtgtgcacgcgcgcgcacacacacacactcacaccccgcactcacctggaccttgtagtagccgtcacaggctacatctgccgtctcattcccaagcactttccccttcccactgtgtgtgaagacgtcccagatgctaggccctttcccgtcctggtcccaggcgccctccgtctggtaggcagaactgcccacgccccaggagaagcctgcagggggagacccgtgctgggtcccaggtgctcccatgtgtcacccagagccaggactctgggctgtgcctcccaggcctcagggactgcccctccctaccacgctgcccctgtcccactggggacttgtcttcctaggagtgtgagcacatgaggcacggtaggggaagatatattaaaaacattttttgcacaattttagctctgattagcatacattatctgtgtaatttttagtaacttcaaaaaaaaaatatctgttaggagcttttagaacaaccacacaaaggtaggtttctcatcctgccaatcaggaagcaagaacaccaaactccttgtcaagtcagccaaagtgggcaggtggacgacagacaggcagacagacgaacagaggcgtggccgtaccaagagggaaggttccatagtagaaggaggcctcttctggggaccccttccgggcggcccccagcctgggcaccagcagtagcatccacagaagggtggcgacccacactggcttcatggtgcctggccctcccccatacctgaaaaagtgcagctggctctgcaggcccctgcagccaggctgatggccaggtcttggcttagggcaaaggccaagtggggagaggaagggaaaggaaggcgcttgatctgcacccagcagcagaggctgaggctggatgtctgatgctgtttccgtgcctggggagctctgagactgatgggcaagactccaaactatcccttctccctaccttggctcctgtctgatgggggagacccagcccatacccctgagtggcctctatctaagggggaaaccacgtctacctcagggaagctccagtctgagggggcaggtgggaaaacccacagggccctttggctctcccaacgacacgcagacccctcccccaagccggggttgcccatcccagtgcctctgtcctgcacacgagggagacccctcgctctggaatcccctctttggtgccagcccagccagcttacccaggatcgtccttgatcgcagacacccccagagcagtcgctggtagtcagagccctctccaactgacccccagggcctacgctgtcccctgagagaggagccacagcacagccgaaggctctggttgggggtgtggtctgtggctacagaaactttcaatagctccattcagtgggggccgggcaggaatgctgagctggccggcagggcctgagtcagcagctgggggagcttggcgctgggtggggggcgggggggcaggggagctatcaatcaactccccatcctgggacagaagggcagccaaggaggggggagacctggtcctcctggacccttctgggcttgacatgccaccttcagcacaccccagtccttcgagtcccaagctgggggtggcgcaggaccagtgtatgttgccatgtgtctctgtctacttgtcccagctgccaaaaaaaaaacaaccaaaaaacccaccataaaagatagagttggtttttccaccttggccttctctctttgtatccctcattcatttctttcctcactcattcattcaaccagcaccacctgctagaacagcccaccctgtagtctcagcacctcttgccctcatctgctgtggctcccttccctgcagtgccctccccatcagaaaggcctccttcacatagctcaatttccagcctccctgccttcagctgagccctcaccacagctctctcaactgggccttatggctttgttgttggttaatttctttgtactcttcctttgggtcttcaatgggtagcacctcctccaggaagcctttctggattcatgcaccctcaggccagactaggttctctggattttgttttcttttctttctttttttgttttctttctttctttctttctttctttctttctttctttctttctttctttctttctttctttctttcttcttctttcttttctttctttcttcttctttcttttctttctttttctttctctctctctctctttctccttccttccttccttccttctttctttttcttttaaacagtgacatggtcacggctcactgcagcctggacctcctgggctcaagtgatccacctcagcaccccaagtagctggggctataggcacccaccaccacgcatgcctaattttttgtagagatggggtcttgctatgttgtctaggctgttcctgggttttcctacagcctgcgtttacccctcccaccctgcacttccacatcagctgtttatgtatctgtcccctgcccctttgtaggttcctgggaggcgggaggcggccagcctggttcatcagcatccagtcctctagtgctgccacctagtggacgcttaataatgtgagtaaaatcgaaatagtacaataatgaacctaaccgtggctaacgttgactgggtgcttcctaaggtccaggggctttcatgtattcattcatcaacccctgagacaaggcaatagatgcagcttcggctgcagtggggcgggaggttccaggctccagcaagggcaggcttgtacggctgtgtggacaaaagccggccccgtctggactgaccctggcctcgtggtggccctgctctgagggtggtgctattactggaaccgttagaggttgaggaaactagagagctccttcaggcctcgctacctagcaattgtgcggaggtttgctgagggaggccagggggtgggtggggtgggggtctagacccacccacctggggggtaggctggggggaggctgctttactggggggcccagctggtgaacggggccaggtcccttggggtttccctggtgatgcctgtggtgaaggcactaagatctttattcccaaattctgacgttccccaggtgcattcatggggacaggagtgattctcaaagtagaagccagggctgggtcccttacaaaaatgtagtgattggatgggggtgtgtcaataaggatatttcccccaccagatttcctacctgtctgccctctagcctttcctcaagaaacatttcctgagtccccaagaggccctggccagagtaaaataggacttggcctgtgggcctctggaactgggggtctcat

SEQ ID NO: 1242155 - DNA, 4001 bp, Homo sapiens
gcctgctcaggtcctcacctgtggcagatcccagtggtgcaaggtcacgatgggagtgatgttgctgctcagaagggcatcgataagatcactgtagaattcgattcccttcttgttcacctgctcggctgcaggtgaaataaaagaagatgctaccagaaaggacctcggccttggccttggccttctggagtgcagcattcctgggccctgttgctttttgaaggcctgaggcaccctcagcccaccagcattctgggagcccagttacctgcagaacctgtgagagctgctaccgtcagcaactacgttcatgggctgatctccctccccaggactctgtggtgcccctgcaaagccaacattgccggaaggggcctcacttgggttcaagaggggcttccctagctcacctcggatgcctgtgggcaggagccggggccaagacagggagaatcggtagtggttgacgtgcagttccctcagcagaatgatgtcctcctgtgcagacaggggtggggagacaggtcacctgggccctgggtatgggaggtaggggtccatcgggctctagggccgaggctcactcttgtctgtagctgttagtgggcaaggaagaacctgcttcctcacctgtacaacagaggtgatgccacctgcccacttcatgcaggggatatgccaagagtcaaagaaaacgcaggacagggaggcactgagagaagtccatcagggtgcccctagtaaacctgggtgatgagttcctcaagaagccatccagagaggaaagtgggtgctgaggatgagcgggtcccactccctccacagggtgcaactgacaagcagggaccaggggttcaggccactgtggctgtaggccctgaggctgtgggatcagcccttcagctcccccttcacttggcctgaggcactggctcaggtgaggccccactttcctttcctcctacatccacctcacatcctggcccctcccaaaccttcacccccactggccctgccccctctggctgcactggggtagagggtgtttggcagagcatggggatgacattgtcatcagagctcccccaaacgtcactccctgcctcccagctaggcatgtactcacatgtgtgtgcacgcgcgcgcacacacacacactcacaccccgcactcacctggaccttgtagtagccgtcacaggctacatctgccgtctcattcccaagcactttccccttcccactgtgtgtgaagacgtcccagatgctaggccctttcccgtcctggtcccaggcgccctccgtctggtaggcagaactgcccacgccccaggagaagcctgcagggggagacccgtgctgggtcccaggtgctcccatgtgtcacccagagccaggactctgggctgtgcctcccaggcctcagggactgcccctccctaccacgctgcccctgtcccactggggacttgtcttcctaggagtgtgagcacatgaggcacggtaggggaagatatattaaaaacattttttgcacaattttagctctgattagcatacattatctgtgtaatttttagtaacttcaaaaaaaaaatatctgttaggagcttttagaacaaccacacaaaggtaggtttctcatcctgccaatcaggaagcaagaacaccaaactccttgtcaagtcagccaaagtgggcaggtggacgacagacaggcagacagacgaacagaggcgtggccgtaccaagagggaaggttccatagtagaaggaggcctcttctggggaccccttccgggcggcccccagcctgggcaccagcagtagcatccacagaagggtggcgacccacactggcttcatggtgcctggccctcccccatacctgaaaaagtgcagctggctctgcaggcccctgcagccaggctgatggccaggtcttggcttagggcaaaggccaagtggggagaggaagggaaaggaaggcgcttgatctgcacccagcagcagaggctgaggctggatgtctgatgctgtttccgtgcctggggagctctgagactgatgggcaagactccaaactatcccttctccctaccttggctcctgtctgatgggggagacccagcccatacccctgagtggcctctatctaagggggaaaccacgtctacctcagggaagctccagtctgagggggcaggtgggaaaacccacagggccctttggctctcccaacgacacgcagacccctcccccaagccggggttgcccatcccagtgcctctgtcctgcacacgagggagacccctcgctctggaatcccctctttggtgccagcccagccagcttacccaggatcgtccttgatcgcagacacccccagagcagtcgctggtagtcagagccctctccaactgacccccagggcctacgctgtcccctgagagaggagccacagcacagccgaaggctctggttgggggtgtggtctgtggctacagaaactttcaatagctccattcagtgggggccgggcaggaatgctgagctggccggcagggcctgagtcagcagctgggggagcttggcgctgggtggggggcgggggggcaggggagctatcaatcaactccccatcctgggacagaagggcagccaaggaggggggagacctggtcctcctggacccttctgggcttgacatgccaccttcagcacaccccagtccttcgagtcccaagctgggggtggcgcaggaccagtgtatgttgccatgtgtctctgtctacttgtcccagctgccaaaaaaaaaacaaccaaaaaacccaccataaaagatagagttggtttttccaccttggccttctctctttgtatccctcattcatttctttcctcactcattcattcaaccagcaccacctgctagaacagcccaccctgtagtctcagcacctcttgccctcatctgctgtggctcccttccctgcagtgccctccccatcagaaaggcctccttcacatagctcaatttccagcctccctgccttcagctgagccctcaccacagctctctcaactgggccttatggctttgttgttggttaatttctttgtactcttcctttgggtcttcaatgggtagcacctcctccaggaagcctttctggattcatgcaccctcaggccagactaggttctctggattttgttttcttttctttctttttttgttttctttctttctttctttctttctttctttctttctttctttctttctttctttctttctttctttcttcttctttcttttctttctttcttcttctttcttttctttctttttctttctctctctctctctttctccttccttccttccttccttctttctttttcttttaaacagtgacatggtcacggctcactgcagcctggacctcctgggctcaagtgatccacctcagcaccccaagtagctggggctataggcacccaccaccacgcatgcctaattttttgtagagatggggtcttgctatgttgtctaggctgttcctgggttttcctacagcctgcgtttacccctcccaccctgcacttccacatcagctgtttatgtatctgtcccctgcccctttgtaggttcctgggaggcgggaggcggccagcctggttcatcagcatccagtcctctagtgctgccacctagtggacgcttaataatgtgagtaaaatcgaaatagtacaataatgaacctaaccgtggctaacgttgactgggtgcttcctaaggtccaggggctttcatgtattcattcatcaacccctgagacaaggcaatagatgcagcttcggctgcagtggggcgggaggttccaggctccagcaagggcaggcttgtacggctgtgtggacaaaagccggccccgtctggactgaccctggcctcgtggtggccctgctctgagggtggtgctattactggaa

SEQ ID NO: 1242156 - DNA, 4001 bp, Homo sapiens
cgtgtgcgccacgatgcatgcggtgggtgagggggcagatcagacgctgctccagaaacttcagatgcagattgggagtcatgagcacttcaacagttggaaccaaggcttcatcattcatcattatgctgggaaggtatggccaatatccattttaatgtctatctgttttaagcctttgggtttgtgatctggtttctcatgaagcaaatcatatggctcgccgtattttattgattcaacaaacggaatttattaactatcaaaggaagcaaaacaaaagattgtatatactactgcatttttttgtatgtacatttatttttacattgtagaagaagctactacttttttacagcatataaatgaacataggtataaaccagcaagaatgaaagaaatagcatatatctaatgaaaagagtcggaatttctagaacacaataaatacctacatcctactttttgggaaccaaatgccaactacatatatataacatggcaagtgctgctacatcagaggtaccaaaaatacttaggaattgtaaataagtatcgtccagcacgtggatgctcaataaaagagctggaggactaaataaataggaaaatcactctacctactttcctgtttccatcttttaggaattcaagtttattcaaaatttcgttatataatcctgtatctatgatctcttcaataatttcggaatggtagttttaggcaactttaaagcttaagcttattctgaatttcccagagtgtttttgcactttttttcagatgggcctcttcttcaggggtcagctttatctttataaggttggtaataccgttctctcccaggatacaaggaatactgaggaatacttcttcatctattccatagaggcccttaattatggtggaaactggatgtattctcctaagattcttcaaaatactttctgttaaatcggccacagataggccaatggcccaagaagtataacctttcattttaataatctcataggcagttgcagtcacttctttgtggacatttttccattgctcaggatctttatcagttcctatatcagagttcagatccttcaaagggacaccagctatgttcactccactccacacaggaacacttgagtctccatgctctccgaggatccatccatggcagctttcagaatggataccaagcttttgtccaatcaagaaacgaaaacgagcagtatccagattacagccgcttccaataatacggtttttgggaaatgcactcaacttccaagctacataagttaagatatccactggattggaaacaataatcagtttgcagtgggggctgtactggacaatactggaaatcattaacttgaagatggccacatttcgctggactaaattaaggcgcgtttctcccttttcttggcgtgcacctgctgtgataatcactaggttggagtttgctgtgacaaagtaatctttgctacaaacaatatttggcattttcgtgaaagggctgccatgttgaagatccatcgtctcacccttcagtttgtcttcatcaagatccacaagggcaagttcatcactcaagccttttaataagatgctgatagcgcaggccatgcccaccgatccagttcctatgatggagaccttactgtgatgaacgggcttctcggaagtgaaacgctcaataagctcactcttcacagtcgccatcttgctcacgggggtgaagagccaggtgccgttgagcgggatgcgcgttgcttgacgcggacacagggccatccccaggcataggaaattcgctcccaccgagctcactctctggctggcccgcacaacaggcacagtccaactcatggctgctcactgaagaagtggagagagagaatggaaaaaagctgctgatccgaacgttgagacgccaagagagccgttggcaggaccttcagcactctacggcaggtgcgcgtgccccgccccctggccctctactgcggctgcgcgggccttgccagagtctccgacacgtgctttccgtgggtgctcagactaaggcagtgaagggctgcttctctagcaagtgatttctggagttagttttgctaagagtattatcaatagttgacatgcttaagaggctaaccgagatccctggaattactagttttttatttttaatatgaatgctgaggaaacatgcttctgttaactacagatgaaaataaggttacgttttctgaaccgtgaccctgccaggaaggatagggctctatgctttgcgtactggtggctgcctgcaccatctcccagtgtcccagaattgggcgcctgctttctggtctatggcgctggaggcctattttgaaaggattccactgccttggtgccagtcctggccaggacccaccctgggacagtcggctggggcttcagcagggtaggggccggctgggagtcactccagcactaaatctcagcatactactgcatatttttggaaaatgaatcaccctgctacatgtattagctgctgaataaatggattttcgtcttgcctcttgctggaatcacagactggcattccttgtctccccatgcctactggtagtataaatcaaggcccagagtgcacttttggtgttcttataaagcccatcagtattgggtgcctactggatgccaggctgtgtggggctgctgatgataaaaaagttaagttgaggtcgtggtcttggggacttcctagtgctatggaaatcccctggtctcatccatcatcccagctgatctcttgttaaacagagtatctgagcatgagtttctggccagattggtgcaactttgataccacttctgggagaaactgcaaagcctcagatgacatggctcattgcagtgaattactgagcatgaggggcttcacttttgctctggcttagctaaaatttaggaaaagtattgagtatgtcacttagacacccctatggatccactgaagaaggggtatggggacttgagagctggagttctgattacggatcagctgggccatccaggcagccagatactcatcagcatctgcaggccttccccactaagtcagctaacaagtaagacgtgcacagccttcctgtgacagtgcacaatgaaatcccaaatgcaacatctggaaatccacatgttgtggtgagggtagccatgacagctttggttttttgtttggtgaaattagattttttgttcaataaatgattttgttcaattaattacattttgttcaatgaaattcgatttctttccattcttggccaggtatcctatgacatggatggcttttgtgaaaggaaccgggatgtgctttttatggatctcatcgagcttatgcagagcagcgagctgtaagtatgttttgccatagctgacaggggatataggtttgatgaaattttcaatatgaaaacaaacttatgagctgggtgtggtggtgtgttcctatagtcccagctactcaggaggctaaggcaggaggatcacttgatcctaggagtttgaggctgcactgagctgtgatcactcctgtcaatagccactgccctccagccaggcaacataggaacactgtgtctctaataaagaaaaaaacaaaaacaaaacaaaacacctgtgatgtttagtggttagcattttgttccttcatgctattgggtctggattatcatttaatctatttggtttctcaaaatagctttcttttctctatatcagtctctcccttttatgtccctaacacttcatgcccccaaattccaagtgccatctacaggtccttcagggcctcaggctttctacctttcaatactattatcagggagaaataagcccactggctttggattgggatggccatttctgactatttaagagtggaacagtctggttctatgatactttgcccctgagctcttcttcatggtcgttgaat

SEQ ID NO: 1242157 - DNA, 4001 bp, Homo sapiens
ctgcactgcagcctgggagacagactgagactccgttaaaaaaaaaaaaaaaaaaaaaaaagatgttcagcatcattagcctttgggaaagtgtaaactgaaaccacaatgagacaccacttgataacatcaaggatggctactttagaaacaaataaaaacttaaaataactgttggcaaagatgtggggaaagggaaccctggtgcattgctggtggtaatgtaaaatggctcaaccactatggaaaacagtttggctgctcctcaaaatattaaagaattaccatatgactctgcactcctacataataccctcctcccaaaattaaaaacaggcacccaaacatgtacatgaatttatttatttttttggagacagagtctcactttatcacccaggttgaagtgaagtgatgcaatctcagctcactgccaacctctgtctcctgggttcaagtgattctcatgcctcagccttctgagtacctgggactacaggcacgcacgaccacacctggctaacagtttgtatttttagtagagacagggtttcaccatgttgcccaggctggtcttcaactcctgagctcaggcaaatccgcctgccggaaccaggaatgtttacagtagcactattcaaacaacccaatgtccatcaacagataaatggattaacaaatttagggtgtgcacattcaatggaatattattaaatcattaaaaatgaataaagtactgatatgtgctacaatgccttgaagacattatgctaagtaaaagaaaccagacacaaaagaccacaatgcatgattcaatttatatgaaattcccagaacagataagtacagaaacaatagcagacaggggttggaggaaggagcatatgaggagtaagtgctttatgaacagtgttttatttgggggtgatgaaaataacaactagatatatgttgtctacaagagactcactttacttggagcctagagggttgcaagaattctgaacttggtcttgggttctcacttcaaatagctcctattcatatttcaagtgcccgtagtctcaactacttggaggctgaggcagaaggatggcttgagcccagaagttcaaggccaacctgagcaacacagtgagaccctgtctctaaaaaagtaaactttaaaaaaacacccacaatcctgtgccagaaataacttccaagcagcatgcacatacactaattcattcatttcatcaacaaatccttcattcctcctctctgtacacagaccccatgcactccccaatctaacatcacagactccggaaattctggagtttctgcacaagctcttagagaacacattctctcctatgtgaaacatctatctgtaaccccatcccattatccgtcccagactcgtcatccagacatctcaagctccctatcacaccatgctctggtttcattcaagacggcattctgaggccctctgtaaattcgcccaccccatcccatattcctgcattcatttccattcattcaaaaacagcccttactctacgctggcctgtgcaaggcaaggcggaacaggactccaacgttcctacccgcgctgcgcaggctcgcctgcacttccacccatgccccgcgcccctttcgctccacaagctcccaggaaccgtctgctccaccgacacccagagcctcgaggcgcagactgtctgactctccatcctgcccgccggaggaggatggcacctccgggagtgcagggggcgctgaggcaggagtggaggaaacgccacctcttgcccgcggcgctggagcctccacggttgtccggctcccacagcggaaggcctgccacgcacccatcctccgaagaccagcgaacccacctttacgctcagcttcgctgtcggcgtcgctcccgaagagatcctccatatccgccattatcgctcacgtccgctgctgcctcggttaggggcagctcccggcctctctttacggcacggaaccactgaaacacgacagtgtcgcaaagattcgccgaagacactcctttccttacgtgacctagttttcgctcgcccagtgaacctgttctcgcctgggtatgcatggtatataagcccggccatttcgtcaatatctgttatttgccaggattcttaccagggggcgggggggtcctgcgttcggttgcgggtgtggatggggtgggcggtgactggcgctctctggggaagggcctctggctggattaaacctatcgcgagtcaggattgaagccctttgtttcttactgagcagctgttctccagttatttcatcccaaacccctttaccctcttaaaaattgttgagacggagtctcgctcagtcgcccaggctggagtgcagtggcgcgatctcggctcacagcaacctccactgtccgggttcaagcaattctaattcctcagcctcccgagtagctgggacgacaggcgcccgccaccacacccggctaattttttgtattttagtagacacggggtttcaccgtgttgcccaggctggtcgcaaactcaggagctcaggcaatccgcccgcctcggcctcccaaagtgctgggattacaggtacgggtattgatatttactgtattcttactaatacggtaataaatttttaagttactaattcatttaaaaataatatacatgttaacaaacagcttttttaagctttaaatgaccatttttttggccgggcgcggtcgctcacgcctgtaatcccagcactttgggaggccgaggcgggtggatcacgaggtcaggagatcgagaccatcctggctaacacggtgaaaccccgtctctactaaaataaaaaaaattagccgggcgtggttgtgggcgcctgtcgtcccagctactagggaggatgaggcaggagaatggcgtgaacccaggaggcggagcttgcagtgagccgagatcgcgccactgcactccagcctgggcacgagactccatctcaaaaaaataataataataaaataaaataattaaaaataaaaacattagccaggcatgatggcatgcatttgtagccctagctactcaggaaactgagaatggaggatcacttgagcccaggagttggaggctgcagtgagctatgatcacgccacttcactctagcctgagtgacagagtaaggctctgtttcttagaagaaaaagtgagaaaagagtacatcctgtgttacattacctaattaggccattatgagagttttggtcttggacaagcaacaatgaatatttagtttggagattatatgatatatatttttgtagtaaacttcagtgcttaacagggtccaaatgggtgggactgggtatgtaatcatcaatcctagagcttttgtgtatgaagcggatgttgcaagagaagatacatagataacctgaaaactatctggaatactggaaaaacaagtattccatttgacagtgattcagtttcattttcatttagagtactgtccctgaaaagtactttgattaaatttattttcttttgatacagtgtctctgttgcctaggctggagcgcagtggcgccatcatagctcactgcagcctcaaactcctggcctcaagaggtcctcctgcctcggcctcctaacacgttgggattacaagtatgggccacagtgcctggctaaatcttaataaattgaattacagtttggtctggtgagtcaccatgtccatattcctggctatcagaataaacgtgtttttcccatatgaatagtataaaacaaatcacttctgactcttggacagatttttttgtttatgttttggctacactttttttttttaaacagagtttcgctcttgttgcccaggctggagtacaatggcgtgatctcagctcactgcaacctccacctcccgggttcgagtgattctcctgcctcagccttctgagtagctgggattacaggcatgcg

SEQ ID NO: 1242158 - DNA, 4001 bp, Homo sapiens
tcccctcgcgttctcttctctggaaaggaaggccggagttgcaccctcaaagcgcctccgtccccacccctcccggcccgccgcgccccaggggctccacaaacttgctgcaagtcgtcggggctgcagctgcaggtaagggtgaggcggggccgcggcctgggctgccgagcacgccccctcccagccccaagcgtgcacgccccccacggacgcgcacccagcaccccacccccgccgctgcccccgaggctcccgcccaatcagaggccgcgcgcgccgcgccgccggcgggcagacacaccggctccccggcctgcgcccctgcggccctggccccgctgcagcgtcccggcccggccacactcaccgtcccgggcgcgccgtccgcgcgcggctccgctccgggccggcatcccccggctcggctgcctccggtccccgctccggcctcggttcccgctccgcagggctcggctccgcgatggtggccgcggcggcgagcgcggcagggagggcgtgtgtatgcgcgtgagagcgcgcagcgtgtgcatgtgcgtgtgcgcgggagggtcccggctcccctgcgcgtcccgctcctgcctcctgctcgccacgatgcgatgccggcagaatctctaccgcgcgcccccactgcccggcgcccacactcgcgcacacacgcgcacacccaggcgcgcacacccggctccgcactcccgactcgccctcctggagcgctcacaaagaccccctgccgggacggccggagcctgcggagcgcggccctgggcccctccgggacccgccggccttaggtgccccgctgctccccgtagggaccccgcgggcggcccggctcccgcaccctgcctggccgggccgcggccgcgctcccagcccgaacctgggcccaggtgccgactcgggcttctcgcactcccgcgggaagcgccggccccctccgcggcgccgccgcccttctcccccccttccagtccggcctctccggcgcctccctgccttgtcccacctgcccagcccggtcctcgttctccccgctgctctccgtctgtctcgccgccgccctctcccgcgccccttcctccccaccgccctgcgctgcctctcacattctccgcattacagcgggtgccgcccgccgctcgcggggcccagggttcgagcgcgcagtgggcggcgaggggacccgccacgcccggccccgccgccccctccgctctccgcggctccgcggctgctagctccggcctggcgctagggtggcgacgtcccgcgctagcctcggctgccgctgacagctctcatctcgcccgggcttaaagggatagcgcacccggctcgaccggccccacccgggggccccggggaagggacctcgctgcgcgggaacagtccggggcggtggcacagccggggccgtgcgggcgacgccctctccgccgccgtggagcccggccctcggggctggaggtgagtcaaggagaaggacggtcagaccacgccatccagggggcgctcagcggccaagcctctgggccgacaatgggtgtgcggcggtgtaggctgagcgccctggactgcgtggcgggggatgggggtcagtgaagctgccgtctgagtctgaactccaggtgaagacacctgtcatgctgggaggacagggctcacgggctggcgtcccgctcctgctgtgtgaccttgggcaaatgccgacccctctctgcacctcagtttaccccctttgggaagggcatggcttccatcatttctgagcccatgcccagctctgatatggtgttaggtccccatagaagggggagtcccaaggtagtccctcagcccccagagtcccacctccttgcctgtgagagctgaggccaccgctgagactgcaatccttgccaccccggacactcaccaggactggtctgcctcctccttccaactgcctcatcagggaaaccagggaacgaggtaaagttgagtcagtacagggacctaccgtttgcagagctccctcacatccaagatctccctggaccctcatgacacccctgggaagtaaagtgcacccctacgctcccggtcagcctgatcctggacaagtctagcacgtgagcatttcgtcttcagggccccctccccacccttactcccacccaggctgtcccttgctctccagagggatgcattttgcccattgttcaggaagtttctgtcatatgccccatcctgtgctaggtcctggagacacagatgatttagacacattcctaccttcagaaaataagaataagggaggtatgatagagctgtggtgggtggaggaggtcctggaggaggtgacattgaagccagatagtgaaggatgagtaagaattggccaggcagaaaggaacacgaagggtatcccatgccaaaagaagagcatgtgcaaagacctggaagtgggaaatggagtgatgggtgttttggagggaagagaagctataaatccttgatttgaggagtttcgactttgttctggggcagcagcagagctgccacttggcaaatctaggcagcagcccccacccccacctttcagccgtcacagaggtatggctaagggcttcccaaacccagcagcttttgccagaggccaccccctcttctgtttctcccctctaagcccagacccacttctgcacccatatctacagccagacgcagcacagcctccccctgctgtccggagctggaagtaggagaagcccaggctgcgctgtggctgtgatgtgagtccaggaagggccaggctcctgtacccacccatcatgaaggtgccctgtgaagaccctagactttggtatcaggcagatccagtatcagttccagcctcagtgtcctccttggtacaatgggaataaaaatacattgccagtaacatgactggcaaagaatccacgagggacgatgctcaggaatggctcagcacacagcgggcatgcggcaaatggccttttcttccccgtgtccgagcttggctttgtggcccatcccaaagtccctgttgtctcccctctccctctttccctgaccattttccttctacctccctaccagacttcctgggggtctcaagggagatgagctcatggctgttgcctgctctggctcagcacgcctcctgaggagtcttcccagggcttccaggtgagccctagggaagccacacagagacaaacagcctttccccagagtctctgacatccttgcagagcagcaatttcagcctgcatccccatccatttcccaccatccagttctcccgcttacttctgctgtcttggaagccacacagcctttgtgtccgtgcttgggaatttatgcccagctatgcggtgcaaactcaaataggtggcacactttctctgagccttaactccctccctaagtatgggagcaagctgatatgcaccacagggatgacgaacctgagtctatgtcatttattttccccagcaagtccaagcctaggccctctatccaggagttctgcacaaaggcagtcatgtgcagaggcctctctggggtccccttgtgtcctgcccttgtgctggtggccagaggctgttgccacgtcttccttccagcaggctttacagagaggcatggcatgaataatgaccaggcccactctacggccagagcagtagtagctgggggcctggggcagggaccaggaacaagaccagttggacagctagctccaggaggtagctcctctaccaggggctggtggctggctgctttccaccacagaggctgggtcagtgccccaataaatgcctgcccagggccgctctgctgtttccagccatcttcatgggccagtcatggagaactttggcagtgttccagatctaatcatcacaccaggtccagccgagagactgagagtggcccacatggaattcgaggaggcagtgggcatt

SEQ ID NO: 1242159 - DNA, 4001 bp, Homo sapiens
ggctgggttggcacttaggggtgtggggaggttccctcaggcagccagtacaggtccagagtgtgggaggagactcacaatgggagagggtacaaagcacagccacaacctcaatgtagagtgaggcacgcgggggcatggctccaagcaggtatggggcaccaggccggcagacctggagacgcccccggcctcttgggagctcctgagggtccaggtcgggtggggcgcgccttgcggcaagttcccttcttccagccaccgtcctgaggagcagaaggcgcggggacacacacatacacgcccgggcacgtcgccgcactcccccaactgaaccttggtgtcttcctcctgcctgcaaagacatcccaggccctgggcctgggagctgtccccgcgcggtcctgcctgaccctagcggggtcatagtagtctggcgcccggagcggctccagcgcggcgccgcgggcctaggtgggtgtcccagagagcgggcggctgcgcgactgaggagctggaggcgcacccctccgcccgccagacggcccggcccgcgcccccgccccactcccctcgcgttctcttctctggaaaggaaggccggagttgcaccctcaaagcgcctccgtccccacccctcccggcccgccgcgccccaggggctccacaaacttgctgcaagtcgtcggggctgcagctgcaggtaagggtgaggcggggccgcggcctgggctgccgagcacgccccctcccagccccaagcgtgcacgccccccacggacgcgcacccagcaccccacccccgccgctgcccccgaggctcccgcccaatcagaggccgcgcgcgccgcgccgccggcgggcagacacaccggctccccggcctgcgcccctgcggccctggccccgctgcagcgtcccggcccggccacactcaccgtcccgggcgcgccgtccgcgcgcggctccgctccgggccggcatcccccggctcggctgcctccggtccccgctccggcctcggttcccgctccgcagggctcggctccgcgatggtggccgcggcggcgagcgcggcagggagggcgtgtgtatgcgcgtgagagcgcgcagcgtgtgcatgtgcgtgtgcgcgggagggtcccggctcccctgcgcgtcccgctcctgcctcctgctcgccacgatgcgatgccggcagaatctctaccgcgcgcccccactgcccggcgcccacactcgcgcacacacgcgcacacccaggcgcgcacacccggctccgcactcccgactcgccctcctggagcgctcacaaagaccccctgccgggacggccggagcctgcggagcgcggccctgggcccctccgggacccgccggccttaggtgccccgctgctccccgtagggaccccgcgggcggcccggctcccgcaccctgcctggccgggccgcggccgcgctcccagcccgaacctgggcccaggtgccgactcgggcttctcgcactcccgcgggaagcgccggccccctccgcggcgccgccgcccttctcccccccttccagtccggcctctccggcgcctccctgccttgtcccacctgcccagcccggtcctcgttctccccgctgctctccgtctgtctcgccgccgccctctcccgcgccccttcctccccaccgccctgcgctgcctctcacattctccgcattacagcgggtgccgcccgccgctcgcggggcccagggttcgagcgcgcagtgggcggcgaggggacccgccacgcccggccccgccgccccctccgctctccgcggctccgcggctgctagctccggcctggcgctagggtggcgacgtcccgcgctagcctcggctgccgctgacagctctcatctcgcccgggcttaaagggatagcgcacccggctcgaccggccccacccgggggccccggggaagggacctcgctgcgcgggaacagtccggggcggtggcacagccggggccgtgcgggcgacgccctctccgccgccgtggagcccggccctcggggctggaggtgagtcaaggagaaggacggtcagaccacgccatccagggggcgctcagcggccaagcctctgggccgacaatgggtgtgcggcggtgtaggctgagcgccctggactgcgtggcgggggatgggggtcagtgaagctgccgtctgagtctgaactccaggtgaagacacctgtcatgctgggaggacagggctcacgggctggcgtcccgctcctgctgtgtgaccttgggcaaatgccgacccctctctgcacctcagtttaccccctttgggaagggcatggcttccatcatttctgagcccatgcccagctctgatatggtgttaggtccccatagaagggggagtcccaaggtagtccctcagcccccagagtcccacctccttgcctgtgagagctgaggccaccgctgagactgcaatccttgccaccccggacactcaccaggactggtctgcctcctccttccaactgcctcatcagggaaaccagggaacgaggtaaagttgagtcagtacagggacctaccgtttgcagagctccctcacatccaagatctccctggaccctcatgacacccctgggaagtaaagtgcacccctacgctcccggtcagcctgatcctggacaagtctagcacgtgagcatttcgtcttcagggccccctccccacccttactcccacccaggctgtcccttgctctccagagggatgcattttgcccattgttcaggaagtttctgtcatatgccccatcctgtgctaggtcctggagacacagatgatttagacacattcctaccttcagaaaataagaataagggaggtatgatagagctgtggtgggtggaggaggtcctggaggaggtgacattgaagccagatagtgaaggatgagtaagaattggccaggcagaaaggaacacgaagggtatcccatgccaaaagaagagcatgtgcaaagacctggaagtgggaaatggagtgatgggtgttttggagggaagagaagctataaatccttgatttgaggagtttcgactttgttctggggcagcagcagagctgccacttggcaaatctaggcagcagcccccacccccacctttcagccgtcacagaggtatggctaagggcttcccaaacccagcagcttttgccagaggccaccccctcttctgtttctcccctctaagcccagacccacttctgcacccatatctacagccagacgcagcacagcctccccctgctgtccggagctggaagtaggagaagcccaggctgcgctgtggctgtgatgtgagtccaggaagggccaggctcctgtacccacccatcatgaaggtgccctgtgaagaccctagactttggtatcaggcagatccagtatcagttccagcctcagtgtcctccttggtacaatgggaataaaaatacattgccagtaacatgactggcaaagaatccacgagggacgatgctcaggaatggctcagcacacagcgggcatgcggcaaatggccttttcttccccgtgtccgagcttggctttgtggcccatcccaaagtccctgttgtctcccctctccctctttccctgaccattttccttctacctccctaccagacttcctgggggtctcaagggagatgagctcatggctgttgcctgctctggctcagcacgcctcctgaggagtcttcccagggcttccaggtgagccctagggaagccacacagagacaaacagcctttccccagagtctctgacatccttgcagagcagcaatttcagcctgcatccccatccatttcccaccatccagttctcccgcttacttctgctgtcttggaagccacacagcctttgtgtccgtgcttgggaatttatgcccagctatgcggtgcaaactcaaataggtggcacact

SEQ ID NO: 1242160 - DNA, 4001 bp, Homo sapiens
cccagcagttacaaccccagggaagtccaagctggaaggactcaggagcaaccagagaaggcttcctagaggaggaaaaacctgccctggaaacaaggaggatgaggaacctgcaggagtcctgaccccagatccttccttgggcctctcactccaggagacacggggttctctccctctcagaggcaccatcttggaccacagctttccatcccatcttccacaggactggctgggttggcacttaggggtgtggggaggttccctcaggcagccagtacaggtccagagtgtgggaggagactcacaatgggagagggtacaaagcacagccacaacctcaatgtagagtgaggcacgcgggggcatggctccaagcaggtatggggcaccaggccggcagacctggagacgcccccggcctcttgggagctcctgagggtccaggtcgggtggggcgcgccttgcggcaagttcccttcttccagccaccgtcctgaggagcagaaggcgcggggacacacacatacacgcccgggcacgtcgccgcactcccccaactgaaccttggtgtcttcctcctgcctgcaaagacatcccaggccctgggcctgggagctgtccccgcgcggtcctgcctgaccctagcggggtcatagtagtctggcgcccggagcggctccagcgcggcgccgcgggcctaggtgggtgtcccagagagcgggcggctgcgcgactgaggagctggaggcgcacccctccgcccgccagacggcccggcccgcgcccccgccccactcccctcgcgttctcttctctggaaaggaaggccggagttgcaccctcaaagcgcctccgtccccacccctcccggcccgccgcgccccaggggctccacaaacttgctgcaagtcgtcggggctgcagctgcaggtaagggtgaggcggggccgcggcctgggctgccgagcacgccccctcccagccccaagcgtgcacgccccccacggacgcgcacccagcaccccacccccgccgctgcccccgaggctcccgcccaatcagaggccgcgcgcgccgcgccgccggcgggcagacacaccggctccccggcctgcgcccctgcggccctggccccgctgcagcgtcccggcccggccacactcaccgtcccgggcgcgccgtccgcgcgcggctccgctccgggccggcatcccccggctcggctgcctccggtccccgctccggcctcggttcccgctccgcagggctcggctccgcgatggtggccgcggcggcgagcgcggcagggagggcgtgtgtatgcgcgtgagagcgcgcagcgtgtgcatgtgcgtgtgcgcgggagggtcccggctcccctgcgcgtcccgctcctgcctcctgctcgccacgatgcgatgccggcagaatctctaccgcgcgcccccactgcccggcgcccacactcgcgcacacacgcgcacacccaggcgcgcacacccggctccgcactcccgactcgccctcctggagcgctcacaaagaccccctgccgggacggccggagcctgcggagcgcggccctgggcccctccgggacccgccggccttaggtgccccgctgctccccgtagggaccccgcgggcggcccggctcccgcaccctgcctggccgggccgcggccgcgctcccagcccgaacctgggcccaggtgccgactcgggcttctcgcactcccgcgggaagcgccggccccctccgcggcgccgccgcccttctcccccccttccagtccggcctctccggcgcctccctgccttgtcccacctgcccagcccggtcctcgttctccccgctgctctccgtctgtctcgccgccgccctctcccgcgccccttcctccccaccgccctgcgctgcctctcacattctccgcattacagcgggtgccgcccgccgctcgcggggcccagggttcgagcgcgcagtgggcggcgaggggacccgccacgcccggccccgccgccccctccgctctccgcggctccgcggctgctagctccggcctggcgctagggtggcgacgtcccgcgctagcctcggctgccgctgacagctctcatctcgcccgggcttaaagggatagcgcacccggctcgaccggccccacccgggggccccggggaagggacctcgctgcgcgggaacagtccggggcggtggcacagccggggccgtgcgggcgacgccctctccgccgccgtggagcccggccctcggggctggaggtgagtcaaggagaaggacggtcagaccacgccatccagggggcgctcagcggccaagcctctgggccgacaatgggtgtgcggcggtgtaggctgagcgccctggactgcgtggcgggggatgggggtcagtgaagctgccgtctgagtctgaactccaggtgaagacacctgtcatgctgggaggacagggctcacgggctggcgtcccgctcctgctgtgtgaccttgggcaaatgccgacccctctctgcacctcagtttaccccctttgggaagggcatggcttccatcatttctgagcccatgcccagctctgatatggtgttaggtccccatagaagggggagtcccaaggtagtccctcagcccccagagtcccacctccttgcctgtgagagctgaggccaccgctgagactgcaatccttgccaccccggacactcaccaggactggtctgcctcctccttccaactgcctcatcagggaaaccagggaacgaggtaaagttgagtcagtacagggacctaccgtttgcagagctccctcacatccaagatctccctggaccctcatgacacccctgggaagtaaagtgcacccctacgctcccggtcagcctgatcctggacaagtctagcacgtgagcatttcgtcttcagggccccctccccacccttactcccacccaggctgtcccttgctctccagagggatgcattttgcccattgttcaggaagtttctgtcatatgccccatcctgtgctaggtcctggagacacagatgatttagacacattcctaccttcagaaaataagaataagggaggtatgatagagctgtggtgggtggaggaggtcctggaggaggtgacattgaagccagatagtgaaggatgagtaagaattggccaggcagaaaggaacacgaagggtatcccatgccaaaagaagagcatgtgcaaagacctggaagtgggaaatggagtgatgggtgttttggagggaagagaagctataaatccttgatttgaggagtttcgactttgttctggggcagcagcagagctgccacttggcaaatctaggcagcagcccccacccccacctttcagccgtcacagaggtatggctaagggcttcccaaacccagcagcttttgccagaggccaccccctcttctgtttctcccctctaagcccagacccacttctgcacccatatctacagccagacgcagcacagcctccccctgctgtccggagctggaagtaggagaagcccaggctgcgctgtggctgtgatgtgagtccaggaagggccaggctcctgtacccacccatcatgaaggtgccctgtgaagaccctagactttggtatcaggcagatccagtatcagttccagcctcagtgtcctccttggtacaatgggaataaaaatacattgccagtaacatgactggcaaagaatccacgagggacgatgctcaggaatggctcagcacacagcgggcatgcggcaaatggccttttcttccccgtgtccgagcttggctttgtggcccatcccaaagtccctgttgtctcccctctccctctttccctgaccattttccttctacctccctaccagacttcctgggggtctcaagggagatgagctcatggctgttgcctgctctggctcagcacgcctcctgaggagtc

SEQ ID NO: 1242161 - DNA, 4001 bp, Homo sapiens
tccaaaccatcaagcaaagcactgacagcctctggccccaaatccaggaagcacatatttaaccaagctagggtcaaaaggtcccacaggtcaggagcttttgttcaactgcctccagctgagaacagccgccagcccagtaaacgtgccacacgcagcaggagcccgcctgccaggtcaataaagaaggcctgggtgtcctccatgcctcaccaaagaccagggtcagcggataccctcgcagtggaaaagggctgtcctaagacttagaaaactacctccatctctgccacaaaatcctcctctgtgaaatggataagcaacttgcccaccggtcctgcattctcacaaagtggctgagagattccagaaggataatggaggtggaagtaaggtttaagcctgaaagctgatattaccatagacattaccatactccagagacccaggtagatactgactggtccagccaccacacccctccacacagcatccaggctgagatcaagacttctaaccacacaggttcacaggcgagtggcaggaaagaaggcatatggatgggggctgcttgggatcccagcagttacaaccccagggaagtccaagctggaaggactcaggagcaaccagagaaggcttcctagaggaggaaaaacctgccctggaaacaaggaggatgaggaacctgcaggagtcctgaccccagatccttccttgggcctctcactccaggagacacggggttctctccctctcagaggcaccatcttggaccacagctttccatcccatcttccacaggactggctgggttggcacttaggggtgtggggaggttccctcaggcagccagtacaggtccagagtgtgggaggagactcacaatgggagagggtacaaagcacagccacaacctcaatgtagagtgaggcacgcgggggcatggctccaagcaggtatggggcaccaggccggcagacctggagacgcccccggcctcttgggagctcctgagggtccaggtcgggtggggcgcgccttgcggcaagttcccttcttccagccaccgtcctgaggagcagaaggcgcggggacacacacatacacgcccgggcacgtcgccgcactcccccaactgaaccttggtgtcttcctcctgcctgcaaagacatcccaggccctgggcctgggagctgtccccgcgcggtcctgcctgaccctagcggggtcatagtagtctggcgcccggagcggctccagcgcggcgccgcgggcctaggtgggtgtcccagagagcgggcggctgcgcgactgaggagctggaggcgcacccctccgcccgccagacggcccggcccgcgcccccgccccactcccctcgcgttctcttctctggaaaggaaggccggagttgcaccctcaaagcgcctccgtccccacccctcccggcccgccgcgccccaggggctccacaaacttgctgcaagtcgtcggggctgcagctgcaggtaagggtgaggcggggccgcggcctgggctgccgagcacgccccctcccagccccaagcgtgcacgccccccacggacgcgcacccagcaccccacccccgccgctgcccccgaggctcccgcccaatcagaggccgcgcgcgccgcgccgccggcgggcagacacaccggctccccggcctgcgcccctgcggccctggccccgctgcagcgtcccggcccggccacactcaccgtcccgggcgcgccgtccgcgcgcggctccgctccgggccggcatcccccggctcggctgcctccggtccccgctccggcctcggttcccgctccgcagggctcggctccgcgatggtggccgcggcggcgagcgcggcagggagggcgtgtgtatgcgcgtgagagcgcgcagcgtgtgcatgtgcgtgtgcgcgggagggtcccggctcccctgcgcgtcccgctcctgcctcctgctcgccacgatgcgatgccggcagaatctctaccgcgcgcccccactgcccggcgcccacactcgcgcacacacgcgcacacccaggcgcgcacacccggctccgcactcccgactcgccctcctggagcgctcacaaagaccccctgccgggacggccggagcctgcggagcgcggccctgggcccctccgggacccgccggccttaggtgccccgctgctccccgtagggaccccgcgggcggcccggctcccgcaccctgcctggccgggccgcggccgcgctcccagcccgaacctgggcccaggtgccgactcgggcttctcgcactcccgcgggaagcgccggccccctccgcggcgccgccgcccttctcccccccttccagtccggcctctccggcgcctccctgccttgtcccacctgcccagcccggtcctcgttctccccgctgctctccgtctgtctcgccgccgccctctcccgcgccccttcctccccaccgccctgcgctgcctctcacattctccgcattacagcgggtgccgcccgccgctcgcggggcccagggttcgagcgcgcagtgggcggcgaggggacccgccacgcccggccccgccgccccctccgctctccgcggctccgcggctgctagctccggcctggcgctagggtggcgacgtcccgcgctagcctcggctgccgctgacagctctcatctcgcccgggcttaaagggatagcgcacccggctcgaccggccccacccgggggccccggggaagggacctcgctgcgcgggaacagtccggggcggtggcacagccggggccgtgcgggcgacgccctctccgccgccgtggagcccggccctcggggctggaggtgagtcaaggagaaggacggtcagaccacgccatccagggggcgctcagcggccaagcctctgggccgacaatgggtgtgcggcggtgtaggctgagcgccctggactgcgtggcgggggatgggggtcagtgaagctgccgtctgagtctgaactccaggtgaagacacctgtcatgctgggaggacagggctcacgggctggcgtcccgctcctgctgtgtgaccttgggcaaatgccgacccctctctgcacctcagtttaccccctttgggaagggcatggcttccatcatttctgagcccatgcccagctctgatatggtgttaggtccccatagaagggggagtcccaaggtagtccctcagcccccagagtcccacctccttgcctgtgagagctgaggccaccgctgagactgcaatccttgccaccccggacactcaccaggactggtctgcctcctccttccaactgcctcatcagggaaaccagggaacgaggtaaagttgagtcagtacagggacctaccgtttgcagagctccctcacatccaagatctccctggaccctcatgacacccctgggaagtaaagtgcacccctacgctcccggtcagcctgatcctggacaagtctagcacgtgagcatttcgtcttcagggccccctccccacccttactcccacccaggctgtcccttgctctccagagggatgcattttgcccattgttcaggaagtttctgtcatatgccccatcctgtgctaggtcctggagacacagatgatttagacacattcctaccttcagaaaataagaataagggaggtatgatagagctgtggtgggtggaggaggtcctggaggaggtgacattgaagccagatagtgaaggatgagtaagaattggccaggcagaaaggaacacgaagggtatcccatgccaaaagaagagcatgtgcaaagacctggaagtgggaaatggagtgatgggtgttttggagggaagagaagctataaatccttgatttgaggagtttcgactttgttctggggcagcagcagagctgccacttggcaaatctaggcagcagcccccacccccacctttcagccgtcacagaggta

SEQ ID NO: 1242162 - DNA, 4001 bp, Homo sapiens
aaagcatgatgtgtggagttcgatttgaaacacggccagggcaggccagtcatttgcctctcccagtttccagctccttagaatgagtctaagagccggcgccctctccaggctgtcatgcaaattacacaaacccaagttgggagtgagtctgactcagggcctggcacacagtgggtgctccaccaagggtgagcctcccagccctctcagcccactgcagacccctcccacatctccctctcttggccctcaagcagccagagcccctagttcacacattttggctgaaggcggcccgcaggctgatctccacaggtggggtcctgccagtttgggcagcagccaccagcctcttcccaggccttacacaggcccttgcacttcccaactgaggccctggagcgtgggcagtcctgtccacagaccctatgctaaatcctgcccctccctgcaacccccaggtaaggctgtgtcccaggaccgtggctgcatgtttgctgtccccctgcccttagtcaggagacagtggtcccacccccaactcctggtcctctaccccgaccagggctccagggctgggacctctcagggctctgacccccagcccccagcagctctcagacagctcatgccctgtcctgggcttgctcctcctgcctgatctttgttcacactattcccaaccacacgtgctctctgtcactctctcccacccccagcttccccaaatcctcccgagctctaaggaccagacacctccaggaagccctccctgacttccccagcttttatctccttccctttcctgaggctcacagcatttctccttgatccctctaacttcatgttgctatccagaggcaaggaccatgtcacctactcatgatgtggcggccaaccccaggcaaatcccactgtgtacctagggaggacaggctcattcagtgaggcgggggaagggcacagagaactcccactgagggagtacaacgcctccgtgaggtaggtatcattatgtccattgtgcatatgggagaaactgagactaggagaaatgaatcacttgcaagaagcaagcagggctgagacaggaaccagcaccaccaaacagtgccgttaagacacagcccacaaatccaggttccacatgcaagacccaccagccctgggcccagcaggttcacctgtgccatcccaactgatcctcaccacccctcagggaggttagtatgccacttgggaggaaaaagaggtccagagagcctgagtcacttgctcaaggccacccagtaagtggcagggctgggacttgaatccaaattatttcagctcccacttggtcagggcagccaatcaggacacctcacctcatcccgcccaccacccctgggatctgcaggacccattctcccctccctggtggcccagactgctggatggtccccaaccccaggcctctggggagtgcctgcgtggctatttgacctttcagaggggccgggctcctacagttctggatatttacacagacggcctcggctgcaatggcgcctggaaagtaggccatgcagaggagggaggggatggcaggtatgggctacaaacactcccgccgccctccatgccgcctggacagaggagccacccgtggcaccatctcctcgaatgaccttggcaactactggggcagcctgtactggggcagagtcaaagcctgggctggccactgaggggaggggcttggccaatgtctccagttcttctttgcttagtgacctggagggccctggaggacagaggatgacaagtcctttcagcaagaacccctctctgcataaagggtcacctcacttcacaaagcctctgcttcctcttctataagaagggtggtggtagctgcctctcagctgctgtgaagatgggaagcacccagccaggcctggcactttcagggcactctgcacactggtcagccccgcaggacctgaggctgagcctctcgtgggacacccgcagacactcagctccaactgggacagacccaagagtctcccaggaaaccagctggatcacactgggtgggggtgcctggctgaaaggcaggtagacacacccaacaaacagcaacaaaaccacccctgtgagagcacagcatagcaggtgtggcatgggcaccagggagctgggatctcagaagccaaaaggacgccgcccccatccagagcgcacggtcgggcctgcgtccactgccgcataccatccttagcaaatcccaattcgcctctcccacctgccccctcctctaccctggcttgaggcgaagagccagaggagcctggcagggtgctcccaggatagctgagtgttaggaagtggtcaggcactgataaaaccgagagccaagcaggacaagaaacacagctgcagggagcctccgggaagtgtgcagaggctaagcacagggtgtgggccagaaggacacaggggtcccggtggagggttcccacgcatgcggctcaggctggggactggagggggcttcagggctgtggggggtgggggtgggaacagtcccctcctctttgccctccccatgccaacctccctgccaaccgctgagcggaaaagcgttccactcctttgccaccccatcccacacgaggccggtgtgcccatcttcagcgtccccacctccttgctggcagtttaggctccactccaaccccagctcagcctttttattattcagaagagcctcttgattgaaaaggcctctaaggcatctcacaaataagaatcctttaattgggaagttgttaacttctcaaagaggaattttaattttgcttcctcaccatctcctctccccagaacctgcagactaaatgcaaaggctaacaaagccaagcaccaggcaacagctgccaacctcccgagacgtggagctgtccaggggcagagacaggagaggcagcctcgtgccaccgcatagaaccccggagccacacagacccctggagccccaccaactgtgagaaggctcctgcctctccccgtgggcatgcctgctccatacccctccttaccaccccaacccacagcgagacacctggagtggaggacggcaggtagctcaaagatgaaggcgatgatagccccgccctgccctgcctgggccaccatgtttgtcgggttctcagagcctaaattcaatgattcagtgattgccccctataaccccctctgcggccctctatcatactcccctggatgggccactcatatttatcaggcatttactatgtgccagacacggctctaagccctttacatgcctcaacctactttatccacgcaaggtagacgttctcattattcccagttggctgacgaagagactgagacccaaaggccttagggaaattgtctaaattcacaccactgatgcgtggcagagctgcgactgagtcccgggagtctggctccagagtggtcataacttcaactaccacctacacctgctgccccacccatggcctcggcactccttgagggccaggaccaggaccacctctgtgtccctggagacagcacagagtctagcatgcagctgagcttaataactatttgcaaagtgaatacatgaaaaaagaacaaaaacaaagcaccttcttattcattctctcctgtgagcctaaccataggcctgtgacaaaaacaggcaggcagactagtccccagttcagtccggtagaccaaggcccagaagtcgaagccactacctgagggcaccctgctaagaggcggcagagctcaggggttcttcctcctaacccagtgatgggaacctgcctttcacccaaaggatacggggattggatcacgacaagtacacaccatgtaccatgttcctgggccccgattaacatcccaggctgaaactggtctcagggaagccctggtcctggccatgaggtaggaacctcctctccatgtcc

SEQ ID NO: 1242163 - DNA, 4001 bp, Homo sapiens
tgggctctgtgcctgccccagcccctggttcccagctgtgtgacacgggcccgagcccccgaccctcttggtccatgtactctgtgggctaccggggcctccctgactgccacagcatcttcctcaaccaggtggtagggcgagaagaagctcctaaccttatttcctcatttctagcagcaagagaggctggggctgggctggggtggagggaactggggaaaccgacaaggcctcagtctgtgtctggggcagagtgtggacctgcctgagtggcacagcagccaaagtcctccataaatgaggagcttgtccaggcagggcggagggtccagagagaactggggcctccgggagggggccagttgactgggcaggcagtcaactctccctcccaggggcacctcctgggacgtcctcctcactgcctctttgagagtgaggccaggtttgcctgagcccctctgggcagtgacaggactgagcggctccccaggcctggggtggctgggtggtggagtgaggaaccccacaaagtctcctgccagcaccagcaccaagacacttctactcggggcttctgggaccccatctccattcggtccctttaggagaagggatggtggtcaactgagtgcccctcctccatgtaagatcatcccccgcctccaccctcacaggcagatcagagccacacagtgccacgaaacccaaacgcctcccaggtcaggctggcatggacatgaggacggggaggtcacgggagacacacgggggcagccaccacgcagcactcggctcctgccggcatatgcttgctgggcctctgacttttcaagagactccagaagccagattttgataagaaacctctcaatcttccaacaatctgtgggctgaggtttttgccacactctgtggctagaacacatacacacacacatgctctcatacatatgtgtactcacattcacgcacatatatacaatctcattcacacactcacattcacacactcacacatacacaaactcacattcacacacacacgcacactcacacgctttcatacacacatatgtactcacacacacacagactggcacttatacacatgtgcatgcatacacacacatacacacacacacacaactatgagacagattctgcctctgagccaccacttgtgacctctaacttaggcaaagagaggaactgaggctggggacagtgaagctatgctcaaagctcttgttcccttccactcagtctccctggcagtgaagcccctgcctcaccacccctcctgctgacttgcatccacctcttctagcacacacaccaccacccccttggcttcaccaaggacccctgctcctaccaccagccccaccccacccctccactccaataccgatcctggccctgacacctcagtcccccacatgtaatttttcttaattgggagctcgttaattatctccatgctgtccagaggaaataaacagcaattagaggagtaaacggcgtttttattctgcagccgactctgccaagcagtgccccggcctgtcccgccccaatggccagtcccgccgcccgccaggtccacgcacctgcccctctgcctgcatccgcccccacgtgtgtgagcgcagtgcctgccaccaggccacccggcagcaggtcgccttttggaatctgcatgaagaaccataaattgttgagaaagggcctccttccccatgcaacagaaggttagagtgtttaaagagagcagtggaactgtttttattaatcagaactgctgtaaagaaagcattttaattaacataattatcccgattgagaaaagcagtccttaccccatagatacttttcagactaaagatgtaagctgtcacaatcagtcataattaagtcaagcaagctatttttttttttcttgagctcccttcccctctcgggcacccgctcctccttgggttagatctcagagtggagaccaggcagacgtgacaacgtccgcgtgctcctgtgctcacaccccagctgcctcttcagctgccttccagacagggaaggccccaggcctggggcccagcaccatgactccctccacagctggctcagcaaagcctccccgcctccctcatccctccacccacggctgaaggactgtccctcccagacaccttccgggactctcctgggtcagcaggcctggagaggatacaggggaacaacagagagccagagggcagcctgaccaataccatggtctgagccaccgcccctcctgcctcaatgctcacattcacccctacccactccccagtccactcctgactcaaagccaaggtcgtttcctcctgtgacagccagaaatctgtccataccacaaatccaagtgtctaaccctcccgccccagtcaccccgcttcatggccctcgtgagacccggccctaaccccctccagccatacctccccaagctcactccactctagccacactggcctttcagaatcccctggagcctctgccacagggccttggtatgtgctcttccctttgcctgctgcccctcttcccccagccactgcctcccaccctctcggctcacacattcatcctgcagtgctcagccctggtgtcacctcctcccaaagcccttccctgcctccccgacctggtgggtctcctcttaaataccctgacagcaccccacatctgccccttggtggtagatacaccgcagcttcacgacattgttggcattctttatttgtcacctccattcaactacagaagctccatgaagaacccggtttgattgactgtgttttttatttgtttactattgtatccccagtgcctaccacagtgcttggctcctggtccaggcctgccctaagtctgagaaagtctgttttgaggtgggatgagaaggggcagaggaagacaggagcacctcctgcatagcgttggccttgggcttggggaccaggcttggggcagctctcaggatgtatgacctcgcaacttcatcctcccaccccgggcctcagcttctccatctgaaatgggcagcctggagcaggtaacttcccctgccccctaattatgcccctatccaccccaacctctaacatgaccccccaaagcgtgacctccctcttcccgctgcagagccagaaatgctgacaaatccacttgctcatcaagtacctgctcaccttccgaggctgcctggtggggggtgaggctgggtgcttgatgctcccacccctctctgcacctgcagggtgacatgtgtgtaggtgacaccacggacatatttcaccccgacatgctgcagtttcctccctgaaaaggtgcttattttttagtatatcttaaataggagcctgcaaaatgtgttgtcagcttttaaatggcccggtaaagctcagcacaccggccagggaagacagctcactcgcagcccgtctctgagtacataacctggctgagcctctgggctggactctgggtttatcaggaggcccaggaactagactgtcccccaacaaaaatatgccaggagctccttgccctagggccacagggcgtggcaaccctctggagatggcaggaggcaagctggggccctgcctggcagaggaaagaggaatgagcactggctttagagtcaagtggcccaggttcaaatccccacttggccactcacaagctatgtgaactcaggccagtgactaatcctctctgggcctcaagtttcctcatctataaaatggcgatgctaactcctacctcaaggcaatttttaagagtgatgcaggaagtggatactgtgccaggtaacatttaatttttaaggtgtggtaatggtatcacggttctgtcttttaaagggtcctcatcttttagagatatgcgctgaaatatttatggaaaaaattatacaacatcaaaataacctggtggtggtggagagt

SEQ ID NO: 1242164 - DNA, 4001 bp, Homo sapiens
agtgcccccaccgcccagctggcagaggagggcccctgtggtggggacaggcaagtgccaagcaccctcccaagaccaagaaggtgaggtggcaggggctggcaaagcctcggggagccaccctgtcctgggcactgccacgctcggaaagccctgacttggagctaattttttacttcttctcaggctgaacaacgggatattctggatcctctcaggcacaatggtgccaaggggctgagctgttcccaggcttgcagggtggctgaggccttctgggctgtgtgtcctaggggagagtcagccactgactccagacacagccccaggtgaagaccaccacggtcacaatggaggtgaggggcccactgatgcctgaaatcccaccagtcattcaccctgtggggcaaagcactgctcttctcaaatgcaagctgagatgggggccaacagctctgggtcccaccctggcttggagtgctgccagctgtgtggcccggggtgggccgcactttacctttctaagctttggatcccttgtctgtaagatggggataataacatataaatcccattgttgtcacaactaagatcctgatatcctcaccatctccccttgatgtcccataaacacctcatcgttcctcgtccccaaaccactccttctccagggctcctgcctcagcaaacatctccaccatcaacccagctgcccaaaccagaaacctcgcctccctgtgatatccccacccaacccggcacctgtcctgggccaggcccaccacggcctgccagaccccctggagtggcccaccttactcttctgtgtccctgtgtccctctgctcttcatccagcagccagggcagcactgttgaaccctaagttagattaggtcccttccctgcttaaaaccctccagcaacttcctctttctcttagaccaaaacccacccaccctcctcactattggcctcaggctctgtctgacccagccctgaccacctacccagccccacctcctctggttctcttcctgttaccccacaagtttccttccagctcctgaacacaccaaggttctccaggacatggaatgctcttcctgctccttgcacacagctccttcttatccatctgataatgggataagacgcctcctcagagaagccctcccagactgcccagtctcagtatgccagaagcccatcctgaccccaagaagaactgtgagcctcactcggaaaggggccatggctgccttgctcactgtatgcctagcccctagcacagagcccagaacatagcaggtcctcaagaagcaggaatccctgctgaggagcagaccagagactctaccctctctgcttccccagccagatccagaagctatagccagagtcccagaggagatgctggcaggagagacacatgggtaggcatggttctgcctccgtgggcaatgcccatggctgtggctgtgccaggatgccacacggattccctgtagaagacagtacagctagggactgagcagagaaggacctgcaactactgagaccatgccagcagctgggtgttctcgaaacaaattgcctcagcaggtggcaggctgcaggctgcaggcagggatgctggaggggaacaggatgtgccatgtcttctgatgctccaggagagagagagggagaagaaagagggagaaatggtggggaggaggaggagaagtccaaatggaagtctgctccaccccacattaggcagagaggagaaagaaaagggtctccacggtcaagctcccctggaaagtagaagcaatgtaggttcacttcctgctacatgcccaatgatgggcacctgaggcctgtggccacagaccctactcaccatgactcttgaagcacaaatgatcccaaccattctgcagatgagaaaacagctcagaatggccacatggcttgcccaaggtggcaccgccagcaagagatggagcttaaaatcaggtcagaactggggcaccagggattttagccagacatcaagaaaatcccctaaacaggtcagggaaaaaccctggtcccaggaagggctacggttccccagaggctgctgggcaaaaggactggacaagtggctgagggcaggaggctgaacctattggcctccagagtcccacccagctgtgacgttctgcaaccactgggcaagctccagcagcctccaggagggcagactcaggaagaggctgggcagcccttgagaacccctggggaaggctctgaccatcagggtttgccaggatgccaggcaggagcacaggcaccaatccaaggtggttctattctctgtgggaggtcttgaccttctagggccaccaacagagacatgggtgaccacgggtcccagaagaaaaggggctggaaaggatgagatgagagaaagaaagagctctctcctatggccaaaccagccagcggggaaccctgtcccacagttttgacaggcaccaggcaccagcttgcccagaatttctgtcttgcacaaggtaattacagttcttcctgtgtaatgagatggtttttaaaggacattcaaaagaaatttcctataatgaggtgaatgggtttatagtgttagacatcaaggaagctggtaattgttgggacccaggctgagtcctggagtgaagcgacgagtttccacatataaaaggcaagaagagcaggagggtggatggcaagccctgggaaggaggacagacactttaccagaaaagtttctgtgacaccagcagcccagtgtgccctgaagagcagagtggggaatcgggaggctggaaccctgttggggcagaggaaactgatggagctggggctggtcaggagcaagggaaaacccacaggggtgaagccacagggtggaagtctgggcccagaaggaaaacgaaggtactaggttgaatagtgtccccccaaattcatgtccatctggaacctcagaatgtgaccttatttggaaatagggtctttgcagaggtaattagttacaaggaggtcatactggaatagggtgggtcctgatccaacgactgatgttcttatacaagaagtcaacttggccgggcgcggtggctcatgcctgtaatcccagcactttgggactttgggaggccaaggcaggcagatcacctgaggtcaagagttcgagaccagcctggccaacatggtgaaaccgtctccaatacaaaaattagccagatgtggtggtgggcacctgtaatcccagctactcgggagattactgggttcaaggcagaagaattgcttgaacccaggaggcggaggttgcagtgagcagagatcgtaccactgcactccaccctgggtgacagagcgagactgtctcaacaaaaacaacaaagaggtcaacttggacgtagacacactcaggggaggaggccacatgaagatggaggcagaggctggagtgatgcatcttcaagccaaggaatgccagcaacaccaggagccagaagaggccaggaatatcctctcctagagccctgagagagagcacggccctgcaccttgatctcagacttccagtctccagagctgtgagagagtaatttctattgttttaaaccaccaggtttatagtaatttgttacgggagctctaaaaaactaatacaataattgttctaacaactgcaactatctggccatggaaaatggccttaaaatggggtgagcctcccatctccagaggtgtgcgagcaaagctggagcatccccagtgcccccagtactctggacagctcccaaggcaggttcagttagtcttccatttgacctcactgtatgcagggagccatacagacagggtcatcattcccgtcccaccgatttggaaactgaggccaagaacctgctcaagagcacaaagtggccagtcagggacagcggcaggcctggaatcccagcatcctgaccgccagttt

SEQ ID NO: 1242165 - DNA, 4001 bp, Homo sapiens
cgcaggaatctccccactccacccaggcttccatccagctgccaagactcccatccctggaggttagaggcactctttgccctctgccccaaaacttgagagggggtctcagcctagaagatttcctccctggttacacaggccctgatcctccactctgtccccctttacccctggtggttttgccacagccccttaagttggtcccttcaaattagaccagtaccaaatactaggctttgcccagaaatgaaataaagtagggtccctcccacgaggcgtcgttcttaccccacacctacagctgctgtgggccaggggcaaccagagcccacctgaccaccttctgaccaccttcccctttcctaccagacaggcagagagggcacctgggcaggtaggagtgtcaggaggtggggtctccccggggggcctgggattgccaggtggggaagctgccacccactggcactacatcatacactgaacactcgggataatcttttttttttaatttttgaccagcagtttgccctgacagaccccaggatagtcttgagggccaagtgggagcatctcacttttcaggtgaggcagtgaaagctgggagagattaaagaacttgtccaaattgaaaatattaaatggaaagaaacagcttgtaagtgctggagccagaatttgaacccagggccgactgattccaaaggtccggtgctgtcccctgctccctgctgcctcgtggaagtgccaggcagttcgaagaggcagcccggtgagcagatggggtgggcagggggtggcagagagaggcagcagttatggggtgggagggagaaggcgacacaaagaaaggataaagagagcagcagagacagctgaatggacatgggaaccctgcaggggccagaagaaggcagctctggaagccaccctcctgatcaacgcaaggcccgcaaggccaccctggtgccatctgcccctcagatctagccactagtgttccctgggctcatccccagatgcccaggcccaaggagcccccaatcattgagagtgctccccaatcattaaaggcatcccccactcgttgaaggccccaggtcaggccctgtgggccagctctggggcagggaaatgggttgagggagtagaggggccagctctggccctgggcaaggccatctgcccagcctccccctgccccagcctggctggagtgtccagccacccaggctgcccaccatgccggccgatctgtggctgagctctgggccagccaggtgttcccgaggccggctggcagcccagcaccatcagcctgtccccagagcatgcaaggtttaagcaacagcctttccactgaacattttagaagaaaaatatctttttttttttttttttcaagagagagaaacggagggaggaggaaactggcaagggaggaggagggaaggaggaagggagaaacctaccccatcattgcagtcaaggtcacaggcaccggcacagggcgggctgggcaaggagcctttaatctgggagttcaggctgaggaaactacacgcttgaagccggagtacattactgccctgaatgatctgtcggcttctattaggctaaatatctctgtataatggggaattatcctctgaagaggcaaactgccggcctctccagggagggggcggtgggaacctcgcatcgtgagggctctcccacggtggggaggggggagcaggaccgactcagaaagccaaccccgtcccacacccccaccctggagagtcacagccagcagctgctttgatgtttgtggcgggtgcccgcctcccttccctccaccccggactctcctcttactccctccataagagcctggaatgatgccagacctgggtggaggcctgacaaggccactggtcagccaggtgaccccgggcaagtccctgagcctcttggaatctccgtcttcctgtctcttagatggagctaataatacccgcccgaaggctggctgtgccgggggtgagcgcgaagctggcatggagcccagcacagagtggacagcctgctctgcccaccgcggagggcccccctatcctcctcatcctcactggctcacccagggcaccaccacctcctccaggaaaccctccctgccccctatctctgggtgtctcacaccctgggcacctacagccagaaccccacctccgggccctccgtttccagtggctgagtaggagcttcagttttaggagactcccctgagcagaaccgacccctcttcatcttcccaacccccacccacacactcaggactgggtaccggggcctgccccaatttgcaggcttagagtcaggggttagggtggcaccacaggcatgggcggggcccacagatgggtgacactcatgggaaggtggtcagcaccagggcagccgggccaggaagccagaaatcccaggacaggggtctgcgagagcagggtaatagctggaccatcagcaggactggctaaggcacaaggcagggcttggggccaggtcagaggagcagagaggagggcaggagcttaaggctgccgtgagctgtgatcatgccactgcactccagcctgggcaatagagccggggctcagtgccaggttcctggtgcagggctgtgtaggggctggagcagctcaggccaggaaaggtcttcggggtcaggcgggggcagaactgacctgtacgtgtgtcagatgatggtggcagggtggggatcagggcacaaggtgacaaggttctgcagaccccaggctctgttctcagggctcctatgccaccctcaacctgtagtaaatccctggaatggttcaaaaccccttgctgcagatgcagccactgctgttgcagggcctgcgggtggggacaattccagggtaagacgcctagagcccagtaggacacacagaaaggaggccaactccaggacaggtcagaggcatgctgtgttacccactcccctcagtaggcccaaaggtccagcccagagttcccacagcctgggggagctgccagttcactcattcattcactcattcattcactcattcattcagcaaatgccctctaatgctttctgtgaattaagggtacaaacaccctgagcagggtgtggggtggagcacaggaaggtgagagatgacaactcgggtgctgtgtgaaagcgggagcctgaggggctgtggaaacagggtagtgggcatctgatccagggctgcggtttgggaaaggcttccgggatgaaaggatctttgaaggggtattaaaggaaaacgagttgggcttggaagcagtggggaagggcaccgcagactgcaccagtgacaaggcccagtgtctggagagggagaaagccccctccttcaggcagggcctagtaggcaccaagagggatggagctctcatcctaggagccagcaggagcttgaagttctaagtggggagtacccagagtctggattcgtgcttcagaaagatcattgcagccgccacctgggggaggatggatttcaggcaggcggaaggacaggaggaagtgagttaggaatgaggcagtggccaggggagaggtggggtacagcaatatagaggagggcggatgagggagggttctgggaggcagaaactgcaaagtgaggacggcagttacaatccacagtgccagcgtcccactgagcatcccccacgccttctgtccaaacagcatctttaactctgtaaaaaatccattagttactttgatctgcacaacactcaggtgaggcagccaggccaggaattcactgcttacttagttcattaattcaacaagcatgtgttgagtgcctactacgttccaggcaccattctggcccacccaacagaaggaaaaactaagactcacagacgctgcccaagttctacaggagtgaccaggacctactactggtttgggaaccccgatgccccgt

SEQ ID NO: 1242166 - DNA, 4001 bp, Homo sapiens
gggctagattgcacggactgaagcgggtgttacagagagtcaagggaaggcaaggtaacgtccagcataatagttattattattattaggacttcacagatcacagaacgctcccaccgattctctacctggatctgcagcccacactgtgaggcagatagggcagcatgatcagcccagtctaacagatgaggaaacaggcccagagagggagtgggatcagcccagggttccacagcacatcagcctcagattctccgtggcctcacaccctctgtggcctcacacctagggaccttctcctccctcatccccagtagtcaccccaccacccctgccctggaagacgcaggaatctccccactccacccaggcttccatccagctgccaagactcccatccctggaggttagaggcactctttgccctctgccccaaaacttgagagggggtctcagcctagaagatttcctccctggttacacaggccctgatcctccactctgtccccctttacccctggtggttttgccacagccccttaagttggtcccttcaaattagaccagtaccaaatactaggctttgcccagaaatgaaataaagtagggtccctcccacgaggcgtcgttcttaccccacacctacagctgctgtgggccaggggcaaccagagcccacctgaccaccttctgaccaccttcccctttcctaccagacaggcagagagggcacctgggcaggtaggagtgtcaggaggtggggtctccccggggggcctgggattgccaggtggggaagctgccacccactggcactacatcatacactgaacactcgggataatcttttttttttaatttttgaccagcagtttgccctgacagaccccaggatagtcttgagggccaagtgggagcatctcacttttcaggtgaggcagtgaaagctgggagagattaaagaacttgtccaaattgaaaatattaaatggaaagaaacagcttgtaagtgctggagccagaatttgaacccagggccgactgattccaaaggtccggtgctgtcccctgctccctgctgcctcgtggaagtgccaggcagttcgaagaggcagcccggtgagcagatggggtgggcagggggtggcagagagaggcagcagttatggggtgggagggagaaggcgacacaaagaaaggataaagagagcagcagagacagctgaatggacatgggaaccctgcaggggccagaagaaggcagctctggaagccaccctcctgatcaacgcaaggcccgcaaggccaccctggtgccatctgcccctcagatctagccactagtgttccctgggctcatccccagatgcccaggcccaaggagcccccaatcattgagagtgctccccaatcattaaaggcatcccccactcgttgaaggccccaggtcaggccctgtgggccagctctggggcagggaaatgggttgagggagtagaggggccagctctggccctgggcaaggccatctgcccagcctccccctgccccagcctggctggagtgtccagccacccaggctgcccaccatgccggccgatctgtggctgagctctgggccagccaggtgttcccgaggccggctggcagcccagcaccatcagcctgtccccagagcatgcaaggtttaagcaacagcctttccactgaacattttagaagaaaaatatctttttttttttttttttcaagagagagaaacggagggaggaggaaactggcaagggaggaggagggaaggaggaagggagaaacctaccccatcattgcagtcaaggtcacaggcaccggcacagggcgggctgggcaaggagcctttaatctgggagttcaggctgaggaaactacacgcttgaagccggagtacattactgccctgaatgatctgtcggcttctattaggctaaatatctctgtataatggggaattatcctctgaagaggcaaactgccggcctctccagggagggggcggtgggaacctcgcatcgtgagggctctcccacggtggggaggggggagcaggaccgactcagaaagccaaccccgtcccacacccccaccctggagagtcacagccagcagctgctttgatgtttgtggcgggtgcccgcctcccttccctccaccccggactctcctcttactccctccataagagcctggaatgatgccagacctgggtggaggcctgacaaggccactggtcagccaggtgaccccgggcaagtccctgagcctcttggaatctccgtcttcctgtctcttagatggagctaataatacccgcccgaaggctggctgtgccgggggtgagcgcgaagctggcatggagcccagcacagagtggacagcctgctctgcccaccgcggagggcccccctatcctcctcatcctcactggctcacccagggcaccaccacctcctccaggaaaccctccctgccccctatctctgggtgtctcacaccctgggcacctacagccagaaccccacctccgggccctccgtttccagtggctgagtaggagcttcagttttaggagactcccctgagcagaaccgacccctcttcatcttcccaacccccacccacacactcaggactgggtaccggggcctgccccaatttgcaggcttagagtcaggggttagggtggcaccacaggcatgggcggggcccacagatgggtgacactcatgggaaggtggtcagcaccagggcagccgggccaggaagccagaaatcccaggacaggggtctgcgagagcagggtaatagctggaccatcagcaggactggctaaggcacaaggcagggcttggggccaggtcagaggagcagagaggagggcaggagcttaaggctgccgtgagctgtgatcatgccactgcactccagcctgggcaatagagccggggctcagtgccaggttcctggtgcagggctgtgtaggggctggagcagctcaggccaggaaaggtcttcggggtcaggcgggggcagaactgacctgtacgtgtgtcagatgatggtggcagggtggggatcagggcacaaggtgacaaggttctgcagaccccaggctctgttctcagggctcctatgccaccctcaacctgtagtaaatccctggaatggttcaaaaccccttgctgcagatgcagccactgctgttgcagggcctgcgggtggggacaattccagggtaagacgcctagagcccagtaggacacacagaaaggaggccaactccaggacaggtcagaggcatgctgtgttacccactcccctcagtaggcccaaaggtccagcccagagttcccacagcctgggggagctgccagttcactcattcattcactcattcattcactcattcattcagcaaatgccctctaatgctttctgtgaattaagggtacaaacaccctgagcagggtgtggggtggagcacaggaaggtgagagatgacaactcgggtgctgtgtgaaagcgggagcctgaggggctgtggaaacagggtagtgggcatctgatccagggctgcggtttgggaaaggcttccgggatgaaaggatctttgaaggggtattaaaggaaaacgagttgggcttggaagcagtggggaagggcaccgcagactgcaccagtgacaaggcccagtgtctggagagggagaaagccccctccttcaggcagggcctagtaggcaccaagagggatggagctctcatcctaggagccagcaggagcttgaagttctaagtggggagtacccagagtctggattcgtgcttcagaaagatcattgcagccgccacctgggggaggatggatttcaggcaggcggaaggacaggaggaagtgagttaggaatgaggcagtggccaggggagaggtggggtacagcaatatagaggagggcggatgag

SEQ ID NO: 1242167 - DNA, 4001 bp, Homo sapiens
atgaagatgagcccagatgaaagaggactatcgcaaggggtaagtctctccacctccctcccagtcacacagggcccttggctttgagcacatgcccatccccctaaaagctggttcccactctttaactccagaacctggggaacactgcagctttaactaagccctacccaggggctcacacttaaattgtcagggggtgaggaggggggcagagacaagaacaccacagggtgcctgtccctgccttcgctaagccccttccaggaggggcagctgggtgctgctgggatccccgatgtgagtctgtgccctctttcagcacggttccaaggagttattggtctctccccggtgccaccctataccctccctcccacctcgggccacgggtagaaagcaggaaggacaggcatgccatcccagtagacctgctgctagtgccttcccagaggcgtgaggattttgagctcctccctggcttatacaaggacaaagggtctgggagcagctggccctcttctcctcactgacactctgcgctggatctggggaagccccaggctctctgccgcctgggtgtcccggctcattgctccctgggcatgggaggcaccagtgctgaagccactggcataatgaccaacagggttgagcccagagccgcgggccaggctgggctatgcgccctctggctgcccaaaccaagcagaggactgagggagggctgggcgagcaggaaggggctgtccagatgccacagcccctacctcagggcctcctgcactcccacccgctcagggcagagctcttcccatcctctcaggcccccttctgccccaccccaaccccaaggcctctgagaacaaagaggaggtgcaggcacagtcaggctggaccaggctgggctgcgaccccagcaggaaccgggaggggctgcccactggcctggccccacccctccttctcaaagtgggatccgcccggagggtcacatctcctggcatgccttgagagcagagagcccacagcccaccccgaaaagggtgtgagggggagcaggaggctccctccttacctccctcttctcagctggttcccacctcccacccgctctgccttagaatgaaaagtggggcaagaggaggtgagaagcccgggctgaacgcagacaaaggggaggcccctaaagcgttcctgggcgctcccggtccccaactcccttccttccactctccctactccccatctccttttcactgggcaggagctggaaaggggcgatgcttgtgtgtggtggggagctgccatccaggctggagcttgtggagaaacccagcccctgacctgtgtccaccagctagggagtgtctggtgctggtgggggctgcctgggggtacctggggtccacgaagggaggtacccacccagggctgagcagggggcttaccctctagagtgaccaatactcagaatgggaggggggacaggaaggggagaccagagcaggtctgggacacccgtgggggcccctccccagctccaggctcccagcttacaaacccggaatttgttggggttggagagaggggaggtggaaaaggaagaattttcatttctgaggcttgaggggaaatcaggcctatgaccccaaaggaggtctgggtggcaccgaggtgccctgcaaccccaggagggcgcagccagggccgatggcggcccccaggggcactcgccgcggggctgcccgctcggggctcggccgcggccgcctggctcacctgcatctcgggcgcgccttcggtccgctcggctcggtcaccaatcgcatgtctctccagccggcccgaccaggccccagcccctgcccagccccctcctccgtttcctcctcctccgacacctccgcccggcagtccgcgcgccctcgcggggctggctgtccgtctgtccgccccgcgcgggcgggagccgagccggagccggggccggggctcgggagtggggaggcgggaggccgcggccccggcgggcggatgggcgggcgcgctcaggccgcgggacaggggctgcgcgagcctgcttctgccccctgggccggcccggagccgccgccgccgcctctgccgctggggccggggtcgaggccgggcgcgctccgccgcggggccggggccggcgggcagcggccgcgcatgctgctcggcgccccgcgtcgggagaggggccggagcggcgcgggtggggactccgcgccctccggggccgggaccaggacccaccgccgccgccgccgcctgcgctgtcgcccgccgcccgctccggctcccgcgccggctcccgctcgggctccgcgctctgcagcggcgcggggagggagcactaggagcgagccagggagggaggagggatcgagggaggagggagcgagtgagccgcgggagccgggcgggggaggagaaggcgcggccgcaaaacctggtgatggtggtggtggggtggggggtggttcgtctcctttcagcggagggggcggagagcgaggggcgccccagccgctgccctgcacgcttagggcagcgaaacaggcaggggtgcgcaggcgaggggcgcaccagccaggcgctccagctctgcacacggccgcgcccctccgggtccggggctctgggcgagtcccgggccagccgggtgtcggggagtccggcgtgcggtcctccctgggtgtatgcgcgcacaccgttgtgtgtgatttttgtgttgccacatgcgtgtgcatgtgagcgcgcgagtgtgtttacacgtgttaactgggctgtggacgaacacacgcacgaggacggacagggctccctacacgaacagggttgtttggagggcggcatggggaggccgaccgggagcccccgtcctggccctgtcccctcctctcgaaagtccgcgaggctagagggcccacattctagcgcgggagggcgaggcaggcagaatgggaagctccaggggacggcgaggaagccgcgctggcccggcagctctacccaggagccggggtccccgcccagcctggcttcctgtccagcagagggcggcaggcctctctggcccgctccgtccggaggccctgcacccagtggccagcagagggcagcgcagagcctccgcctgggcttgactgttccctcctcccggaatggtcccggggatcctcggctggggccacaacttcagacgggcccaaggaatgggacctctcctcggagatccagatcctccttgatcctcagatacagaaactaggccagcagggatgtcttggcaaagcctgcagagtaggttaccaccctcaggacctcacctttttccctatactaccccctccatctccttgaagccagacgccctttaccaccaagccagttttattagaataaccatcaatgctgacaccgcccggcacggccatccctcctcccctgctgggaacaacccattagcacatgaatactcctaatagcttgagtccacaggggcagctgaggctgggggaggggatctagcccaaagcctctcggattctggggcagacgctggaatcccagttccagtgacaccccctctcccaggaagcctgcgcaacatcattgcagagatgcctggttgccacggagggacctctccccacccccaacagcaccttgtttctcgctgttcagcctcacacacagcccaaaggcttgcacagaccttctgttccagctgcaccatttctgggtacttctcagtctctctggcacaccgttgctctggacagtcctgtctggagcactttctcctgtctcctatgtctatgcccatcctcaacctaggcctagctagagtccctcctagcaggcgtccatgctatgctctactgtgaactgtacgttcaccctccagcaactctgggggaggcactattgttcccctgtgacagagggagggaagcccaggcccagag

SEQ ID NO: 1242168 - DNA, 4001 bp, Homo sapiens
catttcaaagttaaactttcctcacagagaccaaatggaggagagacttctttatcatgctggctcaggtaaatcaggcctccttgactccttgctgtgtatcttctggattttttgacaactggcccatttctaagttgtttgattatgtgacacctagcaccagcaactccattctgatttggcctggtctgttgggcctagtgcaggggtttaatctaaaacaatggcttcctatacatttcatttaacaatactaataaaataccgcttttattttatttgtttacattggagtcctgctgttaagcaaaaaaaaaaaaaaaaaaaacagggagaaatcatggtagaatcgaaagaccgaaagctactaaaaattgatagcatttaatagtcctgaataagttgtttctaattataattcagctactaatttcaagaagaaatggaaatttagaaagttgaaattatgaaatatgattgctgggaagtataatgggacaaaaattaaaaagctgaatctatcttcactgccactactgcacttctactctggacaactgcaaccgatcccttccaaagtggttgtatccaggcccaccctacacccacttccttctgaaaaaccaatccactttccttaggatacagtccaaactcctaaacaaggcttaccaaggcccttcaagatctgactctcggcgtcttctcatctctatgccccactccccagtctcattaccagtcattttcctaccactctgcttcagctaccctagccttctttctggcagttcctgtaaacagcaaagcatattctagcatcagaggctttgcatttctaattctctctgctggcaaaattctctccctagatcttggcatggctggctctttgtcattcagatccctgctcaaatgtcacttcctcagagacctttcctatctgtcttagtccgtttcctgttgcttataaaataattcctaaaactcggtaatttataaagaaaagtaatttattgtctagttttggaggctgggaagtctaagactgacggaccacgagacagcaccgcaaagtatcacgtggccagggggctgagcaggctcacgagttgtcaagtctctccttaaaaagccaccagttctacctccgtgataacccattaatccatgaatagatcaatccactcgtgaagacagaaccctcacggtccaaccacctcttaaagactctacctctcagtactgccacattggggattaaatttcaacatgagttttgaaggggacagatattcacaccatagcactacctatctaatacagcccatcacgtcctggtcaaaatcgattccaccattctgcttgattttcctcatataacccatccctatctgataattttgtgtttgtttccccgaaatcactatcttgttcactgttgtctccccagggactagaacagtggccagtaaacacttgctaatgaataaagtgcttaacaaacgtgtcttgatcagtctatctcgcgttttccccacgacccctctccattcattcacaggaacccgccaacgttgctatcctttcaggaaggtccttggatcgtcatcgctatcccaaagagagtccgttctcccacttcaggcgaggcattgccagcctggaagctaacggggtctcaaggaccgacagccgcgccaagaccgggcacttgcgtctgacaagcgctgaacaggggcggagaaacaaggcacccctctactcgcttcctggagcctgccgccctcccaaccttaagccctgaaccaggctctcatttggccgcactcgtgcctcccctgctgccagcacggcggccggtcccggttacctgcctgggatctggctcaggcgaactctcttcacaccgccatttgagggaacacaaatgcccgctctgggccaccgtagttcacagaaagtacaagctggcacctcctcccgcatgcgcagagaccgccttcggcgaatagtgtctcttagcaacggctttgagtccctccgccaggggcggagcctcggaagccaccacggggaagctgtaaggggaagtgagtgagaccaatcggagacgaatctctgccccgttcggcacgcctcccttaactgtcgcgaatgcaaaggcaactttacggcaggcagagggtgggggctgccgggggtaaggaggagagaaggaagcaaccaaccaaccaagtcgtccctactccctccacccccacccatcccggacctggtttacggctccaggctcaggctccactgcgggcgctgattggttgttgaaggcttggtcccatcccagtgaccccaaagtgctgaagggagggggcgggggtggcccagtgcaaagtgcatcccgaaagccccctgtccggagaccccacggctggcacttcgggccccgtatgacctgggacctcgccgtcccgagacctcctgggtccctccgtagctggaagcctccggcccggagcgcggcagccccctgctccgagccctggaccgggactgcccccccacccgagccaggacttcctccctgcctccctgcacctctgccccaaggctgcccggcggccgggatcgccacctcctgccttctcggctgttcggatgttcgccgggctggggccgtgaggcaccgaggaggatcaggaacaccagggtccggccctgcctggggtatttcttcaatggagaagttggtgagtgtagaggaggctgaaaggaggaagagaagcagcagctgaggagacaggtaaagtcctttacttcccccgaggggaagagtgctggctgggagggtaggagggaggaaaatctctgctttttcttgcctgcccttgccactctccagcccctttcctgagctcccccctccccacctctgagacactacaccactcactggtttctgtttttctaggtttgagctggctgaagaagacgcgaaagcaggaagaggtctgcccacctatcagagaagcagaaggcacagtgcctctgaccagcatcgtctgtaaaggtaatgagccagccctcccctcccccgttgtttattcctggcccctacctcattaagcagtggtttattttcagggtggttgcctgggaatgcaacctttcctaccccccccacccccacccccagtttcccaggaaaaacaaaaacattacccgtgcctgatacttaacattttataacttctctacccaggacagtattttcccactttctttctgtacagtgtgtttctgtgtttttcattatcttttggtacactgtgccatttactctgctctgaggctttgagacctttttgtagctaccctcccttccttactctcataggaattcctcaattccttgttaattgcttgttaattctgaatgactttcctttttaattaaaccacaatttactgttttcccccttactctttcctatcacctttcttctacctgcatcagaaaaatcttttgagttatctaactgacaacgatttggtagagaaaggtaaattattggcctgagatttatgagtttcagaaaatagtttgattttatttcctactagaaagccaacctgtgtaccttaagagtgtgaatggtatgaagacaacattattaccctgaagcacttaggcataattaactctttgggctttctgtgtgtttgtgtgtgacaaatgtggatgggctttgaaacttataaagatacaatgtttcttacacctcagattttctaggagaacttttaaaaatttgcacaatatcttattaatcgtttgactcaggaatttaaaaacaaaggaaccttttggtgtgtttacatatctgggtcttaattttagcactctataaaaaagatttctcattttaaaacttttacgtagagtttgctggattgaaatttaagcatctaattcatgtgatcacatttctgctgcc

SEQ ID NO: 1242169 - DNA, 4001 bp, Homo sapiens
cacaggacaccggcttccctgcggtttccccagaaagacatcataccagccacatgcacacagattgggctcactcattgcagaaagaattctgccaagagattctgcttccaagagaacaagaggcctcctgacttggatcctcttttctgaggaaccctcttgctaatagtggccacttctctcagcatttgcacaaactaggccccggggaaagaagcaggctgatcaggacaatgagattgctcaaggaaaatctggacaatacccagaagcctgggggaggccatccctcccttcaacctctatctcagcactgacagcttccaattcccatggctccattgcaaaaacagtcctggccaatccacagtagaatggataaaggaagtgtggcatggtcccgcagtggaatgctacagcagtgagaatgaatgagcctcaactccacgaaactgcatggttgactttcacaaacataatgtcgaacgaaagaagccagacgcaaaagagcaactgatgtgtttctattaatgaaaaatctccccaaaggaaaaaatcatatatgttaaggctcaaggggcacacaaggaaggctttggggtactggttcagtttgtgagaactcattgaggatttatgatagaggcccttttctagaagtgtgttataaacttcattaaaaagtaaacaaacaaatacaacattccggggcaaagggcaggaaaggccctttagcaaaatcactatgaaccaagggaataaagattaccagcaattttacctgtatggctctaaattattatgtaagggtcatttttggatgtggctttataaatgagatgatgtgtcaaaaataattagtatagtgcttggcacagaaaatacttagtgaatggcaataattaatactgctactcagttattaactggcctatgaagtaaaatagtcaaatacaaaggaacagcctttttcttaaaggggaaaaaagcttctgaaatttttaggtacatcccgttagggaatttctaattctcaaagttgtcggagctctctccaaggctagtcttagagaaaagaaaaatctcagactctaccttagcgttactagctcctgaccagtaaccagtaccaaaacaaattcccaaacacctgtctagtctggccaaattgttcaattaactgatccgtcatttattggtccactgcttagcctggaagctgggctccactctactaccttcctgataaggcatttgatctgtctttcgccatcaatctagtttgtgaatttacaaacaaaacaggcaggacggctgttggattcttcagcctcagactaaaattttggcagcaaaacaaagtctagaaattgtgcaatgatatctctactttagacctgactggaaatagaactctcataaattcccctctcttctgagagaggcaggcaattagacaaccccaacccgacagagcatttcattgcaagcctggctccccggttgcaaattagatgccacattaactctcaggaagatctgaatcgctttcatatcatttgccgctgaataacttttagcatgactgtttccatatcagatacgcaagagacttcactgctagctgcaggcactcttagaagacttttaatccgaggatgattttctaaaatttcatttctgtttacaaacggctacgtgtccctgtgaacctgtgaggtcgtgtatagaaccacctggcacgctctgaagcaagctctgtcccatacagtcagaaacccctggattctttgtgacacacgttttaaaaagaaaagttcatgcccatctctggagaaaagtcaggctcttacctggtttcaggctttgtccaagggcacttgattggataaagatgcataaaaccaacagaatggagaaacacaggggacttgtgtccatttctccgtttcacccggggtccaggctttcttggtaatttctgaagccaaagagaccacaatgcctattagatactttgttagggaagactgcccattaataattaacctctcaacatgttatccactgttcagaccctttctttactgcccccaactgcaaatctaattatatctattttaaaaaggtcgatttacagaagtgcttcttatcctgacacattttgagaataaaataccttgttatgtattcttaccttttggggccaaggtcagagttccaaattaatcaacttaaagctactgtgttgtgtttggaaattctgccaaaggtcggggtaggtggcttccacgtggctgcctaagcctccctgtgacagcgctgcaagggggatgctggctcaggaaagtggtgtttcaaattgcagcctaagcccaaagaaaaagaaaagggccctgccacgcagagagcccccagagggtccaaatttctgttgggttcagtgaaattggtgatgcttgtggtcaaagtgtggtgcagaaaacccttcacccccgtgtcaaaaggagctgacgaagaagcaaagatgcccttgccaagtgacccattgagaggtgatcctagagtaaacacacttcttccccctctgtgttcattaatgttccagctgtgtagaggactgaaaagtaaggccactcagcaaaatcaggtagggaaaaggcgaccatagatggcttttgtgatatttttggacctctagttttactttaactttcttcatttgttcaacatttatatattttggtatgcctactaggtgccaagcactgttgcaggcacgtggggtatacaagtccttatgtatcagtggaggttcttaccttctggagttggataacggacagtagacataataaagaagagatttctggccaggagcggtggctcactcctgtaatcacagcactttgggaggcgaggagggcggatcacgaggtcaggagttcgagaccagcctgaccaacatggtgaaaccccatctgtactaaaaatacaaaagttagctgggcgtggaggtgagtgcctgtaatcccagctactcaggaagctgaggcaggagaatcgcttgaacctgggaggcggaggttgcagtgaactgagatcgcgccattgtactccagcctgggcgacacagagagactccgtctcaaaaaaaaaaaaaaaaaaattaggtagactggtagaatgtaatgggaaccactacaagaaaagcagggggttggggagaaggtagggattttaagcagagtggttagagtgaattgcattgggaagttaaactttcagcaaaggtttgaaggaagtgaaggagttgcccctgtggacgtcttggggaggagagcttcgggcagtctgtgcaaaggccctgaggtaggagtatgcctggtgtgctccaggaatagcaaggaggccaatgaatggggagacattgtaaggactttgacttttatgcattgacacatggggggcgactctgagcagaagggtgatatgatttgtattatagttttaaaatatcactctggtttgcaagtgagccagggtgcagtggggagatctgttagaaggctattacagtggcccagtgagaggtgatggtggcgtggcccagcatggtaaagggcaactgcggagtggtggatgggtggtggatatattttgaaggtagagcccacaggattttctgactgctgagttgtgagatgtgggagaaagagaggagttaaggatgacttccaggttttttggcttgaacaagcagattaatggggttgctgtcagctgagaaggggaagctgtgagtgaagcaggtctgttgggggaagattagagattcagccttggccacgtggggctttgagatggctcttagacatccaagtggaaacgttaagcgggcaaaattagataacatggtaattattgcctggacgagcctcattcaaagggccttctgaagccaccaccagacttggacgatcttgacccagtctaaa

SEQ ID NO: 1242170 - DNA, 4001 bp, Homo sapiens
aagaaaccctactgacagggcctatcatcttaaaggaatattttgggctgggcgcggtggctcatgcctataatcccagcactttgggaagccgaggcaggcggatcatctgaggtcagtagttcaagaccagcctggccaacatggtgacaacccgtctctacttaaaaaatacaaaaattaggctgggcgcggtggctcgcctgtaatcccagcactttgggaggccaaggcgggcggatcacgaggtcaggagatcgaaaccatcctggctaacaaggtgaaaccccatctctactaaaagtacaaaaaattagctgggggtggtggcaggcacctgtagtcccagctactcgggagactgaggcaggagaatggcatgaacccaggaggtggagcttgcagtgagccgagatcacgccactgcactccagcctgggcaacagaacgagactccgtctcaaaaaaaaaaaaacaaaaacaaaaacaaaaattagctgcgtgtggtggcacacacctgtaatcccagctactcaggaggctgaggcaggagaatcacttgaatctgggaggtgaaggttgcagtgagccaagatcacaccactgcactccagcctgggcaacaagagtgaaactccatctcacaaaaaaaaaagggatattttgtcctggctttagttaggaatcgtgccatttctcagaactcacatcttttttttttttttttttgagccagagtctggctctgtgcccaggctgaagtgcaatggcaggatctcagctcactgcaaccttggcctcccaggttcaagcaattctcctgcctcagcctcctgaggagctgggactacaggcgcacgccaccacacccagctaatttttgtatttttagtagagtcagggtttcaccattttggccaggatggttttcaacctcttgacctcgtgattcatccgccttggcctcccaaagtgctgggattacaggcgtgagccactgcacctggccaagaactcacattttatagacagaaatccacagccgatctgctttctgtctttgctttgcctgctaagaggctcagaattaaatccatggcccaactctcaggtggacagacctcacagcatatgttttggaagccatgctcctagactatttcacgctccactctaatcctcattgttcttgctcactccctctatcgtgtagttccatcatcacaaacccttttttgaacaagatctggtagaagacacactctttgtaggtctgggtttggaagtccctgaatacaaacctatgggctaagatgctctcatgcctgcttccacccacaacacacatacagggaagggctggtgcccactcacctgggatgaggatgcttccctccaggtagcccccagttctcatggccagccacaggcccgctgggatggagccgggagagtggaggtttgtgctggtccacattgccttctgtgtgcctgggacttagtgtgtgagcatgtgtctgtgtgttcacaggtcagaggtagaggaagggcaggggtccaaggagaggcagaggagaagagagaagtcctggggcagggaagcagagaggcagaggagaaacagcttgggcaggggtggggggtgttgaggcggtggagcaggagacaagcctggaaggggtcctggggtgcctggcactgtcccaggccttgccccaccctggacagaggatggctgtgacagacccactccccaccaagtcacagcccctccagcactttgagggaccctgggcatagctggtccccacccctgcccctcacctccatgatggctccagaagggtattccagccccaggcaatgccagccttgggcctttgaagctgagcttgtactcaaacctgcgtagaggaggacaccccgtctcagggctgtgggggtccaggagcaggaggagaaggcagaataagggacctggaccactgaccgccggcatcgtgaaggcgcctgaagtctgggccccggggtagatcatagctgggaggccggggaggggatcctgggatagggccaggcagggaggagctggggactggccaggagctgggttttggcactgtcctctccctctatctccagcatagacatcctgttccttccaggcctgctgtcaggccccgcccatccctcacctccagtctgacgtgggcagcgggaccccacgacaacctgagctctgcccctgctcctgactcaggccatctttctgtctcccatcacttccagcagttggatgcggcagaggggaagggggggtgcccagggttggcccccacccttcagcagccctggcctcccctcccagttagggagacaggcctccacattctgcctgtgtcccccagcatggatggcacatctatctggacacccatccttctctcctccctgccccctctctccctctcccgaattcccccaggctcatccttccaagcagcctggtttcctcaacaaaagcattacatggaaaaaagaagggagtctttagagacagcacaaaaacgcaacgtgcagaccttgtttggagccaaattttaacccaactgcaaaaaaaaaaaaagatattggggaaatttgaacaatggatatttttgaacaatggatatttgactatattgaggaattgttaaaaattttagggcactgtggctcatgtctgtaatcttagcactttgggagcccaaggcaggtggatcacctgaggtcaggagttcgagaccagcctggccaacattgtgaaactctgtctctactaaaaaaaaatacaaaaaattagccaggcctggtggtgcatgcctgtaatcccagctacttgggaggctgaggcaggagaatcacttgaacctgggaggcagagattgtagtgagcggagattgcaccattgcactccagcctgggtgataagagcaaaaatccatttcgaaaaaaaaaattgagaactaatatggtattgtggttatgttttttattttttattttattttatttatttattttttgagacggagtctcgctctatcgcccgggctggagtgcagtggcgcgatcttggctcactgcaagctctgcctcccgggttcacaccattcttctgcctcagcctcccaagtagctgggactacaggtgcccgccaccatgcctggctaattttttgtattttttagtagagatgggatttcaccgtgttaaccagggtggtctcgatcttctgacctcgtgatccgcctgacttggcctcccaaagtgttgggattacaggcgtgagccactgcgcctggcctttttttttttttttgagaggtggtgtcttcctatgttaccaaggatggactcaaacttctgggctcaaaggatcctcctgcctcctgaatagctggaaataaaggcatgagccaccacgcctggcttgtggttatgtttttaaagtgtcttttggagaaacatacaaaagctttacagatgaattgctgtaacatcggggatttgcttcaaaatattccagggcttgttggtgagcaggtggggtagagatgagacagaattgaccttgagttggtaagtgctgaagctggatggcgggatgcaggggttccttatatcttctacttttattattttttgaaacagggtctcactgtcacccagactgaagtgcaatggcaggattgtagaggagctgggactacaggcacacactaccgtgccttgctagctaatttttttttttttttttttttgagacgaagtctcactctgtcacccaggctggagtgcagtggcgggatctcggttgactgcaacctcctcctctcaggttcaagcgattctcctgcctcagcctcctgagtagctgggattacaggcacccaccaacccaccaccatgcccggctaatttttgtattttttttttttttttttgagatggagtctc

SEQ ID NO: 1242171 - DNA, 4001 bp, Homo sapiens
taatttttgaattttttgtagagatggggtttcaccaagttggccaggctggttttgaactcctgacctcaggtgatccacccaccttggcgtcacaaagtgctgggattacaggcgtgagccaccatgcccggccattttaagttttttaaaacactcaaagccatgccttggggaggctgcagtctggctctgtcccacccttgcctgctgctggttggaagtgggaccagcccagctgctccttgggtcagggtctacaaggccagccctggaaaggcagatccacaacacagccagtgcagcaccaggaagggtgccctgggctgaagtctgcatggggcagcagaggcagagcctgccagacctgcagacatttctgcagttgattatgttcttacttgtccctaagatgagcacttacctaggcatagctgatgccctctggtggggccggggggggggtggtgtcccaaatctgatggtggagcagcaggggatcccctgtgggtagagaccaacaggcaggctctgtgccgtgggctggctggtgtacccaggagacctcagctcacaccctcctgggaaggactgccggccacttcataggtggagcacagaggtgctggctccaccccctgtgtgtgcgtggcactctgtagtcaccagcctggctgtctgcctccttgttccaggcatggtctcaatggcctcagaccctccctcctgagcctgattaagaagcaaagcaccctgcagtaggggacactcttcttaggaggaggcggcaattctcactaataagtgcttttcttctaccacatcatgtacattaagtggttttttttttttgttttgcttttttgtttttttgttttgtttttgtttttgtttttttggatacagagtcttgctctgttgcccaggctggagtgcagcggtgcaatctttgctcactggaccctccgtctcccgggttcaagcgattctcctgcctcagcctcctgagtagctggaactacaggtgtgcgccaccacacccagctaatttttgtatatttagtagagacaggcagggtttcaccatgttggccaggctggtctcgaactcctgacctcaagtgatctgcctgcctcgccctcctaagtgtatatttttcttttcttttttttttttttgagacggagtctcgctctgtcactaggctggagtgcagtggtgccatctcagctcactgcaacctctgcctcccgggttcaagcgattctcctttctcagcctcatgagtagctgggattacacacgtgcgccaccaaacccagctaatttttgtatttttagtagagacggggtttcaccatgttgcccaggatggtctagatctcttgaccttgtgatccacccacctcggcctcccaaagtgctgggattacaggcatgagccaccgcgcctggccgtgtatatttttctaaatagacacctgaccatgcttaggtcatccatcgaaattccctagcacttgctggcttccctgaattcaactgaattgcgcgtgcccactgctgctgcataacctatggcgggcacagccatgggataaagtgggcagtgtgcacacattccccgcacagtctgtggcctggccaagcccctgggcattcgaggctcccggcaaggcttcgtgtcccgacagttttgggtaggggcacgaggtgggtgagcccggatcccagcagcaggcatggctccctgggttttcatgtcatctgtgcccccttctaccaggatcctgcagcagctgaagggagacccctctccttttaagggttaaacccccagtggcacagagcaacttacctgcccttgcatggtgaacactcccatctttatcacatcagtaattcttgctaaaagcagatgtaattttgaaggtgggtaaaagtaacttgaaaagttggtgggcagatggcagagagcctgctcatccttctttcaaactgtcatcagctgcacaggtctcagctgccatctcatactattattattgctattttgcatgtgtgcacacctctttctgtgggtgtggagggaggggactgagcaaagcctcagggaggccacatacgttctcagcgccatgcttggctggtgactggtcatgcaccattggcagggcctggagcacgtgcaaggaacagagttcccggctctgcacactcaacatgtgtgtttcatactgtcacctggctggctcctctttctgggtctgtgtgagcagaacagaacacacactggggacagagcttgcccgaggggctgcccaggttatttccatcttggtgatgatgacaccaccctgagctcatttcttcttcacagcaatcccaggagatgggaaccactgttatccccattttcttgataggtagactgagatgtgagtgaggggaacagatgggacaaagctaggacccaaggacaggtgaaggcaaggagggacgatgctgctaataatcaaggccattcatttggtcccacccagaagcctgggcaagtggagacagctggcactacagaggccatggggcaggggcagtggaggccaaaccagggggcttgatcagcactctgtctgggaagccattgagatcccaggttccttccacagcatgcctcagacaagcctggaagtttgttctttggggaaattgtagaaaggaggctctaggctcaggggctgaaggacagcagaaggcaggggtggggttctggactaaaaaggggtcgaggtataagaagaaagacttcacctacactgaggagatccccaagaccccctcccgactctactcccaggaagttggcagcatgacctacaagtaccaggcaggacatatgttcctagagaggagacctaaacatgtttgcaggtaagggttgcccaacaaagaatctgctatagccaccagtctataaccatcccctgccagcaagaagtcttcagtgagctcttcagggctgtgcccttggagatgaaccaactgcccacggtcactgaacacaggagtgaagcagccaacatggagcacaaccagcaacacatagggaagaggcactcagaggaagcagagggaaggggcagagcaaagctcaacatgaagcccctgtcagtcacattcttgggagctgatagaggagattgcatccaggaaacaagaatggcattctaggctgggtgtggtggctcacacctgtaatcccaacactttgggaggctgaggcgggcagatcaccagaggtcaggagttcgagaccagcctggccaacatggtgaaaccctgtctctacttaaaatacaaaaattagctgggcatggtggcgcatgcctgtagtccagctactcgggaggctgagacaggagaatcacttgaacccaggaggtggaggttgcagtgagctgagatcacgccactgcactccaaactgggcaacagagcaagaccacagacacacacacacaaaaaaaagattggcattctaggagaaagggatcatcaaagcacaagaaagaggacatttaataaataagatagaaggtggagtcaagaaaattgctagaaaaaagacaaaaagattgacaataagacaccaaagacaactagcatgtcaatcagatgatttggggttccactaattagagttacaaaaggtgagaccagatacaagggggagacattttcaaataaataatacaagaaaattaccaagtgaaggatgggagcctctgaacggaaagagcctgttaaggaccaccattttagaattctacaccaaggcatgtcaccatacaatctgaaagcattcaggatgaagagaaagcctcgcaagctggaggttgcaggggagaagaacaatacacacaaagatttaaggatgaaatgtcattagacttcacgatggcagcactggaagacaggtgacaatagaataatgcctttg

SEQ ID NO: 1242172 - DNA, 4001 bp, Homo sapiens
gcctggagcacacgctcccctctaacctcctgcgcactcaagccaacctcacacatgcccagtaatgggcagcctgccacacctccaggggcatcccttaaggcctttctggccctgaagactcaggtttctgatgctccttgcctcaccctgtgagctggcatagaacatctctaaggggggaaggagatgccctcattgaaatgagggagaaggtggatgaggggctccttccttttgtcctcagatgacccaagccaagtgcagaaggcgagcctcctcccaaagctcggctagtccctccaccaaagccaggatcagagcccacacctgcctggccaacccctggcactgatgatgcctgggtgcgggttaagctgggaggtgagatgccaggggggtgctgttggctgggtcgggggaagtcgggagggggcgctgctccgtgcttagcagctccggggaggcctccaggaagttctaaggaggggcccggggggcccggagcagtttccagtggccaggggtacgcgcggccggaggggcgccggggccgtactcaccgcggccgttctggttgggccggtacacgctgcccacgctgaggcggccctgctgcgcgccgttccgctccccacccggcgggggcgtgtcggagctgcgcaccggcaggtagggcggctccagcgcgcgcggcggcccgtacgcctcgggcggcgggttggcgtagggcgggtaccagcccaggcgtgggtctccgccatgggcctgcgccgcctcgggaccggggtcagggtaggcctgctcgaagccgggggtgccctcgctgtacagactgtgcgagtagcggcggtccaggccgtcggggggcggcggcggcggcggcacgtagggcctctcgggggccgggtagaagccctgaggcgggtactcgggcagctcttcgccgccgccgtactcctcgtagcgcgcccggggctggtaggggtagatgacccccgccgaggccacggccgccgcccccgcgcccacgccgccgcccgcgggccggtagtacacgaaaccctggtcgtaggtccgcgacgcggggtcgtagttctcgtactggctgacgaagggcgcctgcgggtaggggaactgctgcgggtaggagggctgctggcggtaggtgctggcgaaggccgaagccgagaccgaggaggcggagcccccgtgccgttgctgggagacggaggtgcgggcccgggccatgcccgtgctgtccccgacggccacctcgcgccagttgtcgggcacctggccaaagccgaatgggtgccgcgcctggccgcgcacggtgtccgagcccacgcgccccggcaggggcagggacggcgcctgccgacgccgggggctcccgtggctgcgccgctgctgggcctggggcgcgccggccagcagcacccgggagctactctcggagcgctgaggtccggccggcacgtactctgagcccgagttgagcaagctgtacacctgcccgttgttctcccactggatcagctgccgccagcgggcggggtccgagccctgcccgggctgcgcctgctgcccgtgcaccagcacgcacaggcaggcgccccacaccagggcccccagctgccggctgcctcgggccagagccatggtgacccctctgcagaggcctggtggacagagaggctctcaggagtggccccctgggcgtgcttctcttcccacggcctcgaggacaggaaggctccttgcttgccccagctctagctttgtccatgctggccttgtcccgagcgggacggctcctccgatgacagcatttcaaggccaaggggtcagggcagggcaggggcggtgcccagggctgcacgaggctctccgcagggcaccgggcgggcaggaccgcctgtgggccttacatggccagccccgcactggctggccgctcggctggcgctttcccactctgaatgaataagcaacaggctgggagcgtcgggaggcttcggcctcctggtccgcctgctggggcctcctccgcggggccctatggcccgccggcttttagctatgcgccggtcccacagctgcagtgctccctcagtccctggagttcccagccaagccacagacctgcctctgaggaagggaatcgagcagggagtaggaggggacctctggggactcgggcctggtaagtggggctctggcaggcagaacggggctggggtgtcagcaccaccccgcccattcctctctgctttggtcacagcatccctggtctccaccttgctcactggcttctcgtttgggctggaatgggcctctgactcctgtctgccccagcctccttcccgtactcccgggttctcccttttccttgttccctaaagccagtgctaattaagacacaccctctttgcatgttccttccaccattatcccacaccctcaataggaagaaaaaaaaaaaaaagacacaccctctttgttggtgggcctcctcggggagatgctgaacagggaccactctctaattccaggtcccaggtgcaccgcagctcttgggcctgcgaagagaggcactggagctgcaccttttccctcgtggcacacctcaggggcttactttcccagtctgaagagtggggtgtatccctgagctgaaaagcacttgtgagatcctgggagagatcaacttcccagacatcacgtatggtttctgtcctacatctcttggctctgcatagcctgggaataacttgagtgtacacatggataaaatgaaactgggggctgtctttgatatgggacaggggtcactgtgaggcagagaagccagtaagcattgaacaacagaagggggttccggagacctggcctggtcctgttgctgtgtggcttagtcccttactctatctgatccaggtgccacggcttaccaatggaagattaggccagatggctcctgagagtgctttgggagattctctgttccttctgggaatggcagggataggagggggtcccagaagtttgaacgctttggcatccaagaaatcacactccaaatactgctcttctggcctcccctgggctgccttctccaaccgtgttcctgggaaccgaagggcagaaattgccctcttgggcttataaacaaggtatgaaggacctgtccttaatttggctcctgtatattctttattttggaaatgcctggagcccacctagagaggaggcaactagagtggacattctttgggaactatagacctcccaaccccatccttgccaggcagcatttgttcacccattgcactgttcttcaggactgaggcttggactccagcatgtctctaccctttaaatgcccagaatccagcccagaggtagggggcttccaatacctcctggccagcaacttgtcaacgctgacacctcagctccccagcatggggtttccatctcagactccagacaagattcctccaaagagccactggtgtgactgacaccaagcaagatgctgaggcagggcttactgagggccgggacctggagggttaagccttccctccctcctgcttgccccctgcagtgttggcctcagctgcttggaatccctggggtcctgtagggccctcccgccagccagatgggcagctgctgcagcagaggagggggagaaatggaaacaggcctcagggtacccctaggcagggagggaagggaagaggagtggagggaggacagaggatggctgtgaggaagggaactcagttgccctaacgtgaaggcaggacccctcgccttgactcggacagcagggcaggggctgcctcaaggctttggatgtggggggatcagggcacatgccattccactcagcgggcctcagagccagctcttggcgtgaaaccttacccgatgctggctcctgctcctctctctttttttcttaataaggtcgaatcagagtgagt

SEQ ID NO: 1242173 - DNA, 4001 bp, Homo sapiens
gctcaggcctagcaccccgttgtggcacacagtcctgccagggcaaggctgggtatcagcggaagcagtggttctaaccctcacccgcccccaggttcagacaccgggaaagtagggcacccctcttttacccttaaataggatgtgaccaaggggccaaggtctctggccactttgggacctatcagggcacattacttagaggtgaggtctgggaaccacgtctgagcttggctgactcatctcatctacccaagctagacagaatagtttcagaatgctctcttttcttcttctcaaagagggagccgaatagacagcagggaagagaagtagggtctctgggggctgatccctcacttacttcctccatcctgtaattggctcctgaagctgctcctcactaagaccggccacttgaagccaggcaaagggccagaggagaaagaggacgataaaggccagaagcactcggatgggggccagcaatgcccccaggaggcagaactgcaaagggtgggagagaatgccactttagagcttggatatgctccctccacagcatccttcttccacaaagcatagacccaggagcagacagccatcatcccttgcatgtgacaggtggtgtgggaacaggagaggggactgggacccaaggtgggatgaagataccaatgagggcaagaggataaaagattaatggcatcaagggccttattttcctgtctttcagttggtccctaccccatttataaaaccgaaagccataaaaagcatctagcacttagaggatttaataagaatgcatgcgaaagtgcagggcgctgtgcttgatgtacagtaggttagagacaggtcctcctcccccacatcttattccataaatagctcctatgcccaacagaaaccaggtgcacagatctttccactttgggcctaggaggcagagggctgtaaacagccagaggtccagttttcagacccgaggtcattttctgacactgctcaacagcaatcttagagtaccgggggatatgggagacaagagctcggccccactctgcaagggagagaggctgccaggagccaggatgactccataggctgccttggggaagaagcaggtaagcaaacctagcccctggagcctgcctccggggaggtgatgacagcagaaaccttggacactccctccccacaccacctcccagctcccctaggctggcgcggccctccacttcctgtagccaacctccctctcagcctccctgcccccaccgggaggtgctgcagtgcggggtggaggggggttggagggagtgggaagagggagtgtaggaagggcacagggtcgcaggctcccggcccagaaacgtcttccctctaagtcatgcctcggaggaatactcggcacgcccccgcccccgcccccacccccggcttcccgtagactctaactccatcctagccatcaggctctgcagaatgtaatccgcattccccagcgtccttcatctctccaaccccagggtcccctgcagccctccatccccacctactcagtttttccacatcttcgagcttgtctatcgcccaagcccgcagcgtcctctccaggactccttgcccaaccgcggccgcccccacgtgcgcacccccggactcccgctccgcaagcctctcagccatctccttctcgtggatccccaagcccacctttgccagggctcaaatggccccattttcctatcctcacgggtccttccgacgcccgctccccacacattaccttaaccctctggaggcgagagagatgtaactcatgcacgaaggggttgggggatgctgggggtccgggggtgggatctaggggggcccagtcccccggacttccctggctcatggcgggagaaggtgggagggagggcaccccggccctggccccggccaccactctgcagagcagctgctgctgcagcagcggcggcggcggcgctctggcccgggccccgcccggtgcaggcggccgaggggcggggagcaggcggcgcagcccagcccgcccgcgttgtcagggcgccggccgaggggcggggcttccagcgccctggcgcccctgctcctccgcgcccgccgcggcgcccgcagccgctcgggccattgttccgcggctgccagggctggagcgggctgcccctgggcttctgcgcctccgtcgttcctctctgaagacctggcctccgcctcggagtgggagtgggtctgggagctgagcgcagagctcagagcgccctctgtccccgcccgggcgtcgaggtcacccagcaagcgcagatcggggtgaggctcttgggttggtaggcagggagggacaggtgggccggatgcagaggccggcagctcgcgggtgaggcggcgccccgctcttcctatgggctccttggcccggtccgcgcctcctcgcaggcggaccacctttccttcccggtccgtggggcgccatcgcgcggggacttgaggcacttgcgtcctctggcggctgcatggcgccccgcaactctccacctccgcgtcctgcctgtgctaggcagggccgcctttactggtgtgagggttgcttgaacccttgaggcgccaggaatccctagtacactgacgcatgtgcttcccatgagcccgacaaggtctggcaggggagaggcagtggttcctgatctctgtcactctctgggtgaacgcagaggacacagtagtaattcccctcacccacaagctccaagctaccctagaaaacaaattgtttagcctcaggccatcgtttgagatcagggaccagggaattaagtggactctgagatccattgccatgacaaaaggggtaagagtctcattgcttgaggaaagaatacgccttaagttcactttatgtcttctgcccattgcatggcagttaggggagctgaaggaagaaagtgaaagaaaaagagacctctcataaccaagagtgtttgccgccactggcttctcctttaaaccaaactccaaattaatctgctccaggaaattttctgagcccaggctgagagggttgaaggctcatgcatcctactgagaccaaggagctgcactgggatgtttttgtatataacacagaggtcccaacacaaatacatcatttccacattttatttttgtatagatagggtctcgctatattgcccaggctggtctcgaactcctagcctcaagtgagcctcccacctcggccttccaaactgttgggactacaggtagtgagccgccatgtacaacccaaaccttttttttttaagcagatgatttcagctttctcaccagaaccgagaaagtacaactgcatgtattagtctcccttgccttgcctttggggagaagtttgtgtgtgtgtgtgtgtgtgtgtgtgtgtgtgtgtgtgtgtgtgtgtttgtcttttgttgttgttgttttgggacggagtcgcgctcttgctctgttgcccaggctggagtgcaatggcgtgatctcagctcgctgcaacctccgtctcccggctccaagcaattctcctgcctcagcctcctgagtagctaggattataggcgggcaccaccacacccggctaatttttgtatttttagtagagacggggtttcatcatattggttaggctggtctcgaactcctcacctcatgatccactcgcctcagcctcccaaagtgctgggattacaggcgtgagccaccgcacctggcggttttttttttttctttttgagatggagtttcacttttgttgcacaggctggagtgcaatggcacaatctcggttcactgtatcctccgcctcccgggtcaagcgattctcctgcctcagccacctgagcagctgggattacaggtgcctgccaccatgcctggctaattttttttttttttttttttgtatttttagtagagatggggtttcaccatgttggcca

SEQ ID NO: 1242174 - DNA, 4001 bp, Homo sapiens
gatcacctgaggtgaggagttcgagaccagcctggccaacttggcgaaaccccatctctactaaaaatacaaaaattagctgggtttggtggcgggcgcctgtaatcccagctactcgggagactgaggcaggagaatctcttgaaaccgggaggcggagcttgcagtaaaccgagatcgcaccactgcactccaacctgagcgacagagcgagactcagtcttaaaaaaaaaaaaatcacttccctatcccaaagtaattcccctggtgttctttcagaggaacttggctgtttgttttttcttcgtaggactcctcacaatttgtcacttaaatatttatcgttgcatctgtctattgtcaataaagccaaaaagcctgtaaataaacccttccgaaacttatttagaaatcctgagggcagggactgcgttgttttcttcacgcttgcatacctgcatctagcacagtaactaaaagtaacccttcctaaaacctaggtgatgggttgacaggtgcagcaaatcaccatggcacacgtttacctatgtaacaaaccggcatattctgcacatgtatccagggacttaaaattttaaagtaggccttctaatatctgatgacatgtggaagaacattgcaaggttgatttttcatccaactatgtcaagaccacggatagagcctataagcttgctacatgccacaaggatgtctaatctttacaaccatgcactgcaatagacattatgtagcccgttttgtagaggaggaaactgagtttctcagagggtaacatgccatagttccatcgcaggtggactgactacaaagcgtgtgcaccgccgccctataatgcaaaaccacactcactgaaggaagattcaataagacagtccctgtaacctgacggctttccttctgaatgttctggctgggattggctgcctcaaaaacaccattacactctgttaaaattgctacaaaggctgtttgggagataaaatctaaacaaatgaaatcctaaaactgccaataatagcaataaagcatcaacaatgctcacagttttgcagtatgcattcacgggccatacacagcctttaacaaggtaattttcttaccccatttcacttgactacatcttacctagttaagcaaactacctcttgtatagttatactacctcttatgtagttaaggcaaatagtattacttaatatcagctgtatacagctgcacttacacacgagctttctgacaggtgaacaccaatctatcttattattaaaaacaaaacaaaaaaatcaaaaacctctcaacaaaattccacacatattaaggagtattttgaaaggaaggagtcccttatactgacctccccgtactcaatttagtagaatacgcattccaatttcctaacgctggagattagagaactataagctacatattaaaagcatttgtaaaaggctattttctcagctgtggtaacaaacactggcagagtcttaggcaaaacacacgccgtttcgcccgagttagccagccactgagatcgttacagttgggaagcagcgagcccagcagcagggatttcacggacccggtatcagggttctcgggtcccaggggccgcgggccgcagagtgggaggaggacccggcagctgtggccacccgaggcccggacggctccgctgtcccactcgccgcgacccggacgctttggcaggaccacgtctggggcgtccccgccggggggccgggtcagagagcctcgccacttgaatcacccgacgaggcggacagctctactcacctcagcgccagcagagccagcgctccggagcgcaagcggcgctggaagccaagcgggggacggcgggcggggcggggcagggagccaggcgagggcggggcggagcgccgggcgtcgggggcggggctccgggggtggagcggaacccgcgccagagggagctggggaagagggagcgggagaggagcacggaacctcgcgataatcccctgtgttctcgcgctttcacgataggcgcgggaaaatgctcgtttgccaagcgatctgtgtattggccgagagcgctacttcctctatgctggccccgcccgcggctctactcttgcttccggctccggcgtggggtttgatgtcgacggagtggcttttgcttagcgtcttgaaggggtaatttagtcggctccaacttcgggaaccgccagttactgacctgttccttcattcatacattcattcagtcactcggcttctcattcagagcacacgttgagggattacaacaatgatcccacgttgagcgttcgttctaagagctgtttatagattatctcgttgaacccttgacagcaatcccatgacacagggactaacagcgccagtctgaccgttgaaaaacaggccagtgggtttatgtaacgaagccaacgttatttagcaagtagtgagtctaagcaccggatttaaggggtcactacgaactggtagataacaaagatgaggaggacgtaacctagtctctgcccttcaaacacccaaggtttattttgagtaaagattgctaaaaaggtcaggaacaatttagagagttaaatacaatgacacttcctagcctgactgagtaggccgtcaatatgtatttcttcaagacgaaaattattatgtcagcgaaatagcatgaaagagggctttatgctgttaaaaatacttggaagcatagttcggaaacatttttaaaagacactttttaaagtgtctcattaatatgacaaatttccttctgaaatgaagattttaaagtataatcctctactacaaccgctgatattttttgttctgtggaaagcctgtctatgagtttgcgaggctccttgtcaaggaactttaactttataatgaagtagtttttacagttgctgacttaattattcatagagacgaataacctagaaagcagagttatattaaataaaaaacattggttttaaaacaaggtatgagttataataaaaattatcagttatctattaaatctggtcttcaagagctattcaggtatacagcatggttggtatatgtcatgtatttctaagatagtttcggaatacctaagaattcgtggcactcagaaattttttgctggtcttaaaatgaggaaatccacattttgtgtaaaaacaaagatacggtgtttaatggtcagcccaaataataagacttgctgctaatatatgaagagttacaccccccaaaaaagaaaaaagattaacagtagaacagttttttgaaaacaatgttagcctcttagttttcatttcttttttttaatggggaatactgtttttcagtgattaatatctgatatttgatcatgaaaaatgaatcatgttaaaataaccttcacctcctccccacattgacacaaaagttaccaagtgattatatttgataatactttatgaccccactcttgaagttctcacaatttgtagagaatcaattcgcacgttttgtctctcttaaaggggaaaaaaatcctctaagctggtgatttcacgttctttgacaaacttcaatatcaacaggcaacgataccactttaagaaaattccaaggaaaagacctcattttaaaattcccacctctggctcccaaagattggtttgcaaacttcgacaaaatactcttctccactcgctattggtgagtgctctatcattcattcttttgcctggagttttgtgaggtacccgcttgctttatgggaaaaggctgctccggaactgccctactttagactttttcatggttatcaatctgtacaaagaatcaccaaactgataaagcaggaaccagagggcaaatcacgctgccaagacaactgtgtaattcgctcgaaaaagaaacggtgagcctctccagcagactgggtaaactggcaagggattttacgacatagttgg

SEQ ID NO: 1242175 - DNA, 4001 bp, Homo sapiens
ttcatatcgtaacttctaaataacgttaagtctaacatgtgtccactgctaacctatttttttcttccctgattttaaatgggatgtgtggatatgccctcccaattaccattttatctaaggtgtcattagtagtaagacataccattattttaccctctattaagaaagaaaaaaaacctccccaattaaactatgacatgccatcaattttaagaaggctcctgatttcagaaatgtgtaaatatcactgggtgcggtggctgttgcctgtaatcccagcactttgggaggccaaagcaagcggattgcttcagctcaggagctcgagaacagcctgggcaacatggtgaaacctgtctctacaaaaaatacaaaaatattagccgggcgtggtggcatgcacctgtggtcccagctattcaggaggctgaggtgggaggatcgcttgagcctgggaggcagaggttgcagtgagccaaaattgtgccactgcaccccagcgccccagcctgggtgatacagctagaccctgtctcaagaaaaaaaaaagtgtaaatgtcaaaaaaaaaaaacaaaaaaacccttacccttttgtaatcaataaaatcacattaagttttttaaagagggctattttagctttatgtaggcagaaagtaagaactagctttaaactggaaatcaaagcaaatctacttaaatttttcagtttagaatctatctacactttaagtcatgctgctatttgtgtagaatttaaaacaatcttcaatttaaatgccaaccttcttaaatcttactttgtttttttcaggaagcgatgatgtttgaataaccagatgaagcccgcagttcacctgaaatgtaaaaattaaaccataaaatttgctcttaatacacaaacacatatttccaaaaaaaaaaaaggtacaaacagaaatacaacaaaaaaatagaacacaatgctctatttctgtttctggtaaatgatcttgttctgaggatttgctgaaaacaataaaatcacatctaagaattaaaaggtttcactgatttattttccaaaatgtcggcagcaatttaaccctctagttagtacctcaggctttcgacatttgccattcaggtctaaataaacatctcaatgagacaggtgaaggaggtgggagtccctaatgataaattctcttcacagttaaaaggaaaagaaaagaaaaaggaattgactggccaaaggaatttaaataaacccaagcctttcacagcagaccagctccaccttctggggagcccagatcctggacaagactttgagtacccatcatacaatattaaattgtgccttggtccagcccacgaacctcaaaccctggtcagacaatagcttgagtagacccagcggtgccggtcctaataatacagcccatctcctaggacaaagacgccagtcagaaagagtaccagtgggaagaaagagaaagtagaaggcccaacttacgttgttcgcagcccggccagaaacagagcgatatttcccgggaatcatgataggagacagtccaggttctctgttagatctgccttccaggtgacgctacagcggagattcaaagagacccgaaagaggtcatctcccaggcaacctgctcagggttaccatggaaacgaccatttccggtctggacctctcccgaatcgatagagccacacagtcgttgcagcttctagttgtattcgtgagagcccagtgcgtcaccacttcctcgttctattttcccagcctcataaaaacagagcgggagtattgggaggaggataagctggggaagaggctggccacactggttgctataaccaccaccacttccggtccgttcctctttacggcccacctcagcgctgcccgcgcgaaatttgtatccctctgcttgtgtccactggctcctggggagcagcgcagggaggaggaggaggaagatatcaaagagccctcccattgggggccccagatcgccacttccggtgaccagaggtagggaaggaaacaatcccgacccggagtggacaggtgaggaggggaggacttgcctcgccgaggccgctgcgaggagcgtgcccaagggcgaaggtccagggaacccggctcccgcgcaccgaagacggccgccatgccggcccgttgtgtggccgcccactgcggcaacaccaccaagtctgggaagtcgctgttccgctttcccaaggaccgggccgtgcggctgctctgggaccgcttcgtgcggggttgccgcgccgactggtacggaggcaatgaccgctcggtcatctgctctgaccactttgccccagcctgttttgacgtctcttcggttatccagaagaacctgcgcttctcccagcgcctgaggctggtggcaggcgccgtgcccaccctgcaccgggtgcccgccccggcacctaagaggggagaggagggagaccaagcaggccgcctggacacgcgaggagagctccaggcagccaggcattctgaggctgccccaggtccagtctcctgtacacgcccccgagctgggaagcaggctgcagcttcacaggtaaagagagaccaccgaaggttgtgtaaggacccctggactctggctgggctcctccacttagtgtcaccttgggaaaggcacctcatctcgaaagttcctgttttctaatctgcaaagttaggggtgtgctttagaggtgatctccaaggtcccacttatcattaacactttggaattaagtgacccagttaattccttctaactgctcctcccccaaaactcacacacacacacacacacacacacacacacacacacacacacacacacacagagtcttgtcctgcagagtagtgagttgctttcactcgctgctccagagtttttaaatagaaagggtttaatttgagcaaatctccaggattggagtgcttgaaactgtgttgcataacattacataagcttgaggaaagtcccttatttgtgtcacaaatgatggggcgaaggagatgtggagctacagatgaagatgatggagcttgctaataaatcccttcccaccccaagcttcctttatgactgataactagctccagctgcctttaagttcagtatccctagtgagctgactttccccatcttgctctcttctgcctacttttctgttccttctaaacattgtttgcactcattttgcatctggttactactaccttcttccccacgtaccattttaaagaaaactttccagccttccttgtgataaacttcagccttgccaccattacacagattaaattatagcaagaggttagtaatttcctcaggggtctgtaatccttacttaggtccggttgccagaccaacactctttctgcagtactaacctgcttcctacattggggtgggtatttaagaccctttaatggcatcttgcaattattaagataaagagcaaaattattaacccaatttacatggccctgcatgttttttccccctgcataccacactagccctaaccaaggccactgtccctgttgctcactgtgtaccatcatgctgacctttcagttcttggacatactatactatattacttcctaccaacaagactttgctcagttgttgcatgtattataatatcctggaactatgcccctcccactcccatcattgccaattaagtctttttcccttaaaaatcagctaaacatctttccccttgatcccttagttatgtactctcattcttcgtgtactccatgtgattcaatagcacagatacttcagtagcacttaccataattgccatgaaataattgtgtagtttgcttaatatttgtttctcatattagaatgtaagctccatgagagctaggatcatgtctgatttctttgccattgtattgcagtgcctaaaacaatattttacaaatttaagtaattcaataaata

SEQ ID NO: 1242176 - DNA, 4001 bp, Homo sapiens
cctcagcctcccgagtagctgggattacaggcacgtgccaccacgtccagctaatttttgtattttttttagtaaagacagggtttcaccatgttggccaggatggtctcgatctcttgacctcgtgatccgcccgcctgggcctcccaaagtgctgagattacaggcttgagccactgcgcccggccggtcttattcatttctatgctcctgtccctagtttctgggtcacatttggagaggtgagatggaactcaatttgaagttacacgtgaaaaggtggcagtgttttagaacatcctgacatttcaatagctccctttattcattcaacaaacatctgagtgcatactatgtgcagggcatactctataggccatcggctttcgaacttttgtgaacttcagcatcacctagaggccttgttaaaacacaaagttctgaatcatagattctgattcaggaggtctggatgagccctgagaattcaatttctaacaagttccccggtgcagctgatgctcctggtctgggaaccacacttggagaaaaactgatacagggcaaggcaggagccaagcccctgacctcctaagacgcggtctagggtggttattatgtcaaggagactaacgatggaaattttctgatcttggcaggccagtgggggagacacgcaggaggcctggaagcccctggagctgtggtctctggctgccacccccggagtcaagcacaaacagaagtcagctgtgctgcgcccatccctgcggcgccgtgaaagaaggcgcaggaggagggagccctgacacctcctctcgggctggggccccacagcggcgaaaagacggagggagtgatcgggggtcgcggggatccttccgggacgggcctccgtcggaggagctccggaaagccgccctccacctccgaggccccgcctgcgcgggcgctccactagcggtcggggtggtggcggcggcggcggcggcggcggcggcgcggggcggggcgccgcgacccctgtccctcccctgggccgagcggcaggcgcgctcgcaccgcccccgccccctcgtcgcagtcgctgccgaccggctggctgggccttgcggcgtgaggaccccggcggcgccgcagtcccgcgagccatggcccagtccggcggggaggctcggcccgggcccaagacggcggtgcagatccgcgtcgccatccaggaggccgaggacgtggacgagttggaggacgaggaggagggggcggagactcggggcgccggggacccggcccggtacctcagccccggctggggcagcgcgagcgaggaggagccgagccgcgggcacaggtaggcgcggcggctggcccgggaggtgggccccgagggggcgccgggccgcgcgcgagttcggggcgctgactgcgcgcgacaactcctcgggcagagggggttgagtcagccccgccgccggggaagcagctccgggccgagcccctgagtcagaaccggcccgtggaggcagccggtgccccagcccgcagcttcgtcgcccaaccgaggctcccagggctggcggccgggatctgaggggcctggacgtggggatgttcagggatccaggaggaggactttcacgggccatccaagccaccccctcctctggaggaggcctcttctctgtgggctccctcaagacaccacctccccatcgccgcaaagtccatccctacccgccttcccctccccttgcgagtggtcccgcttacccttcactgccatcatcgccctgcctttcccagtcctgctggctgcgctcagtctttaggtggtagcaggccaggtacagcggacacttgctgatgggggattccaggaggtgggatttcaaggtaatttgagacggatagaggacttgctgctttacttcctccgccctgggggattcccattttcacacagcctttcccaccagacctttatgtttgcatcatcttgctgccttgcggggggcggggggggggtgttcctgggttttgggtagtttggagctgctatggcacttgtttaaccttgtcccgggtcccgagctttgtcctcaggcaccttggctcctgtccactaatgcccaggcccttaaggactggtgttttgttcctgctgttgaaaggagataaaacatagacatagacatgagagtggggaaatgacagaacttgcacattctggtggatgccaacaggcacttattaggagctctctttcttctaggaccctgtcccaggcgtttagctgttaaggttctgcaggattgtcctggcaagcgtatatctacttcactgggagaatactcaactcaagggtggaagaatactgggcccagagccattctctattactggctcacccttccccaggttaaagggtcagacttctggacccagagattcggggcagaccagtagagacagttgttaggggagaaaagtcagcccaccagggtagggcaggaaagctggaccatagtgtatgacaaagtagatagatcagtgctttataatgcaaggcctgattcgtttagctctgtgccaagtaccgagagcataaaaatgatgaacccttagtcactgacagctcacagtctcgagaaggcagtcccctagtcagacaatatcagagtatgtaaaatagccccaagtggtttatccttataactttattttcctgtggcagtggcaaatagccatccctatcctgagggctaaatttgtgagattgtatcattagccaggattaaagctctacttatgtttaaggcctggaaagatcccctatggaggtctaggagaaaccaagcctcagtatgggtaggcctcttgcctgaacccctcttgctcttcctccagaactgcccagctcccgtggcttgagtctcagcaagtgttcagtctgaagcccttcctgctgcccactggcatagagttgaccccagaaaatccctggggttcttcggtgagctgacagagcccagtgggcaggcacccagagcaggaggagatgtagccaagaacaggatccacactatcccctgtttggacccaggctcgcatggcagcagccatcacccgatgtgaatgttctcagctcctggagcctacaggagaaaacccagattcctcaatctgctcattaagatgtgacacccactcacatcatctcctcagcccattgcctcaacagttcacgctgtcaacagttcacgctcccgtgattccagctagttccctgagcatagggggctattttgtgtctacatgcctctgcacccccacctctaggtcctctgattgactgatttctagtcagcctttaaaacttcgctgcctcttctccaccacccccaatccccaccccagagctggctgtgtttcctttcttctctgttgctgtagtactctgtacattttatgcctagcaccttccacaattgtgattctatcattgtgtctccctcacaggaataggagctcggtgaattcaaggaccatgcttgcttcgttcattgtatcttcagcacctagcacagcacccagcacataggacatgtttgttgactgaatgcgtatctctatcatcacactcactcaatggtgttgagatatttgtgtttccccttccctagacagtgagatccttgaaggcagctgccttatcttattcctttttgtatttccatacctagcctaatacctagcttatataagggaacagaataaatgaacaataaagaaaagtctttacagcctctaaaatgttattgatcatctccccacatctccttcattaaaaagatgcctttccttttattctcacctttttaacataaaaattttcaaacataaagaaaatatgaaaaaatagtactatgagcattcatatacccatcatctagatttaacacaacattttgccatatttggtgaatggatatacaatgtat

SEQ ID NO: 1242177 - DNA, 4001 bp, Homo sapiens
gacacactttgtaacaaagatgtcaaaaccccacacaaaacgaaaaacaaaactgaattacctctgactcccgactctgagaacctcagtttaggcctcatttccacattatatccctgacatagctcctggctagctggttaggggcatatatttgaggaggatctgaagaagtcttcaagatttgtgagacagtagtttaacttttgaaatgatctctccctgttacctaccccaccctccccaaaacacctacacaactaacacatccagtgtctcaactaattccatggcactttgggccttgaaattagttcagcctatagaagaaacctctcatttagcctctgatacttagctctatgatggcagtttaggaaacaagaggttaacaggtatcaggagaccttaaagccacacatatgctgtaggaaaaaaaaccttaaagctctagacctgattctggttgaggttgagttcgatgacttgcagctctcccactgagtcaggtatacttcgaatctggttcttagagagatccatcacatccaggtgccgtaggctacaaagttggggaggtaatgctcccagttggttcccagagaggctcagggtcttgagggcagagagttgcccaaaggtagacggcagctctctaaggtgattgttgtttaggcttagcgtctctagttttttcagattgcatatctcatcaggcagaacagctggcaaagaaaaatttttttaaaacctgaatgtgatagagctgaaaacaactttgatgaagtttataaagactatatggcagcctgcttcgcctcttgttaatatatgtaaaactcccacatgtgccatttttagatattgcattttaccaacatagtctttagaaggtgagggtgccatcaaaatgccggagagcatttgtgtgtataatgggctccttttgtaaaggggcccaaggcacaatccgacagcaattttgtgatatttggaagatcctccccttctcatccatcccccattccaagttaggtagctttgtttacattacatccccaaaatgttcttctctttcaagtccaaattaacccagtaacaatcattataacacccaatcattataaggcttattttagatgtaattacaagaagtagaaagaaggcttcaaggattccggcattcgcaacttgagccctcctgcacggtttcataacaaaaacaaaaatcagcttgtaagagaaaaccacccctggtaacagctgatcactagcaaaagcctccctggcgagagccatactcagtttgttgttgttcagggagaggctcttcagcagagtgaactttcctatcagcaaaggcggtaggctttcgatcttgttgttggacaagtcgatggtcctgagattgctcgtcagcttctgcaagtctgcggggaactggagaaaggagttcacagcgtggggaatcccgcaccgactaagttcgccgcccccgccgtccctctccctttaagttccctggtcgtgtccctcccagtctcacctcggtcagccctcggtccttaagctgaaagacaccagttttctgcgccgtttccacatgagcgcggagcgcactgtttcccatcctagcgccgcggctcaggtccctgcgggaaggaagcgctgctgtcaccgcccagtccacccggtcggcctcccggctggggctcctgccccagctctcaactcccgccgatccctggctcctggggcccgacccaagagcgacaaggaagaaacggaagaacacacagcccgaccaccaagccctgccgcctttgcagctctgcggaggccaggcgcctctgggagcctacggaagatcagggagccccggactcgcctcccaccgctcagctgccgtaaggctccgcaggtgaagacccaggacccgcagtagccgggatgcgctccccggcttagtcccgggcgggaacgccctgtgacgtcatcgagccgcgccgtgcgttcgccctgcgatcccgctcactcttggcgccttcgcggaaggtgcgtccgagccatggccgctgccaacccgtgggacccggcgtccgcgcctaacggcgctgggctagtgctaggccacttcatagcttcggggatggtcaatcaggtacgtgggggtggcggtggtgtcatcaagggggtgcccaaggtggcaacaatatggctgtgagttggtgctgctggctgtgggagtggtgagggtcctggttggggtctgtactagagtaataagagccccttccaggcaacagccgcgaacgttctgccgtggatgcttggaaagcggggatctgagtagatggtgtttagggtagactgtgttttgagtgtctgtagggtaaatttgtcccagtccagtttgtgggagattagactgttaccagcctttttttcatccagtgatactgcctctagactgtagtgtaagggcggggatgggaaatacgggtcgttctgtccccttgcggaacaagcatttccaacaaccctcgtttgtgggaagtgttgaatcgtatttggggcgggaggtgctgggtagagaagagcgccagaagctcttttttgacatttttattttattttattatttatttatttatttatatgagacagagtctcgctctaacgcccaggctggagtgcagtggcgtggtctcggctcactgcaacctccgccttcctggttcaagcgattctcctgcctcagcctctggagtagctgggactacaggcgcccaccaccacacccagctaatttttttttgtatgtttagtagagacggggtttcaccttgtaagccaggatggtcccgatctcctgacctcgtgatccacccgcctcggcctcccaaagtgctgggattacaggcgtgagccaccgcgcccggccttggcatctttaaaggcaaaaaaaaaaaaaaaaaaaaaaaagtattggctaaaaagataagaccttggaacgtgaatggaggaagagattaattttgagaaggagagaaaagagacattaacccaaggagtcacggagtggcagttttaggttgggcaagaggagcatgtcggaggaaggagccaacagagggagaaattgaacatgtgaggaaataatggaatgcagtgacaggagggcatggggcaagtgggatcaagggcattgagaaaaatggggaaataaattttgatatatagaggaagttgagaaatttcactaaaaagaaaacagaaaagttaaactgatctgtaaaaatcagcacatattagccggcatggtggcgtacacctgtagtcccaactactccgcggaccacatgggtcctggaggctcagatgggaagatggcttgagcttaagagatggaggttgcagtgagatgcgatcgggccactgcacttagcctgggcgacagagtgagaccctgtctcagggaaaaaaaaaaaaaaaaaagcactacaaacatgatggaagatttacggaaaatacataactttttatagtcagaagagccattagagactctaataccttacagtattttttaatttaagaaactaaggcttagaccaagaaacttgcccatggtcactagactgttaaaggagaattagatcttagtactctcccttttgacacattgtatcccctctcaagatgaactgttataagaggctgtgatactgtattaaaagattttaagcttttgttgaacacccattgtctgggtgatggggagattcaggtggtcctagttgactaactttaccaggagtgaccacagcactctacagtgtaatccttcctcccttctctcctgtgttttcttttttttttgagacggagtctcgctctgttgcccaggctggagtgcagtggcacagtcttggctcactgcaagctccacctcctgggttcatgccattctcctgcctcagcctcatgagtagctggga

SEQ ID NO: 1242178 - DNA, 4001 bp, Homo sapiens
taagttagggttgtccattccccatccagtcactctaccaccatgcacggggtatctccctgtacagttatgggaatgagggcacagcaataagcaagacagatcagtctctgaccccaagagctccagtggagaccacaagataattaaggagaaattaaacagataaagaaggagtacagaatggggactgcagggaggctgcagagtgagggatgtgagagggagcgtgggttttcagagggtgaccagggaagactttctgaggctgtgtgaagagtcaggaggcagcagtgcaggggaccagtgctggacagcaagctcagccagtgtggcctggggcaatggcctggtggtccgagacagcagaggctggatcagctgggggtgtgaggagaaggaggtctcctggattgcgtgccagttgcaaggagaagctactgaaggactccataaagaggactgatatggtctgatttacccatttaaacacacagacacacacagacgcacgctgctatatagagaatggaggaagggggaactgaaatcctacagtaaagagatgctggtaccctggacaaggggcagggtggggggtgggggcataagaaaaaggggacagatcaggacacattttagacatagattcaacagactgaatgttttttatctgaggatccgagttgactgcgaggtcactgccagagacatcgacttttgggagagggaaaggtttggctgaccgcaaaacctcctttaggaacaaattaggtgtgaggttagtttgttatattattttctctttcaggacataggcaaagatgaagagaatcaaatcataaaaggcgtttaatgttaacattttccaaaattgtgcatgttctagctatccctttaatgtctgggcattttgataccctgtgagtggctggcaaactctatcattagtgtacacggtgagaggtttgctgaaagctatatgcccccgtttctctacctgttgcaggggaagtgttcgtgggagaaaaacttcgcggcctcatactgtgaaggggtaggttgagatggccacgggggttctcagattctccaccagcgtctcctcgctgaccccggccttcctaggcttccttcccgcgtccctgcctgccaggaaggtcccctgtagcttgcagagaccatggtagacagagcagttgtatctgcgccagccagagaccacctgggcaagaagcgtgacccagacatcgaggagggtgaagcctcgctgggccgccccgcaaccccaggaagccccggaccagcgagaggctcccgggcggtctcttgccgacaccccggcacgggctcacccgcgcgctcacactccgcccgctccccgctaagggactgggttcgctccaaaggcagaggaaacctatgggctccccggctcgtgtctcccgactcgtgtctcttgcctccgcttcccagctttcccgaccctgcccggacggggtttcggggttccctgctcgggccccgcgcgctcccctcccacaggctggctgggctccgggcgcggcgggaggcagcggggacgtgagaccggggtcgccccacacgccctccgcgcccctcgggccgcggcccctgcgcaacggccccccgtgcccgaccacgcggccgcccggagcgcaggggcccgcgggcaggcagaggccgaggctccccgcgggcgccgggcgcgggctctgggttccccgggcggggccgggaggcagccaggccgccggggggcgccggcaggagcggcgcttacctgaggcggcggcggggccgggtgcgggcgctccgggacgcggggccgggcggacacactggcggggccggggcctggccgtcccaccgccgtctgccccccgcgccggggccgggcccagacgcacttcctcaatcctgaggcgggcgggcggggagggcggcgcgaagagcgcgcagagcaaggccgccgccagctctcccaggaaccgtcgcgaggcgtcccctcggcggccgcctcagtttccctggccgtaaaacgcgggcgatggcgctcgatgccccgggagacgccggggtccgcgggcccttccggcaccgggtcctccttcaggttcgggcacccggctgcctccacgcggggcgagcgcggcgatgggatcggtccgtgctgcgctcagccccgctttcgctatccctctgctccaggggcagcaaaatcagcagatgagcccccagcgcgcctgcggcccacacactgcggccgtaacagttaaacagacggggaacattcatgtgcgtagagctcttcacggggcgatacagaaatgtgtcgttctaaagcgttaacgacctgcaatttgcatatcctccaacacatggattttactgattcaattatggatgtgtgcaaagaatctgctgctcggtgagtcattgttaattgtcggctttggggggaatacataaaacgtggaatattggcaatttatcgtgtttcgaccttttataaaggcgtcaccaggctgctgaggctaatacagaaacgcagaccataaaaaagatctgcgtccacgctgcaggcgggcctcacgctgagctccccgtgtcgacccggggacaaagcctgctcaggaagagcagagggttccacgccctgcaggaccagcgccctgggcccctctcctggaaagttatgactcgcacgttcccaggatttagcgcacatctcccccaccctcactgccatttcacagaaccggggcagccgcagggctcctgcaggacctcccggacgccgcggggccgtgttcccttgagcggcttcttgggtccctggttggagaggggaccaccgagcagcttcgctctgctcctgggaggctacttctgccactggacgactttccaaaagggtgagcgcagttctgcaatcctgttctcacccctgagggcctcacaccagtttgcaggagccagcagtgtgattgccaccgacaagttcccaacaatttgcagggcgtggtgtcctcagtgctgagagagccccgcgacggcggtgcagctcctccagggcgcgcagccccgccacctggcgccaccgcgagggagcgcaggcccagggcccgggcagacgctggaggggacgcggcaggtgaagatggggcacctccacttcccttctaaaggagcctgggaataggctaggaaatgtccccactgtagaagacagcaggaacatctgacacgcggataacctgtgctgagctcgttatattcccagcatttaattctagccattaggcatgcgttagccacaacttcgcataggaaggttattgcaggtaagttaagactcctttccacttcttcctaagggtcgctgacccatggttctctagcttttgctggtaatcccacccagattctcagcaccctaggttggaatgacccctcctgaggtgggtggggtagctgggaggcacctccctgaactgacttttctgcctttttgaaggtgcagtggctgagcgctccttcagtgttttccggttgtctttcttcagcccagtacgcagtttcctcagacagtcttccttgagcaacttcctaaacgcccttcattatcccccttcaagctcatgcctaggagcaaggagcaaagccattagaaaggcttcatccaccagcaggagaagctaggacatcccaaagggtccacttctagagaggtgccaacccccacacgcacaccaggcacacaaatgcatgtgtgcacacgcataccacaccctccaattgtccccagaatggctcccttcagggagtcatgttccgggacaccaaatgagggaaaatatccttctcctacagtttcctgctcacatttggattgagaaatgggatgtctctaaataatgtgtctaaattctcttaacataagtgcatatgttacgagagatctgatcccagcctcc

SEQ ID NO: 1242179 - DNA, 4001 bp, Homo sapiens
cgctcccatccatcgccgcgtgctcttcaacggctcgagactccccgaggcagacgagctggctctccgggctaccctgcgggcagcgggggagggaatcggcggggcccgggagcctcccctcgctgtgctggtgacccggcaccgaggaaagcacgctcccccggcccccaggcagccctcgcccccggcgccggcgccgccccatccccactggctgcgctcactccgggacaggcgtcctctccctgctgccccaccaggatgtacagcgactccccgagaccgagggagaagattgctgagacgaagacgccatgcgcccgcgacaggtggttcttggcgcctttgccgcccgcggctccgtaggctgagatcctgcggggaacggacggtgagtccccggccttcggtgctcaggccggccgctccgggcagaagttggcgacagaggaggctccagaattattttttatctgagggacttggaggctgcaatcgactctgacgggatgggaagggtaggtttgcacaccgaaaaatcagatattacacttatttcaggagggttcgtggaaatgtggggaggctcaagcaccccttggcgccgccctggttgggggccttccgctcggtgtaagaggttccgggtaagggctaactcggtggcgactactgccaccttgaagggcactcaaggtggacctccccgcggaatagtccaagacgcaagtcggtgcgcacgtggacttcgttaccctgagggtgaaacctccaactagcaggtcactgtccaccctacctccgccgtgcacttacagatactggccagggcccggcacgcgccacagctgcacgcctctcagctgcccggcggcccccacggtcaccaccacgctggtccccgcgtacgccccgtcacattgtgtctgtgtgggcccatgccggccgctggccccgcaggtagaaaacagccaagacccctcggtgcctgagagcaaggagcgaggcaagggtcgtcgagcccctggctgggccagaggggtctggtatggtgagcgaaagaggaaggaggcgtctaaagctcacccggagaattcagcggggaggctggctccaagatactaggcggggcgctgactttcgggtcccgggggctgggacttgccagcggcaggggcgaggaccgcagaaaagtctcctgggaccccgggctagagcagagaatggcgcctgaaaggtgttgggagaaggcgcaggacgttaaggcgggtggaaataggatatgaaagaaagagagaaccccgcaacagctgcccttgcggtcgcggccacacccgtcacccggcccagccgcgctctcagcctggaagccactacccgactccggtcgcagaagccccgcgggtgcgcgctgataggtctgccagtttctctcctcgagcgcctttcccagtgaataacttaggggccgcaatgaatttggtcctgcagcctccccaatgctttcctcaacttagattggtggccccgccccaaggcggtgctgagaccccaaagaatgttcctccttcccaagctgcgtgatccagactctgggattcgcacgcacttggcgcttctcggcccgcactccagaagcacggaccggagaaatttggctgtgagagttcgaggcctctggaggaaccactgacacctggcctgttgaccggccacccccaagcctaggaaagtgcctcaggctggacggtcccctgaccgccagatagcacttacccgcggctccgaaccacaccagcagctgtccccagcagcccatccctgttgggtccacccggcaacaaaagcccttgcggtcgcggccacacccctgtcaacctaaagttgacagctcattttgccacggcagccctggccaccacttacaggggtgtgctgccgctggcgagacactccccggacctaaagctggtctggccacgcccacctcagaccccaggacgccagaggaggaaagggaggggcgtgtgggcagcgaggtccctacgcttccgggaggagccttaaggagtccccacccaggggttctagtttccagccgtcagatgtgccgcagcctgctgggagctccggtaggtttgaggccggagaggaggtgccccacgcttaaagtgggagccacacctcggacaccaggtgggggcttccaggttcctgaggacaggagcagtggagtgtgcacttcatttgtggcagtggtggtggtggtgagtgtgtggcatgcgtcaccacacgtgggaagtactctaaactgctccaagtaaggcctcattacctgccattacttgtgccttttagtggtgcctttgtgactgcaaggctgaacctcattgctactcccagaaacctggatctctgtgtttgcctcatataattccgttgcctgtgttacccctgtgcacagcctctcactgtgatggggtgaaagactggaccagacgttagaagatccgagtgtttttagtagcactgaaggtcaatagatgataggtaggtagaccgatcgatcgattgatcttgagcactagtactggcacctctggtcaatgggtgatgtagcacaggccacaactgccctgagagtttccccaccacctgcaaaatcatatgaagggaaattgctctgtaaggtaccctacaaatgtgggagccactcccttcaggtagttttgtgtcttgagtcttcgatcatttgcttaaatgatcatttgccgggtgcggtggttcatgcctgtaatcctagcactttgggaggctgaggcgggcagatcacctgaggtcaggagttcgagactagctagaccatcatggcaaaatcccgtctctactaaaaatacaaaatcagacacacgtggtagcgcacgcctgtaatcccagctactctggaggctgaggcaggagaatggcttgaacctgggaggcagaggttgcagagacgagatcgcaccattgcactccagcctgggcaacaagagcaaagccccatctcaaaaaaaaaaaaaaaaaaaaaatcctaacttgaaagtctgagacctatgtttaatacaaaatacttcaaaagagaagttatagtagttagctacttggtaaagtctgagtataattcaaggtgtaaacagaacagtgattttgtaaaaagtctggtctcagccaggcgtggtggcttacacctgtaatcccagcactttgggaggccaaggggacggtgggggtggggtggatcacaaggtcaggagttcaagaccagcctggctaagatggtgaaaccccgtctctactaaaaatacaaaaattagccgtgcgtggtggcaggtgcctgtaatcccagctacttgggaggctgaggcagagaattgcttgaacctggaaggcagaggttgcagtgagccgagattgcaccactacactccagcctgggtgacagagtgagactccatctcaaaaaaaacaaaaaacaaaaaaaccctggtctctatgccctacttaacactagatatcacactatgagatcacagaatttaccttgcaaagtctctttaagccactgctcttcaaattgtggttgtgtggtttgttctgaacatcagcatcagtattacctgggaacttgttagaaatgcagattcttgggtttcaccccagatgtactgaatcagcagcttctggtggtaggacccagtgatctgttttaaaatatcctccagatgatttttgtcacaaagtttgagaatcattggtatttgctgatacagtagttgcttaataaaacctattggggccacatgctgtggctcacacttataatcccagcactttaggaggctgaggtgggcggattgcctgagcttaggagtctgagaccaccctgggcaacatggcaaaacaccgcttctaataaaaatacaaaaaactagcccggtgtggtggtgcatgcctgt

SEQ ID NO: 1242180 - DNA, 4001 bp, Homo sapiens
tgcttcgactgccgaacatgactttaacttaaatcattcccctgtctgcttcctttcatggctagtttctgaaggaatactctattcgttttatcacatgcagccattttcctcgtgcagaaccacgggaaaccaaagagaaatactgtacactactgagcacctttgctactctttcttccaatatgaatgaaattgctttattattttcagcatatgcctactatcagctttctctgggaaaactgctggctcgatccgtaagcagccctgttcttatttaacagaaggctatgactgtaacaaatgtacaacataaaaaagtcaaaggcatcctgtcggttacacaggacattcggaataacaaatgtacaggaaaacttgggaacatgacttaaagtaatttggtcacacccccatttcatttaactctttctggctcagatttgtcattctgacaggaggcccaagatatagtccattaccacaattgatcatagaaacaacactggtctctcagtcagcagccactgcgtgccagtgttcatcatgctagttcccagagttttagaggattaactttactttctggttcaacccatctgctggggaaggtatggccctattttgcaatgtgcaaaagggagacagtgctgggggtgcccacagtggaaggagagaagacaggcttactgaacacccctatgaccttgaataagtcacatcacctctctgtgcctcttattaactatcattggggaaaaataccttcactctgcctgtctcacaagggttcttgtaaaaatcaaatgagaacacaaataggaaagtattttcataaatgcaaaccagtgttatcattttcagatgtggaatttcctctgcagcacgtttttttggccacacgattactgcacacctcgtgccagacagactataaagctgtttcacctcttttcacattttgcctaaaatttcatatagagattacaccagccatgctgcatccatccctttggttcattttcctccactacatctgtgaatgcaaatcccaccatcatgtgaaacactgcatagcagcaacttgcaaaactcaacgaaccttagactgccaagataagtcccataagcaaaggttatgctcaaaatatgctgcaaaagttcaagaaggagagagatatcacatctaattagaaaaggcctctggaagttaaatctagatgccatgtattttcataatgttggtctttgtcctatgtcaccccactctgctgtcatgcttcagaaacttgactttattttctctatctttggagctctcaagaacctggcagacagaacatctcagggtatattcagggatgaagtgaacgggctcaacgactaacaaacccagtggattttaacatttacccagcccaacgaggtccaactatctttaggttagcacgacatataggactttcccggcccaagaactccctcggaaaccccaaggaaggaactttcactgagtatgcactaagtgccagatcctaagtgctatgggtcgcttaatcctcacaacactttttcaagcttgaagcctgttttacagatgaggacgcgaaggctcagacaggctaagttgtccggtctcacctcagtgaagccgccactgcgcttgggctctccagcccctcacgccatcaccctagagccttgctaacttccacctcgcttacctccttccctccctaggctgccaacccaactactctctcctcccacgcccacgcccagccaggaaaacctggggcgggcggggtctgtacctgagaccgctctcaacgcggcttccgtgtcaggatgctcgctcacaggaatgctcatcacaggcttgaaagcctttgccatccacgctctccggagccccgagcgtctccaaagagcctgcccaggcttctccccgacccaggtgcttcctcccctgcagagctgtggcggggttcagaccccgattccgggagaggacacctgtcggggaagggcggggctgggggactgcggggccgcggcgaggctcagccgggaactacgcttcccagcctgctccgctgcagccgcgcgccccggcgccgcgcccggccgggagccgcctgttgatcgccgcgctcgccccggccacggcgccgcccctgttctcccggccccgctccaccggggctgacggactgacggccagcacagccggctccgggatgagcgcacggacgggtgagcgccccggggggcgggtggggcctgttctggacagccggtgtctgcagcccccgggcccgcagcgcggtggccgccgtgccctccctgcccgcgggaggatgctccgcgacatgggcggtcggccgggcgggcgtgcagagccgggccgcctctcgcctctcgcctcccggcccggtcggctgcgccgggagaccaggcgctgcgcccgggcgggaggcgcccgccggggtgtgagtcccgcgccccgcactgcggtgccgcagcctctgcagcccgctgggccgcagcggggagggcgcggtctcctgtcctcccgggctgcggggctgtgttcttccactccgggctttgttcccccacttttccccttcctgtgcatgtttggtgagctcctggagcggtatgcatctccctgcctcgttcagcaggcgatggggaggggtggactggccggcgtctttcctgagatcgctggagctgtcactcgcagggcgtttcagcctcccagtaagcggcctcgtgcggatcctcgagaaccttattattattgttattacttttctggttaaagtaattgtagtatgtgctcccttgaggcttcctaaatgttccctgttgacctgcggaaatgaaggtggatttttaaaacagtaataaaaggcttctaatgggaatttttagagtattcagaggtaggaaggtgatgccgtcacaatgcaaattagcagtgaaggaggccgtgcttactgcagcttcgtctgtgcccattacatatctgaatcacgaggcatttaggacgggaatgaaaagaagatcgggggaggtgttttaaaaaccaggttctcctcttagcttgaccattcaggagctgagggacctgggcaagtccctccacctctctgggcctctgcatgtaaaggggcgtttgggctaaatgatttgtaaacctctgttcttccaagattctcccctctcagggaactgaaaagatgagagtgtttctgtttaacagcactacaaaaagcctaattgtgacaacaagcgcctctaccctagtgaggaggaaagatttttcagagcttcagcaatctgatttttttttaaagataaaactgattttctcgatcgactctcttcagtctaacccaataaatacgcattgcaatcattttaatttttgtaaggtactgtacattggtgggcaacaaaatgatggggtttgtttttgtctttaatttgctgaaggtgaagtgatgggatcagcagataaaggattagtggctccctagggctgggcacgagtggtcaaatgtggtcagcatggaggtcggggaggaagccccagcaagaagtaaccagaatgtgtatacacagaaaagagaagttgcgtactgatggatcattgtttgaaaaagaaatatgcaatagaaggaatgagagaatcaggaactcggcgctctgcaaacctaacataacagttgaataaggcaaggacttaccaactggtccaaaacctttgagtgaaaggtggttggggaataggattttcatattatttcaaagtatctcaccacagtttactctgggaaaatttgtccttacaatggagaaattaggaggtcaccactggaaccaaatgaccaagtttagcagcatctactgcgagtctcccgttgtgaagcaataaggaggcataatttcacctctgtagtgttcctgcaaaaagacttggcgat

SEQ ID NO: 1242181 - DNA, 4001 bp, Homo sapiens
cctcctgggcttattgtgaaagttaaataagataaagatgaaacaagacaaacgcaatgcctgccacacaggaggcattcagcagagggtagctactggtatttcccaacttcgctttcctctgcctctgactcaaaccaggccccattaaggcacatagagaattgtagctctatgttcacatgtatagaactcccaagagggcagaatggggctctccatggcatgatagagtcaatacatgactgcacagcaaggtccctttcaaaatatttcaaagatagaaggacctgataggtaaacatataccggcttaaatatgcaaaatacattctccttcatactgatgctccttcattcggtaaagggccagaaagagtttcactttaagggaaagatatagataagatcctctttcttcccattgctgtctaaggtgcttcaggaaagaacactgaaaactgatacagatcccaaatgtaaaaaggccatcacatagctcacagttaattataagtaattttaatgaaacaatttgttccctcaggtttccatgttcttcccagaggtgtaatgctatacacccaagacacacacacttataaatttgtaataaacgcagccctccagctcaccacagttcttggctgctgcttagcgacaggtgtcacattcgcggttgccagtgagcccagagggtgtaatttcacttctacataaagaagcataatcgatagaaccagaaccacccagtaggaacaactgcaccattcctgactcatcacggagcttgttttcacagacaacaaaattcacctcagttgggctttgcgtaaatatagagtagtgtgatggggcctgcaaattgggtgaaggtggttcacggggatgccaaagccctagtcctcttcggcctccctcacgcgacagatctagtctgagcctgggcggggcaccgggaactcgatgcagctacctagggagggagccctggcggtccgcccctcccgctgcaggaccagctttggcgaccactgcggtggccagcagcgcgcgctgagcgagccctgggagccgagccgcccggggacgcacggccgtccctgcgactccccatcccccaaacccccacccgcagtcccacccccacccccaccgcaccccgagccgcaccgcctcctgcgcggtagctgccagcccgggccgcggcggcgcgccctgctcaccgtgacaccgtacttgagcgcgatgccctgcagcgtgtcgcccgcgcggacccggtgctccacatggcgctcgatgacgccggcgcccagcggcgcccgcacgctggcggtgctgccgtacgagcgggtcttggtgcgggccaggctcagcgacagctcggcctcctcggactcggagccggagcgcgagcgcggcggcggcgagggggccgagggccgcggcgcgcgggggccgccttcccgcagggacagtgcgggcgaggaatccgccatgggtcctgccgaggccgccgggtcggggagcttgccaagggggcggcgcctcctcctcctccgccgccgccgccgcctcttcctcttcacaggggctgcagcaggccgttccgcgggggcggcggacgggaagccgaggcggggagccgcaggccgggcatggcgggcgcctcctcctctgcgtcctgcctgccccgggcgcccgcggcacacgcacctgcaaggttaagagcgaaagcagctcccgccgcggcctgccggtaccgggaagaccctgcagagcgagggagccggggagcgctgaagcccgcggccgttggggctaagagagggctatctgcaggcgtcctaggccccaggtggacccctgctccattggcgatagagccctggcagaaccctgccctggccacggcgaaaaaaaaaaaaagcgttgctctgcctcctttattgattccccagcaggagccagcttgcacagaccttccagctctgccaatgccaagggtacttccctccccccaccccagtgacctcaaagtccacgtcacagtaaaacttaagatcatcaaacacacacagacagcttctccaggtccatctcaacagcctcagagtccagtcctttcaacattgcactaggagggatagtgcttctaaggcctaatgggtggcctcaaaataacccccctagttgttcgggtttcacactttgtacactagtgccaatttaagtcctggctgcctcgaaaggctggccacatacaattcattctccaggctcagtagttggaatttactgtctgcattcatcttctcttcgtcagtttattctttgacaccctgaaatcgcatctccctgccccgtattgctattaatattataaccaccaaagacctcttatctgtactcttcatttgaacaccgtctactcttgaacaccctttcaacacactgtattatacacagagtgggtacacatttactagcatctagtgcctggtttctgtgttattttggacagctttccaagaagaggtaccttgtaggaaggtccggagcctgggggtttgattcgttggctgaagttttggtatgttgctgtgctggacagaggcaaagctaatattgctcaggagagaaaggatgggagaggagcaagcttccacaacaccatcccactcaaaactcctacaatggctctctggggacaacagcattactaaaaacctacattggcattcaagctattatttctatttttattattcatggtctgaccataccccatctataactcattctgtatactctacatattcctgccaaacagagcctctgaaactggcctccttgttcctactttcataccttgcatgttattccctccaatggtaacactcttccagtaccctctattacattgtttaaatctttaaggtctgtctcaaatgatacatcctccatgagatttttcctaattcttcccaatggtccctttttcccacctgcccaactgttactgtttcttctttgaactccaagaggtttgtattaatacctctggtttagtatttaactctctgtgttttgtgtttgtacttgcatgtacatgcatgagcttgtcttatctcctccaacaaatacgtgctcctgggaggcataactgggtcttactcatctttttagctccagcagtgcctagctcagtggaataaaaaaaaaaataaatacataattacaagtggttgaattgaggtgtagtaaaaagatcctgaatgctaatttagattgtttagcataagtctgccatgcataaacttttgggtggtatccagtgtgtccatttcaggacccaagagagaggcagaatttgagtctcagtatatagacaagatctggtaatgtttcaagaaagaagtctcttccttcaaagagtttacaatctaggaatgagacagcatataatgttttccactaagaaaaagtttactgcatggctggaagttttaatctgaagattaaagaactgagccaggcgcagtggcccattccagcactttgggagtctaaggaaggaggatagcttgagcccaggagttcaagaccagcctgggcaacatagtgagacccatctctacaaaaaatacaaaacttaatcgagcatgtggcctactcctgtagttccagctacttgggaaagtgaggtgggaggattgcttaagcccagtaggtgatctctgcagtaagcagagatcatgccactgcactccagcctcagcaacacagtgagaccctggggttttttgttttggtttggctttggggttttctttgtttgtttgtttgttttgagatagagtcttgctctgttgcctaggttggagtgcagtggtgtgatctccgttcactgcaagctccgcctcccaggttcaagcagttttcctgcctcagcctcctgagtagctgggactacagcatgtgccactatgcccgcctaa

SEQ ID NO: 1242182 - DNA, 4001 bp, Homo sapiens
cagaatttcagtgtggagaaaacaggaaaaggagaagttccctgcagagaaagaaatgcgctaaccctccctctttgggggccagggttgggaactaaaggtactcccacctgcattccaattctggctaaataggggagtccttggctgctacagcaggcctctcctgacggcctggcagggttaagaagggcggcaagggcacccaccctgcagtgagttccccgtgttccttgaaacggagcggggcagggcccctgaggggtgtcttactttgcagccatactgcagcgccagcttgttgaggctgtcctcctgggccagctcccgctgcagcagcaccacgtcacctgctcccgcctggggaggctggtggacaccgctcttgtggcgctccttgccccggggccgcaaaaccacacggtgagactcttcttcagaagagtcccccgagtccccactgccattcttaaacatgtatacgtggctggtcggagtcccacacacaacagctgggccttggaaggtcttggttaacaattcctcgtgcctcattttcttcactgaaaatcaagccggagggttaattccacagaagacataatcatccctccaccgcctcgtttaaagagaagtgtcttgttagagagtattccttttcctaatcgctgcaaatactcagcatacatcatcaacagaaaaaaaagaatgtgcttatgctggctgagatggaagaagataggcagaataaaaaccctttgttttttctaatcgcatacgttttgtgcagaaaacgaaccccgcccctgttcctcatccatagctgtctcccctaaacccacatctgtaaagaaacaactacttttgctctcagagtagtaagttgagatccttgcaatggcaagtaagggctgccgccagcctccgcgcactcagaatcttcaactcagaagctttgcacaataattttgtattcaatattttacacattgcaaagtatcttcactaagaaggtcagcgctaaggactcttgctcagaactgtggggctaaactgctcttactttgacacagtttaactcacagtatgtggggcaagctacggggagaactcatgcctgtcagccggagaaaagcgtccagtttgctcacgggtcactttgcattcattacatccccattgtctggtttttattttccccttgagtcaacagccaaagccgcaagacccctgttcctctctccagattgttcgcgtgagattccagaaacgaaatctcaaacacgcgggctgacaacttcagaaaaaggtggcttcggagccacaggggagcagcccgtacggggacagcctgcggccccagctcgaccccctactccccgcccacgccttcgagggtcacaggcccacaccccgctccgcgcgctcctgagcctgcccggaggcgggaggcggccggcggtcctcggggggttgagggtcacctgcaggaccacggcggcagcccggggacggggccagccttcgcgtccgagctcaggggcggcggcagcagctccaggcccgcttccctccaagtcccttctgcgaaaagatggggcacctcaacaagagctgacaggaaaatggggagcggcccggccccagggctccacggctccacgggcggggccctaacattccagagggcagaacctctgacctctgacccccaaccctagccacctggggccagcccacgacagtcgcggtcaccgcccctccagctggagcgtccccctaggagcccggggaggggcggcccgcccgcgaaccctcgagcgaggccaggtcgccgtaccgccatgagcccgcgcggctccctagccagaccgcggccccctcgtccaggccccggtacctcagcgcccaggctccgccgcgaccggcgaccggcgactcgcgacccgcgacccgcgacccgcagctgccaccgcgcctgcggattggctacgaacatcagcagggcccccctgggggcgggactggggaggcagccaatgaagtcagcgctgggcgggcactggagcgagcctggctgcgcggagagctcatcccgggaccacagggcccggggcggggctcggggcggggctcggggcggggctcgacagggttccacaccccggaagtggccctcgccccgcccacccgcctaccaggtctacccgcgcgggccctggcttgttttcgcgtctgttcggagtaataaggcacctcagctcctccctcccaaagtgcttggctttctgctgagccgcagctttctcgcccgtaaagaggcctttgaccccacttgtgggtaatgatctgtagctgtgactcggggtggattccagtagcgtggggtcccctgagccctcctgcggggaagggctgggcgcagatgggcgaggggtctttctgcggcgggatctgcgctcctgggcctttgagggccgcaccaggggaggcattgccccaccccgagaagaaaacagaaatccacgagtgtaaaacatggatgcggacaacagggaccaagaaaacttaagtcgtgtttatcaaatgtcaggtggccgaggatttcttaagatgaaaagtggtggaagaattctcacacactggccgggcgcggtggctcacgcccgtaatcccagcactttgggaggccgaggctggtggatcacgaggtcaggagttcgagaccagcctggccaagatggtgaaaccccgtctctactaaaaaaataaaaataaaaaaaaataaaaaagttagccgggcatggtggcgggcgcctgtaatcccagctactcaggaggctgagacagaggattgcttgaacccggaggcggaggttgcagtgagccgagatcgtgccactgcactccagcctgggcaacagagggagactccatctcaaaaaaaaacaaaaacaaaaacctcacacactaaggcacaaagttcagagcttctacttaaaaaggaaaaccaaaattaaaaagcagataacctagggaaaataaactgaacacaacaaaggattaaaatccttcgctgagagagacttcatatgaataggaaagatgctaagacctcagcaggtctgagggagacctcagagagacaggagcagataattcagcaaacaatgcaaatggtcaacaggttgaaaatgtttttaaccctcacttgcaatcagattaaacaacaaagcaaacattaaaacaagatctcacaaaccttttcccactaataggatttgactgtgtccacacccaaaactcatcttgaattgtagctcccacagtttccacctgttgtgggagggacctggtgggaggtgattgaatcatgggagcaggtgttttctgtgctgttctccagatagcgaatgagtctcactagatttgatggttttataaagggaagttgccctgcacaagttcttttcttctatctgctgccatgtgagatgcacctttcaccttcagccattattgtgaggcctccccagccaggtggaactgtgagtccattaaacctctttcttttgcccagtctcgggtatgtgtttatcagcaggatgaaaacggactaatacacccacttaaactaaaagtcaaattgttaatcttcgtggacaaagcccaaaatggtctggactccaggacttaccctcccctaacccccagggttctcaagactctggccttggaatgagagtgacatcatcagcttccctggttctgatgtttttggacctgcactgaaccatattatctgcatcccagggtctccagcttgcagacccacctgtcccgggactttcagtctccttaattgtgtgagccaagtctaatctcctctctctcactcactcactttgtgtctctctctataggtagaaatagatatatagatagatagacagatatctcctattggtaggtaggtaggtagatagatagatagatagata

SEQ ID NO: 1242183 - DNA, 4001 bp, Homo sapiens
ggtatctccagccccattaggtctaaaataaaatgtgctcgaaagaagaaaaaaggtttcagaatttcagtgtggagaaaacaggaaaaggagaagttccctgcagagaaagaaatgcgctaaccctccctctttgggggccagggttgggaactaaaggtactcccacctgcattccaattctggctaaataggggagtccttggctgctacagcaggcctctcctgacggcctggcagggttaagaagggcggcaagggcacccaccctgcagtgagttccccgtgttccttgaaacggagcggggcagggcccctgaggggtgtcttactttgcagccatactgcagcgccagcttgttgaggctgtcctcctgggccagctcccgctgcagcagcaccacgtcacctgctcccgcctggggaggctggtggacaccgctcttgtggcgctccttgccccggggccgcaaaaccacacggtgagactcttcttcagaagagtcccccgagtccccactgccattcttaaacatgtatacgtggctggtcggagtcccacacacaacagctgggccttggaaggtcttggttaacaattcctcgtgcctcattttcttcactgaaaatcaagccggagggttaattccacagaagacataatcatccctccaccgcctcgtttaaagagaagtgtcttgttagagagtattccttttcctaatcgctgcaaatactcagcatacatcatcaacagaaaaaaaagaatgtgcttatgctggctgagatggaagaagataggcagaataaaaaccctttgttttttctaatcgcatacgttttgtgcagaaaacgaaccccgcccctgttcctcatccatagctgtctcccctaaacccacatctgtaaagaaacaactacttttgctctcagagtagtaagttgagatccttgcaatggcaagtaagggctgccgccagcctccgcgcactcagaatcttcaactcagaagctttgcacaataattttgtattcaatattttacacattgcaaagtatcttcactaagaaggtcagcgctaaggactcttgctcagaactgtggggctaaactgctcttactttgacacagtttaactcacagtatgtggggcaagctacggggagaactcatgcctgtcagccggagaaaagcgtccagtttgctcacgggtcactttgcattcattacatccccattgtctggtttttattttccccttgagtcaacagccaaagccgcaagacccctgttcctctctccagattgttcgcgtgagattccagaaacgaaatctcaaacacgcgggctgacaacttcagaaaaaggtggcttcggagccacaggggagcagcccgtacggggacagcctgcggccccagctcgaccccctactccccgcccacgccttcgagggtcacaggcccacaccccgctccgcgcgctcctgagcctgcccggaggcgggaggcggccggcggtcctcggggggttgagggtcacctgcaggaccacggcggcagcccggggacggggccagccttcgcgtccgagctcaggggcggcggcagcagctccaggcccgcttccctccaagtcccttctgcgaaaagatggggcacctcaacaagagctgacaggaaaatggggagcggcccggccccagggctccacggctccacgggcggggccctaacattccagagggcagaacctctgacctctgacccccaaccctagccacctggggccagcccacgacagtcgcggtcaccgcccctccagctggagcgtccccctaggagcccggggaggggcggcccgcccgcgaaccctcgagcgaggccaggtcgccgtaccgccatgagcccgcgcggctccctagccagaccgcggccccctcgtccaggccccggtacctcagcgcccaggctccgccgcgaccggcgaccggcgactcgcgacccgcgacccgcgacccgcagctgccaccgcgcctgcggattggctacgaacatcagcagggcccccctgggggcgggactggggaggcagccaatgaagtcagcgctgggcgggcactggagcgagcctggctgcgcggagagctcatcccgggaccacagggcccggggcggggctcggggcggggctcggggcggggctcgacagggttccacaccccggaagtggccctcgccccgcccacccgcctaccaggtctacccgcgcgggccctggcttgttttcgcgtctgttcggagtaataaggcacctcagctcctccctcccaaagtgcttggctttctgctgagccgcagctttctcgcccgtaaagaggcctttgaccccacttgtgggtaatgatctgtagctgtgactcggggtggattccagtagcgtggggtcccctgagccctcctgcggggaagggctgggcgcagatgggcgaggggtctttctgcggcgggatctgcgctcctgggcctttgagggccgcaccaggggaggcattgccccaccccgagaagaaaacagaaatccacgagtgtaaaacatggatgcggacaacagggaccaagaaaacttaagtcgtgtttatcaaatgtcaggtggccgaggatttcttaagatgaaaagtggtggaagaattctcacacactggccgggcgcggtggctcacgcccgtaatcccagcactttgggaggccgaggctggtggatcacgaggtcaggagttcgagaccagcctggccaagatggtgaaaccccgtctctactaaaaaaataaaaataaaaaaaaataaaaaagttagccgggcatggtggcgggcgcctgtaatcccagctactcaggaggctgagacagaggattgcttgaacccggaggcggaggttgcagtgagccgagatcgtgccactgcactccagcctgggcaacagagggagactccatctcaaaaaaaaacaaaaacaaaaacctcacacactaaggcacaaagttcagagcttctacttaaaaaggaaaaccaaaattaaaaagcagataacctagggaaaataaactgaacacaacaaaggattaaaatccttcgctgagagagacttcatatgaataggaaagatgctaagacctcagcaggtctgagggagacctcagagagacaggagcagataattcagcaaacaatgcaaatggtcaacaggttgaaaatgtttttaaccctcacttgcaatcagattaaacaacaaagcaaacattaaaacaagatctcacaaaccttttcccactaataggatttgactgtgtccacacccaaaactcatcttgaattgtagctcccacagtttccacctgttgtgggagggacctggtgggaggtgattgaatcatgggagcaggtgttttctgtgctgttctccagatagcgaatgagtctcactagatttgatggttttataaagggaagttgccctgcacaagttcttttcttctatctgctgccatgtgagatgcacctttcaccttcagccattattgtgaggcctccccagccaggtggaactgtgagtccattaaacctctttcttttgcccagtctcgggtatgtgtttatcagcaggatgaaaacggactaatacacccacttaaactaaaagtcaaattgttaatcttcgtggacaaagcccaaaatggtctggactccaggacttaccctcccctaacccccagggttctcaagactctggccttggaatgagagtgacatcatcagcttccctggttctgatgtttttggacctgcactgaaccatattatctgcatcccagggtctccagcttgcagacccacctgtcccgggactttcagtctccttaattgtgtgagccaagtctaatctcctctctctcactcactcactttgtgtctctctctataggtagaaatagatatataga

SEQ ID NO: 1242184 - DNA, 4001 bp, Homo sapiens
ggcaggcaggggctgccagatgtgagtgggggccttctgggcctgccaggccagcgcctgtgtctgctgcacctcctggaattccattgacgttggaatctcgtgtggcaccgggggctgacctttgggggcctgccagatgatggaagggcagtgcacagcctgcggggcagacagtggggcagacagcggggccggcagcacaggctggggcacctgcgggccagcgggcggcgccgcgggtacctgcgtagcaggtggggccgtaggcacctgcggcgccgcctgcacctgcggggccggcagcctagcctgcggggcctgccgcagtggaggtgggggtggcagggcctgccagagcggtggctgggtggccaggacctgtggggcaggtcggatgggcggcggcgcctggcggatcagcggcggggcctggcggatcacaggtggagcctggcggatcacaggtggggcctggcggatcacaggtggggcctggcggatcacagcgggggcctggcggatcacgggtggggcctggcggatcacgggtggggcctggcggatcaccggtggggcctggcggatcagcggtggggcctgtcgcaccggtggtgggccagggcggatgggtggtgggccagggcggatgggcgggggcccctggcgcatgggcggcggcacctgccaggtaacggctggtgcctgccaggtgacctgcgtggtctgccaagtcaggggagtggcctgccagccttgctgcgtggcctgccatcctggcgaggtcgcctgccagcccgggggtgtggctagctgcgctgggggtgcctgcgggccctggggaacctgcggaggagcccttataacttgagactggatttgcaggatcagaggctgagcctgcggggcccaagaagccatcggctgtgcaggtggggccatcggctgtgcaggtggggccgccggctgtgccatcggtgctcctgaagctggaggctgggtcatcggagctctcgcacctggaggatgaatcatcaggactcctggacctggaggcttggccatcggtgctcctgaaggctgaggctgggtcatcatggctgctggaggcggctggaccatcggtgctcccggagcagcaggctggaccatcaggactcccggagtcagaggctgggccatcaggactcccggagctggaggctgggccatcggtgtacccggagggggaggatgagccatcggtgtccccggaggtggaggatgagccatcggtgtccccggagggggaggatgagccatcggtgtccccggagggggaggatgagccatcggggtccccggaggaggaggatgcaccatcggggtccccggaggaggaggatgggccatcggggtccccggaggaggaggatgggccattggggtccccggagggggagggtgggacattggggtccccggaggaggaggatgggccatgggagctccgggagctgaaggatgcaccatcaggactcccggggtcggaggctgggccatcggggctcccggaggtggaggatgcaccatcaggaccccgggagtcggaggcttacccatcgggccccccagcgggggagccgggactatcgggccccctagggcaggaggctgggtcatcggaaccaccggggcgggcagctggccctgtggggcctcccaggcaggctgaggtgcctgccaagcggccaatgaagcctgcaagtcaattggaggtggatcccaagggactggcggagcccgggaggaagcgggcggggcccgcatcagaaccgtagggcggctatagacaggcggcttcggggcctccgccggaggactcgagtcacccagattcttacttagctgcgacatgtccctttgctgacagctggtgggtcttttcctcggacagctgctgggccttttcctccagagagaagagaatgcctacgtggctgttcagaggctccctccctgctgaatgctgaataggaagtgagtgctgctcgctccgcagctttccgcagtaaggaggaggggggaagggggctcaatcccgccccttccccgcccccgaccaccacaagtggatattgcataggggcgtctaccggagtcctggctgacacaggatcccttctcactctgtccagtccccaaatgcagaccagtcagactccacatggatgacttttcacaggggagtgacaggaacccatccatgttttagaaaaatcactgtactgcagtgtggagtgggagcagaccactggaaacatggaaggtatccaagacggcggggggagatggtgtggtctgggctaagatgtgaggcggagaatgaaaaaagcgcatttacataagagagttccaggagttatagcagacagatacctgtattataattgaataaaggagtcaaagacatggaaaaggcacacaagtccctgcctggagaaagtgggaagttgcagggactgttactctcttagggtcccaggagaggcacacgggaagagaggctgatgagtattggcagacacagggcatttgcggtgctgtgggactgccaaggagagataccctgtaggcactcctgtatgatgtcttgggagtcctgcttggctattcctcatgaaaatagagttgtgggagggaatgtggttgcactgggtcttgaagaacacaggcatgttagagacacatggagaaaagggacagcagcgagtagagagagaggaaaagaagtcacggaactgagacatgccacacatcagtggaagacagcatttttagtatgggaaaactgcctgtggaatggctcggatgcaggaacagagtaggtttctcagtatttttcatctgcagaatgggaaagaaatttaaaaaatgaaaaccaaataacgcacctgaagataacaaaatgggtatataaatagatcaaaaattgatatatttggatatataggaaaaacaggcaaagaataaaaaaatttctggggaaacttctcgtgacaaaaatcagtttaaatatgagacaaatcaagtattaacagataaagcagatgacaatagtattattgggcaatgctatacaactttatggtgagaggaagtgataatctcagtaattgaaaagctttctggaaatatacaaagcactaaatatcaaggatgtttcgtttaaataggctgttggcagcctacggcaggagtccagagtgacaaaacgtgccaccagggggcagatgaggacgatgaagggtacaccccactccttcccaggtacccttagccaggggtcctcaaatttggtaatttatggacccaagagaaggtatgtacacactcccaatgttattattgccttaaacaataatagaagaatttgggggtaaagtttcagtgattttctggacacttaagggatgttgttattcccaggaaactcttttcaaaacagtcagatttttaagggtgcttgatgatacagtagccccccccaccttacctgcaggggatacattccaaaactctcgatgcccgaacctggagacagcaccaaaccttatatataccatgtatccctttcattctccttcttcacaatttcacagatagttttgtttttgccatatatcttagcaatctcagcatgcgattttttctttccttattaagtcaagaactttcacctttttccttcaaggaagcacttcatagcttccgtttggcatacctaaattgccaggatcactattcttacattttggggctattactaagtaaaacaagggttccttgaacacaaacactgggaaaccgatggtagatctgatatctgaagcagctactaagtggttaatgagcaggtagcgaatacagtagcactcctgtgcctgcagtttcacattgtgtggtttcagttacctgcaatcaaatgcagtccaaaaaattaaatggaaatttccagaaat

SEQ ID NO: 1242185 - DNA, 4001 bp, Homo sapiens
gcttatctcggaacctatctgtttttgccttccctccctccaccatcactcatctcttccacagctctctgggcctctccctgccaccttggcacccatagcttaaggtaagacccgtccacccagcctggggctcagacaatgccctcccatgcctccccgcctggtactggccttcggactgccgctctcttttggacattgatgttgtcccaccacttggcgaagaaggagacctctgcccagaggaagcgccgccgggggtcctcctgcagcttagacaccatgctattgaggatgtgttgggtctgctctgtgtagtacttgtcaaaggtcttgatccagcctagggagccaatgtagggtcccctgaggatgccaccatcttcttcgacgtccctcccttgtattggccatcagaaatcccactccacactccagctcccaggagtctgcagggccctcacctgggtcattgtgagagtggggcaccacaaacacctgcaggtcttcagcatcccagtcgtgcgggtcgtaggagatgtcgaagccttgcctccacacaccaccatccacgttgtcaaacggcagctcctccgacacagtgagcatctgccaggtgaactgcagctcagtaccccagtcgtggccactgtacgtccctgccagctctgactcttacctgcagctctggcttctgaccccggccccccaaagcaaactggcagtcctgcggggagatggagaagaagctgggccggggctccggtggcaccacccaggagccattgaccgtgtagtagggcagcatggcgggcgggccctctgcgttggctgtcagctccagcacggagtccttgatatggctgataatctcatggttctcctccaaaagctgctccagctgctcaatgcggttctgcagcacagaaatttggctctgccaaaaaaccagaaagcaatcacacacagctccttatgccacagggagggtctctgcttggggtctaccagctgaggcctgagtacaattcttccctcatcagtcaaagccagaccatgagcctagagggatagatgacaccgttcagataaagggagctgtgcagatcaccactgaggactacactccacttgggttgggagaaccatcactctctagctcagggatggcaaagatttcctttcacctacctattctcaacaatcggtgttgcctgtgctgaggatttcagcggggcttaatggcaaagaatgctgcaatcaattagcaatgtctgccaagaattcaggaggggctgggcgcggtggcccacacctgtaatcccagcactttgggaggccaaggtgggtggatcacctgaggtcaggagttcaagaccagcctggccaacatggcgatacctcgtctcgtctctactaaaaatacaaaaattagtcgggcatggtggcaggctcctgtagtcccagctacttgggaggctgaggcaggagaattgcttgaacctgggaggcggaggttgcagtgagccaagatcgcgccactgcactcaaggctgggcgacagagcgagactctgtctcaaaaaaaaaaaaaagaaagaaaagaattcaggagaacagagtgacaatactcattgccattgacattttttcttccttccttcttttcgccatcactgtttttagctgagggtttctacaaaacctgactattgggaaggaaggctcctgtcctgtactgacattaccctccagcggggggtgggaggggaggcggcggggtgggaggtgcataccctgagcccaggtgacttgtatacaaagaaattagcaaccaggcacgactcacccgggggaagttcccaccattctggtgtcgggtgggatcgtgttgcactcggtccagcatgaggtagagcgagaagactgccacacagaagatggcagccccacacactgtcacctgctttttcagcttcatactggcctccacacacacctggcaggaaggacaccatctgtagctccaacatgcaaaatgcccgtggcagtctttccaccaaataccccagtgagttcctgagggctgttccaaaggaacacccatttgcctggctccaagtagcacaagcagcacatctgaggctggcccacctggtcctggtagcagctctgccgctagggtggagaggacgctctcctttggctggtgctatgaaaaacgggcccaggataagagtcccagctccgactggagcgcaccacacaagctcctgattacacagcttccctgcctagataggaggtgcctgttcaggctcctcggccatgtgcttctagtttcaggtgaataagctagtctctattttgtttgatttaaaagtttagccagaacccaaagagactgataggaaagcctttctcagtgccctttcgggtcaaactggcactcaccagaaacagtgcctggcacgatcctttctcagaaacacagaatgagtttctttctaataaagaagaaagatgcttgtgtttctagcataaagcaagccctgtgtgttctccctgtttctctactgttcactgcagtgggaaacttccagccgcggtttgcagagcacttaggggacccctaggaagcctgcagtgacgccgaaggccccctgggaagggagagacggggcccagtgctcagctgcgaggcaacttcaggggacccgtgccccccgccgccaccgccctcgggctccgcttgcctgctcaggaggaaggaggacgctaactgcggagccgagcgtgggcgggaccgcgctccggagtctgctccgcgggccctggggccgaggagctttgtcgcctctgcgttgtgccctacttagcgcgatctgattctgctcgggagcttccgggcaatattttcagcccttagagactgggtctaggccaatgtgggtggagctggggagagagttggatcacagagggcaggcacctgccgccaggtctctggccgcccgcccggctccctccccacccgctccgacttcgtcggccccggggaccgcagagacaggcgccaggtacgggcctcaggcagcctcctgtcccttcctggcccctctgacgccgcagtggcgctcgcactcccgccgcccgagcccggcctctgtcggggcagccggagccctcccgcgcgcgcacccggcccgttaccgtcagcgcccggcctccgcgccgctccgggcccagtcggccgagctgccggctctcacacgcccggggacggcggcccgcgtgcaggcagcgacgcaggcgaaggcgggcgcccgcccacccgtagccccctgctccgcgcgccgctgccgcgctcccgctgggccccgggccgccggcgcgctccgctgcgccggccccgcgcgggtccgccagcctctgaagctgccgggcccagcagcgtgcggggcggggacagccgcgccgcccgccccggcctgcgtgtgcccggcggagctgacaggagctctggccgccgcggtccccgcccggctcctcccgggcccgctccgctgggctgcagtgcgcagccgcaccagcccgggccgggcctggccagctgcggaacctcaggagggacgcgcgactgaattttttcggaatcctacttgagtaagcgcatgatcgggcagtggtcgaaacgcccgcctccgtctcggcagacgcgtagcggggtgcgttctccgcggcctcacccggctccggcccaggtagccttaggtctctgtcgttgcgcccctcgggcaaaggggtgctgcctcctgtcggtacagcgcattcctcgagtccctttcctttccgtgcctgctctatgtttcctgccagcgagtgaacaagacacagacttttcttggctgtttcccttttactgggcatctaggttgtttacagtttttcagtgtaatccatactgcaatgaacatctccatgaattccacatttttg

SEQ ID NO: 1242186 - DNA, 4001 bp, Homo sapiens
ggcttttggacagttcaggtaaagtgtaagccatggggagtcaggcccctccatctggttcccagctctgggtcctctctcccaagcagggccaagattggcaaatcagggacccttggcagtagatgccccaactcccatggcagccagcaccatgaccgtcaaatagcccctgtttaccagtggcaaacccatggtcttatgggaagggccctgggaaggggttaggcagcctgagtgtggattctggtggcctctgcacccctaaataaataccgggaaagaaactccgtgaagtcaggggcaggtttgcctcattccctgctacaccctagtgcttaagggtatggcccagaatggacaccaggagatatttgctgagccagtgaagggaggaagggatggtctctgccttcttgtagccaggaagaacagtcttaaccccagattgagagtcagtccaatttgaaatagaagctgtgtgaacctgagtgagtcaactacacatctgtttcttaatttgtaaatgggtataaagacctactagataggagtataaggactaaacctgataagggtggagcatgaataagacacttaacagtggttatagctggggaatgggatgggtgataaggagagatccattactttatctagaactgtttgaaatgttttcctataagtttgtattatacacaataaaaactaaggaccaattgcacagatgcccaagtggcaacttccctagtcctgaaatcctgataccaccctgtgggcagagcaactcagctgtggcttctccagagtccacagaagaagggctgtagtcatttcagggctgaaatgtggccatacctggccctaggacagggttcctcacctggacaggttctccatcacgccacaccagaccttctccatcactttcccagcaaaggtgaacttcctggcccacccatgcctctgggatggtcagctccacccggaaccagcaggtccaccatctgcaagagagctgttgtgataggcctagaggtagaagtcctatcctgatatccttccttggataaagtgtcggcaggggcttgaaactctccaagcatctgcagtgtcacaaggtactcagctttgagtcacaagaaaggagcaacaaggtgagaagcaagatgagggaaacaggcagaggcgtcaaaggttcgtgatccctagggtgcccttcctaagggatgtccagaggcggccacgtgggaatgaaaaccatcccctgaagacccagggaccagagagctgttcccagcagagggtgctgctcccagcagagggtgctgctcgatcccacgtagttgtctacggcagagggcagacaacgaaggtgtggctgggagctgggttgggacttcccctaggcctgtggccccgcccacccgctgggcgttacctacgtgggtccgaagctgtcgccgacctgcgcggggcggaagtcccgctggactgcctcctggtagggaagtctctccggcgtcaggaagctggagagcacagccacagggcagctggccccaaaaagcctgcgtgggacgggccggtgggcacatgctggaggccgccccgtttccgcctgggggccagctggccggtggggccgcactttccctggatcctccgccaagagggctgcctggccgctccgcggcacagtccattccctaccccctcctccccggcccctgccctgcccgcggcgggcactttgtcccgcggcccgggtggctgcagcttaggtttctccccggaaggaaagcttgaggcgcacggttgcggtcggccggctgcgggggaccaggggccacacctgccgcggaggttacagtcggtaaagtagagcggcgacacgaacttctccacccgctccagcgtggtgcgccagtgcttcaaggccggcgcagccgccatcgccgggctctcgctcctctttccggaaggcccctggcgctaccgttccgctccacggcaggaaaccaaaggttccggcgtccagagggcgcctcccagtcccgggcagcttttcttggaacaccggcggctctcggaagcccagctgctgtctgaactttgagccgagttggaagctagaaactgtttttgaggctctcctatgttgtccgaaatagtgggccgcagggaaaatctcaaaataaaatgggaaatttgacgattagaactctcgaaagtctcaagacagagacttaggccattcggcaagacaggcgggagcctcagctgctgcagacccagcctcagaagcagcaaccgggagacctctggctctagctgtcggtgaacacggaaagtggtgtttgcttaacgtggagccagactacccggaataggtgttttcataccggacggagatcagggtgttagtgagcagggtggtagagctttacgcccaagttactacgacttactcgattacacgctttactgaatgtatattgctaactcttgcacatcaccagaaactctggagtttgaggtggcagaacagtcatggcattgacgatcccaatggaaaaatgtatttcaccatacaggactgtagagtcccgggaagccataataccagaaacagacctccagtttcattctcatccctagtactccactgacagctttattttttttctcctggggttgccaagagtctttgtctataaaatcattaggaacaaaaaaaaatacacaagattagccctgatattttaatggaaatactgaccaagtttacaacatttcaaatgcagatcacacggaaaggtgactaagtacagaataacaaatgtgatttaaaacaaagataacctgctgctgcatataatacaggttgggtttagagcttggagctcagatgtcagacagcaggaggaataaaaatgctacttgtgaaaacccaggctgtaggtaaaacttactcttttgttggttgcactggtgggttgggactttctcctgaactggccttgaaatcctatcctgacctgcaggcaagtgctctggacaaaacactgcaggggcagcaacagctggggctgaccctgatcacaccccaccaatttcccctatggttccaggtcaacatgacctttcttgagggaacacggggataggtgaattatttgagaaaacctcaagatctttcccctaaatcagtacacatgaccaccgccaagtcagacactgccccagctttgccctaaaatctcatcccacaaagctctttttggcaccctacactttggctcacagtctcttctccccagtacaaaaaaagcctaaaatcaggccagggtggctcacacctgtaatctcagcactttgcgaggccgaggtgggaggacagcttgaggccaggagtttgagaccaacctgggcagcatagcaagaccctgtctctacaaaaagttaaaaaattagctgggcgtggtggcatgcagctactcaggaggccgaggtgggaggactgcttgagcctgggaggtcaagcctgcagtgagctatgatcgtggcactgcactccagtgtgggtcataaagcgagacactgtctttaaacaataaaagcctaaaatcagagaggtctaccatgtgttttgaaaatccaggagccaaaaaattttgtttttctttttggtggtggtggtgatttttaactaaaaagcaaacataaaacacacagaacattgctggttacaactaagacttgcgtaatggttgctgaagaaaaatccaccagagtactgggaggggctcagttggtctttgttcagaaagtccaggttaaccacatagaaaaatcctaatcattcatgtttaaatgtctgctagtttaaatttatgtaattaaaaaaataggtatcccatttcaaattctctccctcccaactccatttataaggtataccacatgccttatgcacacttttttttcaaacactggtt

SEQ ID NO: 1242187 - DNA, 4001 bp, Homo sapiens
tgcacccgcccttccttgccaaatcccctttccaattgcagtacatagtggcattaacctcacagagcatccaacagatggcagtgggctgtctggaggatactggtgggagggtccataatttgtcccttagaccctcttctgtgacccagctctctcttctttctggtgcttggacaagagaagcctggggccagggcctttgttaagaggcagagccatggtgccaggatcaggcagatctggcagcacagggctgcagatgcagctgtgggggaaatgaacgatggtgtcagaagaccaaaccccatacagcgtgggttgggccaaaggggaattcaagggttcccttctatttacttgagaattgagggaacatttgagataaattcagaggacaagagccacctcagatgtaggcaagggcagggcttggggcaggtgagggatatcaaggttcgggaagctgccagccttaagtcgttcagatttagaaagacaagagctccctccacacaaataaggtcataaatttgaggtaggagggtcagaaagacaaatatctatagcacacactgatttgctttctatctacccctccctgcccccaaccattcctcacggtccccatttatcaccacaagacttctatgatcccagttcctgtcctggcataaggtcctgttcctcactctatccctgggagtggttctgacttgaaattacatggtttatatcctgtgcctctctttttcaggcctgggagaaagccgtttcttctgctcccctggctctctcactgaagggaactgactcgttttttcctttttctttagagaggaccatcttgtgaggcagggacacacagtgctcagccagtgctggagttgcgggggggggtgggctgcggtgcagaggctgagcaggcaggagggcaggtgtctccgcagtgaggcagaaggggagggggaccgtttgggcagctgcagtttgccgcagtgtgtgagtgtgcgcgctgagctccggctccagctccgcccccaccccccaccccagcatgacaagtcattttcttggctgcttctgcatggggggtggggatggggggatgcagagagagagaagaaactggctcctctgttcaagagcccccatcttgggaagagaagcagagatgaggtgggggtagggctgagactgggaacctgtggggttgacacgactggaaatgcagggcagccgctggggagggagttctccgtctccagagtggcctcggcagggccagaaaggggggtttagagtcccattctaaagctagccgcagggaatagggtgggggagcccactgcaaaccggttggtctgtaaggaggcgcgtgccacgtcttagtgaccctttcctcccttcttttccatagtgtcccccaccttcccttacttggcaaaaactcactgccctgctcacccccagcataggagcagctgagcaatccagcagctgacacccaggggccctcctattaggcacattcccataacatccccctttctctcagattcttctgcctctgaccagaaacatagcccccaaactcctccagcatcctgggctgtcaggcagagccagtggcaccaccctctgctgctgtcccaggctgatttctcccatccccgcccagctggagaggtggactgtcacagcccctggtggcctctggttctgggtccaggctgggcccacagccagtaacgttcatcttctctctccatttccccatcctgcctactgccactgggctagttctagatgtgccagattaggtaccagcaccctttccatgacccccatcccacctccctatcacagtgtacccccacatgccaagccctttggttcggttcttaccctggggtgtaggaggaagcctctcatggaggcggcagctccggcctcagccggcagcttcagggaagagtctgcagcacttagggtgggagtggggcgggcggtgggggggggaggggggtgcttgatgaggagggcggcgccagggcggggaagaggggctggtccgtgacgaggcactggagacttaactgtttctttgccttcacgacgtctgagctccagtgcttttgcttggctctgtggggctgagggattgtctagcagctcaaggagcctctgcaatgtcctatggcccataggacctttctctcccaaccctgcttagttaggaaatattcttttggcatcagccaaaagaccaaagccccatgctagggcacagagcgaggctataggaggcatgggctgcgtgggctctcccccttctcttagaaaccatctgctgcctctctcctcagatggatccagggagtgaccttcagtccctggaggagcaggagacaaaggctgggggcccaaaagcatggggtaggtgtggggaactgcttaagacaaaggttggggatgcagagatgtgctgccttcttctgaacctcagcactacagaaaccaaggagggcagaaataagtcttattttagggttagagggtagtttgaaattccggagtggacacatggtccctagcctgttggggtggggcacagggaccctgagagctacatgaagtttcatgggaatgcagcataacacagtaaccacacaggcactgattcttgggattcttgagtcattggatatgaagagacaagtccctgaagggacagggagctttctgccttacagtgaaggagttaacaaggaccaagaaggatcaccagggcctccggcccaagcaaggttgtaggccaattattaaatgtaacagaagtactctttagattaaaaaaaccctataatgactttgtagggtgattgggttcttgctctctccttgtctctttgctgtttctatattatattatttggatctttctaatgttgatcctgtttcccttagtctctacctccatctcagatttagtaaagcgctctaggactcaaaggaagaatctggagagtggtagcacttccttccaacccgaggatgctcatgctcttacatagtccttccctgccctcttcccatccaccctccccagtttggccagctcctaaggccttcctcacaatcacagccacccactcacacccaaacactagccccacccttgccccaggctgccaagagttacttttgaaggtcagagaagccaaaatagtctgtgctctcagcatcccccatccccccttaattgcagccagaggagaggaggagctgagtcactagtactcttgggggttgaggggacaaaaggggagcaatccttgcttagatccggggatgcaaatctgcgacaatggcaacaaccccgtttgggtagaagcggccatctgcagagatacacagggaaaaccaggctgagttctgagcatcacaaaagggaaatacccctcttctgcaacttcatcgttcttatttcctcccacctcaagccttctatctcctccctgctttctagggctttctggagtgtgttaggagggaaacttaagtagacatttagtttacgaacaaaataacatttcccagaccaatacagagcccacccatattctcagctgccacccccaagggccacaccctgggcatggtgccaactcacagtggagttttccttcagccttcaccctctgaacagctacccaccacaaccaactctccacctgctgtattcctaggctctgctgcaatgaaatggtgagatgccaaagaagaaagagaggcttgagctgagctacaaagtaagatatgaaaccctggatttgagacttgatccaccattttactaatcatgctgctaaacaagagacttaacctctctcagagcctacttcataaactatgaaatgagtataatattagtaccatcctccgataatgctgtgaggtttgaattgtataaaagatgaaaaaaaagcttcttcatt

SEQ ID NO: 1242188 - DNA, 4001 bp, Homo sapiens
caactacctatacaagtcagtattatgcaaaatagaccccacaggattgagaggggactaaagaagagagtctgttgggagcaggtctgaaaaacacagctgaacacacaccacaggtccaccatcgaccttgtgatcattacagggatggaacaagtcatcaagccaacaggtccccgggttattaaaatctagagaaagttggctgggcatagtggctcatgcctgtaatcccagcactttgggaggatcgctagagtccaggagttcaagaccagcctaagcaatatagcaagaccccatctgtataaaagtttaaaaaataaaattttctaaaaatctagagaaaggaagggaggttacagaaatcaccaaagagcataaggtccaagcctattctgatttcatcaattagcttcctaaagtctgcagtgtgcaggtaaaagattaagaacccaatccttattgaaggttgggcaaacaacaaccaaaaaaaggcaaaaaaataataataacctaatcttttctggctatttctctagctagctaagcagctttccctcacatagtcttgtcccttacctagaacccaagagagttgtgggagctcagaaacccccaggaaacagactcatgattatttaatgaaataaagtgctcgtttgtaagcaacgctggaagctgcagagatggagcacctagcatgtggtttctaggtcatggtgttcatgcctcaggtcaggagtttaggggctcctggtgaagtacggaaagctaggaaatcattagtgagaaaatggtttgttcaatgaatgaatgaagagtaggatgaagaagaaagccgctttcttgagcaatttcccaggaaggccaagtaccaggaacctccaaagtcagcaaggaaaagccacgaagtccacacggacttccagcacgcccccgctggccaggcagttggcctgcaacaaggcactcaggccccacaggtgtcaggcatgaaggtgaggatgatgctccacacttaataccctgagctggtctcaaaagcacagatgcgatcttaattctttccaaaacattagcctcctctccccgttacaggccagactcccagatgatcacatttagaacagaactgggaggaggcaggggagacgtgctagcttttattttcttgggagaagactgtacagtggccaggaaccactaaaacggtcgggaaaaggggtacagagaggaatggagacccgcgggatccgctaactggtctgagtcaggaacacaatcagtgcttagtcaccgatacctcggcggccgggagtttctcgccccctgccagccccagacgtacgtgacaaaccagatcggagcctggcgcgcgctcctgctccccggctcgggcctccccagccgggccccgaggttcaccgcccgccccatacttactccgcagagctggtcccgttaactgcagagccgtcgggggccgggttcagctggatgggcgtcggcttcttcttgggcattttggacccgggtaacgcgcttccaactccggggggagggcagcacctctcgcttcctcccgctgcgctgccccgcgcccgctgcgcaggaccaagtccgggccgcgggccccggggctgccttcagcgggtgcgccccgcgcggtcccgtcagcgccgaggggccggtagcggtctcagtggacccccgccccacccgcccgggactcggcttcgcgcgcagagagccgaaaggctgccctgcaggagcggagcgggctgaacgtgcggttcggcagcccgggattcccttcctctctctctctcaaccaaccagtccctccggctcgggcggcacagccgcgcgcgcaccagagcccagctccagctcctgccggggaaagtgccgccgccgccgtgctcctagccgctctgcgaagcggccctgggagggactggaggccgggggaggggcggggaaggggaagcctcgcctcccacccgggatgcggcgctttccacactcccactcggctccgcccctattgcctcgcagacaaccaatgggggcaagcctcggcggcagatgacgcggaaatacgtcacgggagcgcggcgcactgcctgggggcggggtccgtcgcggacgccgtggcgccctctgtcgccccgaggcaagcaggtggacccagctgagaagaagtctgtgtcgctgtgtggtgagctctccaggccaggtgccgcgcggcctccacctctgcggtaaccggcctgcccccgacccctgtccccaagccgagccgtgttgacgaaaatgaaataacaaaataaataaggaaaaggaccccttcctgtgtccagaggagaggcagcgtggggaataggaaacttgtcgagaggctcctttgagcccaacaaactgacgcatataaattttgtttgtttaatggtaatactactgagaagggtgcaaggaaatggatactcagtgctgatgagattgtaaattgttgcgacagtttttgagagcagattgatgatttttttttttttagacttgggaacttttttttttttaagacggtgtctccctcagttgcccagcctggagtgtagtggcgcgatctccgctaactaccacctctgcctcccacgttcaagcgattctcctgcctcagtctcctgagtagctgggattacaggcactcgccgtcatgcccggatcctttttgtatttttgtagaaacgggttttcaccatgttggcaatatttttttaaagccttaaaaacactctttcgggccaggagcggtggctcacgcctgtaatcccaattttgggaggcccaggcaagaggatcacttgagcccaggagttcgagactagcctgggcaacatagtgagtcccccgtctctattagctgggcatggttgtgtgcagctgtcgtccaagctactgaggaggctgaggctggaggatcacttgagcccaggagtttgaggctgcagtgagctatgatcacaccactgcacaccagccagggctacagagcaagactccctttaaaaaaactttcatccaggccaggcgcggtggctcacgcctgtaattccagaactttgggaggccgagacgggtggatcacgaggtcaggagttcaagaccagcctggccaagatggtgaaacccatctctactaaaaatacaaaaaattagctgggcgtggtggcgggtgcctgtaatcccaactacttggggggctgaggcagagaattgcttgaactcgggaggcggaggttgcagtgatccaagatcacaccactgcactccagcctgggcgacagagtgagaccccgtctcaaaaaaaaaaagaactttaatccaaaaattccaattctgtgaattactaaagaaataagatgtgaataaagagcttaataagaggcacaatacccatttaaaagtgcacattcagtgttcctcttcccctttcccatcctaaaatactaagtgtcaaagacattaggtgtacagaacaaaggaaacgtgtacagaacaaaggaaacatctacacctggttatccacagccaggtgttggtgacctagcaggtaaggaggctgaggaacctgagaaaatgaagagggcttgaacacctgggaggcagtcctacacaaagtcttagccgtagggcccaagaggggagaacaaggcatccaagtggggaaggcctagaagcttagatgggaggttagttgcattcaggatggttgattaagtcactaaatatattaagcatgacagagccagctttctcactgtggtagaatgacgttagaagtatgggaagggagaataccttacgctattgtattggaattggaggtatcagtgtgaactcattgttttgttttgttttttgggggggtgtttttgttttgttttgtttttgtttttgagtggcgttttgctctttttgcccaggcttgagtgcaa

SEQ ID NO: 1242189 - DNA, 4001 bp, Homo sapiens
aggtcaggagttcaagaccagcctggccaacatggcaaaaccctgtctctactaaaaatacaaagattacttgggcatggtggtgcacacctgtaatctcaactactcaggaggctgaggcatgagaactgcttgaacccaggaggcagaggttgcagtgagctaagatcgcaccactgccctccagcctgggcaacacagtgagagtctgcggcaaaaaaaaaaaagaaaaaagaaaaagaaaagaaaaaagtagccctcatcttaaaaaaaaaaaactacagttcttacttcatccctctcagcatccgggcccttatgctactgactatctcatcgtagcatgactcattccatgatgtcctctgcaatgacctggttcatgacaaaacagttttctagtccccaggtcaccctggccctgtccccaggccaactgtggggaaaaaggaaggactaaagacctgaagtgttcctgtcaccatctagcatccctgctaagccccactaaaacagaattattccatgtaatgctcatggtaaaagctctactttgttgctatgttttaaagcagcaatggattaaaatctcttaatcaataatcactggcctacaggtagtttacacgtttcattttgtcctgcaatattatcacaatcaggagcaagagcagataaaggtcatgctggtaattaaagctatattgtagaaatatgctcacccaagatatgattaaataagaaaatattactcagttcagtatcatcattaaacttatatcaatttataaatatttaaatgtaccatatgatggtcataaataatctgtttttgtcagtttctaaagtaatgccacccataaaccctttaaaaaatgactgcagaaaggaatagtcaagaaagtatacaagccagacttacattcaaatgctgtagttgttgcttcaggcagaacctggcctatcacatcctaaacaaagaaagaataaagaaacacaattagccatcttctttattgctaacatgtggcaaatcctacaggaaatatgagaacctgggaaagatttttgaaacgttagcataaactataaaaacattagctcataatcacacttagcccagcaacgtaaacccagagtttaaagctctattccaggaagaaaaatatttaaggaaacttttccacattttattaataacatattttattctcagttcaacagtctatatacaaataaaccgtcatgtatttacaaaaacttggtttcttctatgggaggctgtggaatatactacagttgaaagagagaggggttttgagagtcagactgacgtaggtctgaatctctgggaaaaaaatcacctaacctctctgagcttcaatttgattaccctccaaaatgggtctggtaatacttatagatgtagcttaaaaattaatctaataaacataaacttagacctagcacattgaagacattcaacaaatgtagttcctgatatacaacaagcaacactgtgcctcgcactcatcatggtaggagttcgacacccaagtttccatgacgatataaacccattatgccacatttaacacaaacagttcttatcaacctttactcttaagcaacagaaaacatacttaatgacaccgaaataaagttaatctagcctacaacaaaaatctaaaaagggtatataatctgacatcaatgcttaaataaatctataaagttgaaaacacatgaaaattagtatactgagacagcttaattgaataagcatagaacacctacgctctggggaaagtgaccctccatcatgtccagtccaactccaatggcctgcaaacctcatttctctccaggagctctgccacagtgtccctcccaggctgcagcagaactggcaccaggcagccggctgacaaagccgctcgcagtatttctcagcagggagcccacagcctttccaagcagggcacttagcagagtggctgcaacttccttctaaaggcaattctttagaagcttttgctgcagtggcaatttgcataatagtcttgcctctatagtgctttttttttttttcaaaaataaatctgtgcatataaaactgatcaaagaggactatcttaggcagtccttgctcattacagccaaaagagatttttttttctgagtctagtcctcacaaatgaaacatcaactttttgaggaagcatctataaaagattttagtgttaaaaaattatttctacactctcatagttagaaagtatttattgacaggaaactgtaaagggagtacagaataaagcacacaggcaatccagtggaaagcctgaaaacatgaaattgcagccaaacagctacagctggatgctagctctctggcacagctgagtgcacaaaatctctctgtgcctcactttcctcatgtgtaatatcagatcttagctgtacctaacaaatgagttagtatttgtaaagtactcagaagagtgtctagcacatggcaagtgccatattagtgtcaaataaataaaacaaaacaccaataactggaatattacaaagcttacttcgtaataaactttgaaattccagcaccctacaatcagtggaggatggtgattcactcactgacttcatccttcagcagtacttattgaacactcattctagccagtgtaggtttaaaaaaacgaggggaaaacaactgcttcatccccaactctctaagtctaggttatcaccagttatttccaggaaactccgatcttgagatgtgaactgtacctctatagtgttagcaaattaatttaggctccttcctacttaggaatagcagaccccatcaaagtgcagagttctaacaaccaactgaaaacctgctcagtggcaatggcatgccttagcccatcgacataaacaaggcactgcacatgctcctcacctgatacgaggaaaagggagaaagaacaaagcaaacttgagtgagagaatcatgtgaacacaaccaaccattttgttctttaaagcaaataaagtggggcaatcataatgacaaagaggtaagaagtttaaacatcagtaatatctactagtcattttaaagcagggtacatttgatgattttatatacattttccagctaaagtgacttatttccaagcggccttcttctgctcttgacaatataacatgtacctaactaacctaaagaaggtttcaaaagaaaaccgggatgggcgcagtggctcacacctataatcccagcactttggggggccgaagtgggtggatcacttgaggtcaggagttcaagaccagcctggccaacatggtgaaaccctgtctctactaaaaatacaacaaaattagctggatgtgtggtgtgtatctgtaatcccagctgctcaggaggctaaagcaggagaatcacctgaacctgggaggcagaggttgcagtgagccgagatcacgccactgcattccagcctgggcaacaaagcgagactctgtctcaaaaaaaaaaaaaaaaaagaaaaaagaaaaccgaagtttacatattttgatgatgaccattttttgatacttttcttcttcctttcaataaatcagacaaatatctgacagatccaaaacatcattgagcatctacaacatgccacgagcataaagatcacaaagctgtaggctacaggacaataaaacttgatccttgactttaggaagattataaactggttacagagataaagacaaacctgaaagactagtaatataaaacacttaagagtataagcaccaaacaaaagacataaacagccaatagtatttggtaactcaggagaaaggaaaaaatcacagactcagtttagacagaaatctgtgtgtgtgtgtgtgtgtgtgtgtgtgtgttttcttcttttttgagatagggtctcgctctgtgacccaagctagagtgcagtggtgcaatcacagctccctat

SEQ ID NO: 1242190 - DNA, 4001 bp, Homo sapiens
tttcggaatgtccgcttctgtcttccatgcctcagttattctgcatgtagaatgggcacaaggcaccctgtctatctcaaatgaataccagaaagattagaagcggctgcaacatgtagggaaagaaacctactaagtcaatgaaacaaaattttagttctggtactgactctcccactcaggagctcacagctttggaaaagccatttcacctcactgctcctcagtaactatctgcaaaaaagaaacatcagctgaacaggccacctacagtgttacactctgctctaaaattccatcattttatttgaaatatattctgaaaaatctgaatgtaaaatatcaccaattctaagatgcacattttcccttacttttaccgtctctgaaactggactcattttaataacggatgatgtgtcatactgtcatggttagcatttttttctaagtaaaatgtcttacattcaatgatgctttaagtttgctcaggctgggcacagtaactcacacctgtaatctcagcactttgggaaggccgaggcaagcaaatcgcaggagttcaagaccagcctgggcaacatggcaatacctcgtctctacaagatacaaaaattatccaggtgtgatggcatgtgccagctacttgggaggctgaggtaggagaatcgcttgagcccaggaggcagaggctgcagtgagccgagatcgtgccacagcactgcagcctgagcgacagagtgaggccctgtctcaaaataaattaatgaaacagtgtgctcaaacatggtaagttaaagttgtcctttttccctttctcagctggtcaccaagttcagagaactcagtagaaaaacaaggctggaatctgtccaaggacattccccgaaacacttggggggaaaaaacctctcttctagattcagcagtttgcatttgcgtggttgtgtctatatgtgtgtcccagcccgggccatgagctctctgagggcaggggttcagtcagattgatctatctccccagggtcctagacatttgccaggttttagtggttgcaatttatcaatgctgtgcctgaagcaataaaactgcctccacaggaagccagcagtagccattgccactggctcaggtcaccagtggtcaaggtgctgactactcaagtccctgagtcccccttgctggcatccggacactgagattaccactcaccagcacatccctgaagagtaactgcggcccggagtgcactgtccagtccaccgcgccactatttgggatcttgatgcgaattaccagcacctggttctccatggcaggaaaggggccaagggctagccacagcattacaggttaaagaggctcacatcctggggtatgggaaacccactggccgctggttaggagggggctccaagaggtgacaaggggagtgacgggcagaggacagagggtgaaaacaagggaatggaggatgagggggagggaagaggggaggggtgatcaggaacgcacccgcaggcaccgagcctgcccaggctgtcgggggtctgaggtgtctcccggggagggtgcaccgggaagcgggcaaaggcccgcaggaactagcggaggtcggaaggttctggagttgagcgaacgctatggtgaaggtctctgccgccgtgtgggtatgaggaggcagcagggcaaggactcggtttgggggagatacagcggcaggtgtccaccgctcgtcagtggactaggagagggtcctcgactggaggggactcagtccggggctattaagaaagagccccagggccgccacaccacggagagtccccgcgggaggttcaaggggcgagtcttctgccccacccggagacacagggcgcggcgcgcgcaggctgagctccggccacccgaggccgcgcggactggcggcggctgcggcggcggcgacggcggtagcggcgagaggaggaggaggaaggcggcggcgacactgttactccggaaccaaaacgcgcggcgccggaaccccgggagccgacgagcgggacccgcctcccgcggcgccatgttggaaaagggcagcagctcccgggaggatgcgcccccggcgtgggaagccgaggaaccggcgcgcggcgcgcggcgcgtggcgcgtggcgagtcggggagagactggtcttgctcgctcaggagaccctcatcgcccacagagcgcccgcggcgacccggtcacggcccttccatttcctgaccctgcttaatgacagcgaggtgaaaacatctaccaaacgaagggtaaaaggctggagtccgccaaaagccaatttaaggcttaacattgcagaccgtttgtctttacaaaagcttcaaagacggggctgcagctcccggttatccccactttgtcaagccatgaatctgaatgttcgtggggttgtgtgcatcgaatcagcaagagcaaggcaagaattcaagaaatagttcttttttatccccccttccaagtcacaggttcagaggatcatcatctttctcccacattagcaaaacatatttgcatttttcagtgaagttctttaccgcacgagtgccctaaaatagcaaacagttccctgttcaaaagcaatagtaaagaaattcgccgaagagtttaattgcctggggacagctgcagtagtcgcatcatcgtctcttattaaactgttgcagaaatattcggtctagtccatgtattttcaactaaatagcactgcttacgcagttggtgatatggtgatatcacggaagtagcaataaaccttggttatcttttttttttttttttttgagacggagtctcgctccgtcgcccaggctggagtgcaacggcgcgacctctactcaccacaacctcagcctcccggattcaagcgattctcctgcctcagcactaccacccccaccagcccccaacccctgccgagtaactgggactacaggcgtgcgccatccgtgcccgctcatttttgtattttcagtagagactgggtttcactatgttggccaggctggtctcaaactcctgacctcgtgatccgcccacctcagcctcccaaagtgctggggggattacaggtgtgagccaccgcgcccggccaaccttggttatcttcaaatgccttgttacctcagattttaaagtgcataaggttgtagaacgatggtgcctctacagaagtttctttacaaattgtaatgtgtaggttcgtcctttatttctttcttatgaaggtgcacgaattggctttactttctggggttgaattttgtataaactcggttgaggaggcttgtcagtttcccttctaacagtaaggtgcttgattaatgtgagagaaaaaaattaatgttggtcattttcagttacaataccaaaattttttctgcatactttactctgagttacttttatatttaatttgaaaggccattgtaggagataaattatcacattttaagttactgtaaatcaatagcttaggtagaaattcatttagtcagatccttcagatattctaggaatttccccttttcacctgcacttcacttctgtgaaaaataaaccgttcatcaaaagtcctcatgtacttttattaaaagttcatttcctattattttagaaaatagaccacgaaactagagattttctatgaacctgtgatttgttaaaatgtctcttttattcgaagtaccgtggggaaaaccaactcaatttgccaaatttgcatacatattctgaagcttttcttacactaatggcaaactcatatttctgttccaatatttgcagagccaatataattacacgtcagctcttcatagcctttatgtagtaagaaatcttaactttgatgatttgagcaaggatttttccagaaagttataactctcattgcgagaagcatcataatcactgataatacattccacttgatatcataaatgacaaaatataactttc

SEQ ID NO: 1242191 - DNA, 4001 bp, Homo sapiens
cacgatgctttaaatgaatttatgtaaagcactgcaacacttttagtgctaacattagtctttagaatgtgtgcatttttttattacaaaattaactgacttcaaatcactcttctctggattttttaataacagaaagtagccaacgactacttctaatcctcttttgcaaataaatgaattccagaatatcctcatatacgaagttttttctaaaatagtctccattttccagtgttttcttctcaacagtaatacctaggtgatcaaatatgttctgctcaaatctggcatattttctagattaactgcaattactgaattcaggacatcaatgaataattttacaagcttaaggcaattcttaataaatgatgtaacatatgtgaaatgactttacaatccctggcacatagcaaacacttcataaacatgtttgaacaactactatctaaagacaaagttcctttcacccaattcaaaattattttttaaacattaaaatctgatatttctatgaagaaattcctgatttcagggccaggccctgtttggaccctacattcttctggtcagatcattctttccatctcagttttccagcgttaaagagggaggacatgtgcaattggaactgtaagagacaggctagaagaatcagccatcagaaaattactctgaagctgcttgctcttcattgtatggcgtgttaatttttccccttgacaaatcatctgtatccgttaaaaaaaaaaaagtcattactgagactgcatctttagcaatgaacacgaattctgccgttaatacaagtaggcttctaattccaactcaccagtccctttcactggaccttttccaatgaacaagcaaaagaaaaaataaaacaggaaaggaatcaagaagctcccgctgcacagagatccccctaacacctaaaccggttgggtcctacactcgccaagaaacaaaaggatgccaaaacacctttacttttcgacacaactcacaaggcggactaaaatgcacagcaaagtgacaaggccctttttggtgaaccgacaaaacaagctttcatttgggcacttttacagaccaccacttaaggtcccgaaagaagctaaggaaagactgtagggccgagggaggaaattaggaatttcgtctccgagttttcagtacctcattcatggcaagactcaaaacttgggcggacttcagggctctgagacgagccgggtgagcgctgcgcgctacgccactggagactttgcccggccggagtcagctgaggccgagtcaccgggtgggatgggggaggagacgcgggagcatttcgaaaggcagcgtgccagtaaggcgagactccacgccacctcatgttccccgggccgccgcccctcgctcgcccgccctccggtccggtccggctgggtttcgaacccgcggagccaggcgcaggcggcgggacggcagcaggcgtgcggggccagggagcgggcgcggcctggcagggcgaccggcgaggggcgtgccgggtgggaggggcgcgctggccgcctggccggccccacgcggggaccccagcccgccgcccgcccgcccgcgcggggacgcgccggccaggcccgagcgggcgggcaggcgggcgagcagggggcgggcggcagaccgaacaaaaacgcctttgttgagcggcagccgccggagggtcacacacaatggaggagggagccggctccgccgtcgccgccgccgccgccgccgccgggcccgccgcggcgccctcccgagccgccccgccggcgcaccccgcacacgtacacacacacactcacgggacttctccgactcatcgagagagtgcggggctcgcggactgcccccagtgtcggctcaggtctccggctgtgctggcggcagcggcgtctccgaggctctcgctttgccgcagtcgccgccatgtaaccccgacccgcgagagagggcgaggaagagggggcggggcttcgcggtgccacgccccctcacgtcacaggctcactccacgggttctcccgcccccgccctgcccagcgcacccgcacgcgccggaatttccagcgcccgtgactgggctgcgcgcgccgcggaggcggtgggaaaggcacgcggctcgtccggcgtctcctgggggctttgcctgcgggcgggcagggaggaagacagctggggccgtttgctctactacctgccctggcattaagggaacaaagtgaccaaacccagtgccagcgtttactaagcacctactacgtgcaaggcactgggcaatccgagaggaagaggcctcagtctccaggaagggtggaccttaagatggattggctggaaggcgacagcccgagcacaagacagacgcgttagaggccaatactaaggtcattcattctgccagagtatggaggaaggctttcaggagtggtcgccaaggtggcctttcagctggatcccggaggagcggatataaccaggaggtggggagggtgtttctgtgagcaaagactgggaggccagagtacctggcttgttgcaggaactgggataggacaatttgaatttgggaagggatgcactatgaaacgtagaaaggtggatgggtgccttcttgggcccacttggctaaaagcaaacttacattacttatcatggcttattgagtccaaggagccttttcagtgtttatgtgaaatttaagtatttatgaaattagagacgcaggtcagcatattttttcaatgacttcatcaccatcttgctgagaaccagacatagaatagcccttctagtcattattatgggcatcttcaagaaagaggcaaagaccacttcaaaaagatcacaaagggccaggcgtggtggttcacgcctgtaatcctagcactttgggaggccgagacgggcagatcacctgaggccaggagttcgagaccagcatggccaacatggtgaaagccccgtctccactaaaaatacaaaaagtagccgggtgtggtggctcacacctgtaatcccagctactcgggaggctgaggcaggagaatagcttgaaccccgcggggggttgcagtgagccgagatcgcgccaggacactccagcctgggcgaaagggcgaaactctgtctcaaaaaaaaaaatcacagagtaatgaagttaagtggttggggtgagcttgaatgctttatattttttaatatttaaaacaacgtcagctgagtaccaggtgtgaagaagaggtaatgagtgaaaaaaaccaagagaaaggggagacttgttccaaccgcagaatttccagcttctgcaacgagagctcgtaccttcagccccactgcctctgctctaggctctcctctgatcctcaggacatttttcctctcactctttgagaactcgtttaccttccttttccatcaatgtctgatcacccagagaaggtgggagaataaataccaagcactgtgccttccctcaaggagcatttaatccagtgtcactgctgacttcctgtggataatgcaaagttggcttacaatagtaagggagaccactaaattgacagaatctttgtagcatttcaaaagggtgtcaggcctctgagcccaagctaagccatcgtatccccagtgacctgcacatatacatccagatgacctgaagcaactgaagatccacaaaaaaaatgaaaatagccttaactgatgacattccatcattgtgatttatttctgccccaacctaactgatcagtgtactttgtaatctcccccacccttaagaaggttctttataatctcccccatccttaagaagattccttgtaactctccccacccttgagaatgtactttgtgagatccaccccctgcccccaaaccattgctcttaactccactgcctatcccaaaacctgtaagaactaatgataatccaccaccctttgctgactcctttttcagactca

SEQ ID NO: 1242192 - DNA, 4001 bp, Homo sapiens
ttcttaccaaatctactcaaagttctgctaaggaacacagggctgaactaagtcctcccagaaccctgccatttgtacagtggcattctaaatcattcctcatgggatttactcatcactgaagagatacaggcaaagcaatacaatgctgtggtctcaaatgcctctccctgtaacaaccttgtacctcacaaccctattgggtttacaggctactaataagacacaaaatctgatctgatcctgtgggagtaaagccctggattccctcaagggattaaataaatgtcgactacttctggattcccaaagttgtggggtttatttagttgaaaaagcataaggaccaaaacacagacaagtgaagcgatggaaaggaactttgcctctgaggatcatctgcagctgagtgggatgtggctcttggcatatagtgaatgagataagcaatgctcaagggccatccagaactgttttgctgacagatatctggcttcttgcatgttattcctaagaagccaaaaggctccagttagcctcttgaagagacaaaaaaaatttgttttcaccgtaggcaagagcaattaccaagccagtaactctgactaggtgttttagcatatttctttctgccactacagtcttacataaccccagctgttacgttaacacctgcagctacattagtcacagcttagcccttcacaaggtatgtgttcctactgtcctctcccaagaagggaaactgagtcatagcatatcaactggcttcccaagcacatgcttagtgtatagtgaggccacaattgaacccaggtggtcttcctactattcaccttttctcatggatgaatctcagcatgcccacccctgctgctctttttccttcaacctaaaaccaaatcattgcctgcagagatcatatgtgatcctttagagtcaacaagggcttctagttatctttcccaagaaacaggaaggttaacgaggaacatggagcaggagagggtgggtttggaaagaggtggatcccaacaggactcaccttggagctgaggtcctctcgtcggtttcctgccttactcctgcgcagtttgatggatggagatctcaacagattcttgatccggctggtaatggttgacccttccacagccattatgacgagaaaccctttgggacagtccccggcccagtcctgggtcttgtctcaacagcggcactgtcttcccactccagagggcttcccagtatgccctctcactgacctgagatggcagaagccaccttagtatcacagtgtcttaccttctgcctagcgaagtctgcagcttttacctctgggtattgctctcaccatttccctcatccccaccttctagccctgcacagtttcttacaacgtcggaaggaaaggctcacgaaaaagggggggaaaatcctaagccacgaagaaatgccaggcccacgcccgccagaggcgtttaactggcgagatggatgggatgggccccagttggtctcgtggacgatctggttcccgttaatgcccaactgttcccatggcaactgtagtgtccaagggaggaggccgccgagaccaccagggatttccgcaggcctggacacctgcgctagcgccggcggggacgcggcggggctcgccgtagcccacaactcgttctgccacgggagcctccctcccccactccctatcctccagagctcgctctccgccctccacagcggctctggacctttatctttcacccgcctctgaggcccctgctactcgtcagcgcccccgttcgggcccagcctcaccagcctcggcgagctaaggccaccccgctcacagcgccctcgggcatcgcgttcggcaatttcagctccgccgcggtagccgcagcggtagaggcagcagcaggagctatggtggcacgatcggctcaaaacgcgaactaccgcctgggccaagccgcgggctgggtgggcggagccgacgcgaggggcgcggcctgtagtcaggagagcgcttccagagtggacgagcaaggtttacgggggcggagccaatgaaagggcccaggaagcagacggcttgggactagggaaccacggaatccgcacaattgcgggtaccgcttttagaggaaggtcaacagaacatggcttcagaattgagagaaccaagccttttatggtattatcaggcctggtcccccatggaactgcacttcccagagccccaagacgataaccacgcctccagggtgttaaggttgtcatctgataggcccgagggaccgtagctgaaactcctagctcagaattacaagactgagctacagcctaaaagctctgctcccagcgaccacaagtgttgagatttaaagcgactgaagtagtttctgctcgcagccagtccggcacgtagactcaacgtggaaaggattattctgagtaatgcaatttaatagctaagaacagtatttttgcactgggcaacctggtcatcatgaaaggggaaagggtggccttgaacagagctttgggcgtgcgggggaaagagaagtgaatatgctatgttataatactttaggtttcatggcttctttagcctccaacatcccattgtgcttcctcacctaaagctgaccaggactttgttgctccagatcttttcctcattccatttacttatgaatccttttatctagggctgttccttgctgaggtcactgtcgagcttgctgatactagatcgaggggtagttttctaactcatgtcgggggaggcagagggaatacacggaaatgttacatgaaatagtatttcctgagtattctccacttgactactaccacaagaaatcaccttatgaaaaagcctaagccagagacttgggtcccaagggaatagtacactggtgtgtccgtctcaccctatccagatcttttgaatccctgtggagatgacatgtgtctgcaagagggaagaacctctaacaaattattataccttatgaaaaagcctaagccaaagacaagggacccaagggagtactacactggtgtgtctgtctcaccctatccagatcttttgaaaccctgtggagatgacatgtgataacaagagggaagaacccctaaactcattgcttgtgtacaacggtgagcctttagagccaagtggcaaagcacatattttcttgtgtatactgtagccacgtactgaaaattagatttgtaaagctcacaagttgacatggagatgatggatgtcacctcctggagaccaactggcaatagcacgtggccttcttcccttcaaccatgcactgcaaatattatgaaacagaaaatacgattttcaaatttatttcccaagtctggaagaagaaggcaagaaccattagctacaatatgcaagaggtagttggttccttcaacctcttggtagttacatgatgggacctctccatgggattgaaagctaataaatggtgccacctggtgtctttacttgcatgctgcagaccacggcagatgccatctccacccatgaaactagagtaaaaatgtgcccacaagagccgtccctaatcctctccagatcattctggtgtccgctaacggttttctcacctgatcactcatggccagataaatggtttacaaagtatcactggtcatttctttcatgaaaaacaactgaaagcattttaatgaggatttcttaagtctggaatctgggtacttccagtcttaggccaaagccacgctttttttttttttttttttttttttttaaacagagtcttgctctgtccccagactggactgcagtggcgatctcagctcactgcaacctccgactcctggtttcaagccattctcttgcctcagcctcccgagtagctgggattacaggcacgcgccaccacacccagttaatttttgtatttttagtaaagatggggtttcaccatgttggccag

SEQ ID NO: 1242193 - DNA, 4001 bp, Homo sapiens
ttaacagcagtcgcttcaaaaaaattccttctgagtatgaaaatgttagtatatcaaagccaagaagcccacttttattttctggtcaggaaaaaaaaagacgaagattaactttattatataattcaacaggttaccttccttatactgacctgatttaataatctacttcatttgcattttgtttaaaagaaacatgtatttcaaattcataaataactaaaaagtcaaaaaaggtttacaaaatgggttttataaaacgtaatgccaaataaaaaaatagttaaagtcatttatgggtaatggtgtcttaatatagtaatgcttgctaacgaatatggccatgatatcctccaaacatccatgatcccttccctggtgaaaccctgatacatggaataagcaatgagttttgtttctaaaagtgaaactaaaaatccaagttaaacaaccagttttctaggcaattgtaacactaacctggaacacagaaaaattaaccccttacttcaacatggaaacctacttcagtgtcagtaacgaaagactttttaaagacaactaattacatcagtcacttaaatcatgatttggtaacctggggactgaatttaaattatattcacccttgaaataaaatatttgtgtcatcattatatttggttaattaattgtattgaaatactaaagttttgttaactttttaaaagaatgcttgttcacaggcgagtgcacacacaggtataaaatagaaggaagttcaaatcctaaggcagtcaaagggggacatacattcatatgcttcttaggagtaataatatgcatggtttttctacaggtatgactgggcaatggtgtagtgagagacacaaacatacacttaaaaaaaaattccaggaaaagttaggtacttaatttctttgccaggagacagataaaagagaattcatccaatatggcttttaatgtcctaaagtattctggaagagttatttgtaatagctttaaaacacacagaggtcaaccctaaaactaatgggaacactgggtgcaatcaatactgcattaatttaaattcttgtaaacaacattctccccatctgagctaaccacgaaaataactcctaaccaaattttccaaagggaggggaaggggaagggggagggggagggagagagggagggagagagggagagagggagagggagagagggagagggagagggagagggagagagggagagagggagagagggagagagggagagggaaagagggagagggagggagggagagggagggagagagagagaaagaggggggagggggagagagagagggagggggaggggggaagagagagggagggggaggggggaagagagagggagatggggagagagggagaaagagagggaaagagagagagagagagagacaaaaaaaaagagagcccagccctattctcacctctggctcttctggtgcatcccctccaagggaagttttctgaagatcaaagatgccgttgctggacacccgtctccgctcagcaggagaggcataggcctcctctgagtctgtttccaccacatggaggtgactggcttcttcctggctccaatccaattcttcttcagactgtttcaaggagctactgctgctcttgggaaagatccctgcagtggacagactgctgggcaccgaggtgtaggaagactgtggcccggagtaaggccggccctctggggccaaggcctcagcctccaggagatcaggcacagagaggctgagacggcggtccaagtgatgccttgcccgtagatctgggggcttacttgggttctttttcaccttcttcttgctcaagttgatcaacaatggcctggtccgctgttttaatgagccccaaacagatggtttatccagatccatggctgcatgaagacccaagaagccacttctcagaagtacacctctactgaaaactgcaatgactcctataaaacagaaaaaaacaacaaaaaacaaacaaacaaaaaaaaaaaacatgaaccttcttggtggcagtaaggcacatcaaagtgagaaacacgactcaaaaatcttacagtttccaataaatgattaagactgcaacatttgattggtaacttgtataaatattggggaaagcatttttaaagaactttttaaaagaattttatcagagcaactgtagaaacattaaaacgaagaatgagatgataaggttggcaccaaaaaaaaaaaatgcttcatgaagagataactgtcttatttccttcccagaggaagcggagctaaagacattcacgagaacaccaacagcagctgttcttcagtatgatcaaggggtggggactttctacttctctaaaccggaggtcaacaaacagtctcagtgcagggccagttattaaatattttagacttggtgggccagatggtgtctgtcgctactactcaactctgctgtgcgacatcaaaggagacagacagaatacctaaatgaaagaatgtggctgtgttgtaataaaactttgcaaacccagcagactgtggcttgctgatccctgctttaaccatgtcaacttccttcccagaattaagtgtacgttttcaagaacaaaaacatggccctatcgactaggattccatctagtatctttcaaatttatattcacatacaggtgattagagcaaaacacatttataaaaatgtgagttttgttcttattcagaagaaatgacaaaattcccataatgaagcccttaaacaaagcaagcttctgagatgtagcctgagaatgtgaatgaaagtgtggctcactagcagttggttatgagggataaggatgcttcacacatacagtaaatacgtaattacagagtagggtaaatgctgtggaggaaagtggtgatttgggatataacaggttgaactcatcacggatcaaatcaaaatcaaatttgcagaaataacccttattttatgtgtcacatgcctcataataaatcctttcagtatgaaaaagaacaggatgggcagacactgagacctggcctgtttgtattttgccacatttggctgaggccaaaagaggccaagagcttccacaaatcacattttctaaaatcaaggaccctggctgttgtgccccaccccagctccttcaaggagaggacagtttatcattgtgaagaatggtccagagagccagagatcagggtgtgtgcagccatttgcctgctaaaagtcaggactttgtctctatagcccttgcctaatgaccagcgcatgacaagagcttctcccaggatgaacttggtatcttctgcagacaatgtaaagattaagagcttggcctctcaaaacagactccatgggttacaattctgatttactctgttctacttagaggtaggaccaggtgcaagtcacttcactaagcctccattgcctcacccacccagtggggacgagattacctagtttacagatacgatgacacaaagtagaaagcacagtgtctgatgctttaaagtgctcagacacagaaaggtgtctctatcattattctcatcatttcttgtttggatatcttaatcaagttatgtaagagttctgtgtctcactgttattcccatgttacagatgagtttaacagtaagtacctcgggaggctgcggtgaggactgaatggactaatacacagaaagtgctttggtatctagaacagtgctaggtatggagtaaatgtttaatacaatgttagcgacttttaaaattgtttcaattactttgtattgggtcattttggctttaaatgtttaaaatagtttacaactttttttgcagcttttaaaaacgttatcctaaacagaaacttgaatttcacgttagcaatacgcaagtacattcaattcacatctcataacttgacttgcaaatacgataaaaggcattgcttctattttc

SEQ ID NO: 1242194 - DNA, 4001 bp, Homo sapiens
attccactgcagccaaacctaaaaattaacgagagtgacttgaaaactccacaagtgtttctgtgttcttcaaaagtgattcaaactgcttctacgtttggtttattggcaggattttcatttttgtttcctttatatagagattaaatatgtgaatacaaagtgagcaagaatgttggtcccagagtattaggctctaggggtgcagtgtgaggtattaaatccccgtactaactattcttgcatcagaaaaacatagagaactcagacctcggctgtagccaatgtcatgtaaaatcatttcagctgtttttcacatcaggcttaatatattggatcacagaatttagaaaccaggttgggaaaaaaacaaaaacaaaaaaaaaaacaagaaaagccctgttagaccacaaattaaatgcagtattccccaagggtgaatgtagcagatactgaactaattctacacttcaccttagtccaaatggctaagtgtgcttagtgatgaataatttttcctaaatccttagcctgaccctggcaagctaaaggaatcttagtagagagatatggttatcctggataccctcactgtgaggcaaagcctgaaattacctggttaaaataattatctgcatacttctgtcttaatacaccctcaattttcacattttttataaactattcttcaacatgagcttcaattctctactttgtgctagagtagatgacatgtaatatttgattctgtactgaaaattgtgcagtgcgcacaacctcttgcctccctaaatcattttccaacttgtctgtatctgctgcatccttgatgctagaaatatcctcggttatattttcaaaatcgtccactgattttttttttcctgtgtggcttttggcaagtgatttaagtttcaagtaccccagagctccttcaatccataaaacataggaaatattcctgtctgacagttatgtaaaactaattaattatcacgctttagggactatagtttttgaaataaaatccacaccaaattactaagattaaaaattaaacggaatttggatcagcagaataagatgaattattttcaaagacagttaaaatgccattatgtttgtttaaaataaatcacttttcatactttggatagtttattatttttaatcccagcaaaaaacagcagcactagatactatttttggcgtgaagactagcaagcaagagaaagcaaatatttttaattatctcacatattttaacccaaatatcacgtattatgctattctatttttgtagcattttgaaaacttttacttatccttttcccacattctatgaaacatagtttgcttattttcaaattgaaaataagtcagacattcaaatctatgatttaataaggtttctctagctctgagttactaaattaaactgtactaagcaattaaaacaatacccacattaattgactgcatctatacaattattttgttttctgctctttaatatagttaggcgggctgaacataaattacttctacttttgtaaaatttaaagtgggaaacaatttttaatttttttttattttaaagatactgttctccttatggaaaagatggaacttaccttacttttatacctctgatctcccagttttaactggacaaacatctctgtcatgcttcctcctgagacattcttcccttccaacaaagttatacttataatcccgttccagagttggttctttttcaaggactcagagagccgtaggttgcgtatcaaagaggactaaagcaaaaaataaagatgacatgtaaacttgcttctaattcctgagagtgactttgatgatcataggaattccaactttcagtatttaattataaaaaaaattcctccctgcctggggaaaactgtttttttcattggttttgcaaacctgctgtcacagttatgtgacttccttctcaagctttggagtggtaataatatagtgaaggatgagtatatgcaacactttgacttggcactggccggtactcccacccagatgcgctctttggtgggactccttcaactgggcctttagctattttaatagtgtgagaggaagaaagacattctgggcaacagagatattataccagaacaaggcattgccttgcaaggaagcaaaatatctctgggcattcagaaataatgactttgaatttatccttcacatttgaatctgtctccacttctctttattccttgggatactaccaaaagccctataccatgtaagattcactagtccaaatagagcctccagtggcctagctggccaaatgagctttgcagacctggagtgggggtgggagggaagggggcgtataaagcacatctcactgcacctgggacccaggaggggttcaataacttaactcttatttcctttgctaaattatattactcacactcatacataccttggaggaaaaaggcaaatgtcctgttataagttgtaaatagagtagtcacacttcattttttaatttccactatgtaaattttcaaacatacacaaaggtaaagagaagagtataataaatctccatgtacttaattaccagattcactgtctggcaaatcttattttacctatgctttcattcctttctggttgaaatatcttaaagcaaaatccacatttgtttttacataaaaatcctgctatgatcacactcaatggcgttaaccataagttgtctagcatattaaatacacagtgcatattcacatttccctgatggtctcaaccatgcctttttatggctagtttgtctgagtcgggatccccacatgatccacacgctgcatttagttagcagagttcatttacgttgtccgttcagtaagtgaaataacacaagcataggcttctttattgaaggagaaataaatgggctgaagaatgtaaatggtgctgagcatcatcgtcgagcaatgaatttctaacactatatattcattcctgtcatcgctcgctatatcttccagatcatttagacaccaatttgctcggacagcagttagtcacaatttatcacaacaaatggtatgtcagtaccatagtcattatagcccagcttacctcatcgaacccaggccactccaccactcttaataagtgacgcaacaatgccacactaggtattttgatcatttatgacaatcttaaacaaaatacattcaagaaaacacatattcccaaacttcctatctgtattactccgttatcacactgctataaagaactgcctggcgggtaatttacaaaggaaagaggtttaattgactcagtgcagcgtggctggggaggcctcaggaaacttaatcaccatggaaggtgaaggggaagcaaggcaccttcttcacaaggcggcaggaaggagaagtgccgagtgaagtggaaagatccccttataaagccatcagatctcaagagaactcatgagaatctatcatgagaacagcatgggggaaaccacccccataattcagttacttccacctggtctttcccttgacaagtggggattatggggattacaattcaagatgagatttgggtggggacacaaagtctaaccatatcaatatccatgtgacttttctcttaaaacacacagacacacacacacacataggttctgcaggtgctgagacagaacagaaggggcaaatgaggaaagaattttaaaaagaaagaactatcctcttctctggtgaacataagtaattccttcttacttcatatatatatatgggaatatatgtataggaatattttaactatttcataaacctttattattgaatatgttccatccggaataatatatgattattattattgttattattatatataaaaataacatattccagatatactcaataaaggtttatgaaacagttaatattaagtgatttttgtattggtca

SEQ ID NO: 1242195 - DNA, 4001 bp, Homo sapiens
agtacttttgattattgtaacaccattatcacaactttttgcaacaatgctcactgagaattaaaataaaggtgattctattgtcaatgtgtcaccatatataacaaatactgatcttaatgttttatgatatacaggtgtgtgtttatgacatttaatataaactaatctaaatcagcatctgctttagtgaaaactcttgattccctaaaacaaaagttgtaatttacagaaaaagaaatggagactgagctctccaaaaatacacacacacacacacacacacacacacacacacacagtacatacaaaagccataaaggcacaatgcagtcatttttatcctcacttcctaaattcatattaaaagaaatgtcatttttgtatgtttaaaaaagaactattttgtttaccttttccacagactgttcaagaactgccaaggtaacacagattctaaaactgacaactagagtacttagcagttgccaaaacaacacagctggattcttaaagggaaagtactcttgggtaatgtacacctaattacagctttagagaacctcctcttcatatagtaatagatgatacaagacacatgggaaacatactgtgctaaaaacccgaaaaaatgttaagacaatgtttgtttaaaaatacatatgctattgttaacacatcacagcaggcctttctaatagggcatttattggaatcccaatctcactgtaaactaaaacgcaggttaacactatgttatattcaagctacacacggttccctgctggaccataacaggaggctcgcttcacagctccggaatctatttcggatgtgagcaacaattctatagttacacttttaaagaaaaactgttttcttattcaggattgctcaccttttccaaacttgtttgcactatctcacttactttaaccctcacagctcaaaggcatgaaatcgagccaaaaagcaaagtttctaacacaaaaaatattttctgcgagctgggatctagccggatggcaggggttcagccagcggttccctgtgcagcccctctgtccccgcgacgtctccccgcacgatcgggcgtccgcaaccgcaggtgtccgccccaaacaccgaccccgccactgacatctacacactcacagaattcgtacctaagcgttccaccccgttagaccaatcttctcccaaagcagaagtgggggaacttcttcaagtccaacagggcagaaggccccccgcacttggggctaatcccttcggggagacccccgggcttggagggaaaaggggaaggaaagggccctcagagcgcaccttctccggggtctcccgagaactccttcaactttcaaggaggcgacgtccaccaccgccccccggccccaaggggtgcgcgcccggggaggctgctcgccaccagcccgcgcgactgagctcccctcggcccgcccagccgagccccatccagccccaccggcccgccctcagggcaccccgcccccacctccccgggcgcctagctcctcagcgccgaccccgacccgaccacccctcgccgcctcccagcaccctacccgcctcccagcaccctacccgccccgccaatgcgcgaacgcgaccctggccccctccaagccggacacggcctcgtccaggggtccccggagccccccgggcgaccctctcggccgcgccgtcccccgccccagcacctccaccccaacccctactcggtcccctaagcgagacgccgcccccctccagcactaccggcgtcgcggactgagccccgctgcccgcggccctcaccgtatctccggagcagctggcgggcgcgcacacgccgcagcccgggcccgccaccagcgcttcgcgccgcccggagccgcctctttcagcccgggactcgccgggacatccgcgcacggatccccacaccggggctatttttaggagacaagcctcggccagaccggaactcgttctgtgctgcgcgtgcgcactacctccgccgcctcggtgtccctccgcagccctgcctcccctccctcctgggttcccttcctcgcttctccccatcagtttcttttcaggactgaattatcctctcggtgggttctagagtaattggaatgggaaagacaagggtagggcaaagagagtcacggtgcttggaagcgggcgctattccacaaggacgtgggggcggactatgtttttccgggtgggtgaggagacgatcacctggcacaggaagaagatgacggcggcttggcgccggggccgcgggttggagctcgctttcctctgaaggaccgtgttcccctggaagggatactggtcacttgatgagggcccgggcgcctcccagggcggggcggcccggcggcgtcgcgccctgccgcccccgctccgccgctcagccgccgccacctccctgaccagcccccgggagcccaggccgggagcggcccggtgacgcggcgcgtggcaaatcgccgcgcgtggcctccagggcagccaacccgggcggtggggcggcgcggcgcgacgggactgggcggggctcccggggcgggggcggggcgcgaggccggctgccgcccggagtccggggccgggcgggtccttcgggacgcccgggtcagcctcctccctccctccctcgaggcgcccttggcctccccgggtgtcggctcgccacgcccgcattgtggccagggccgcacctgtgctcgccccggggcacgggcaggtcaccctcaggagcaagcacaaggggactctgggacccgggcccggagagaaagggacttgaaggggtctcgagggcgagaaggccctttcggactggacagccgagctccccaggtcccaggacagtagcaacctccttatcgtgacttaatagtttctaggatgcctggggcggtgaactatgtgatggacattttgcatatgacagcttatgtaatacttacaaggccccatgaagcagattcagtttctattcccattttacagatgaggaaagggaagctgagcgctaaagtgacctgtcagggtcacagcttcagagtagggccctgaggacttgaactcctgaccactctgcatgttgccttttctgagataggtgcaaaggggataggcttgggacagctgttgtgttttctggggctactgattatgtttatcgaggtctttaggagatgagccattgttggccctctcatcctgaaagccgctcacctctgaagagtttttcggggccacagtgcctgcatgtgcccccagaggtgcctgtgtaatggacacgaagccaaatggttgtttgcatttgaagatgagaaattcaatcccgcagcacttaaaacaaagtggttggggtgggtgagcagatgagcagaggctgtgagtggaggaactgggaagttacaaaggaagccagagactggctggcttcctccctcaaggacaacggggcaatgtgctggggagagcccaaaacaaaggcggcacatagacagcagacgccagaaaataaacctggagctctgctcagagctccacaacaccagtgttcaggggagccagcaaaaggaactgcagggaggtttttaaaacatgtcaaaatgtggtgtaaatcagcaagtcatgtggaaatgcatgctttttaacctgccagaagctgcagagccggctggatttggctcttctgctccaagaggacgagaagagtttaatacttatcctttaaaacttagggtctggagtgggggcacagtgatcagtggccctctccttgccacctgctgtcaccctggaagaagaggcaatgaaaacagactgttccaaaagatgttttcacccttattgctccactccggctcccacccttccagaaattgagcctcctgaggcacagaagactcagctcagactgcccagcccttacccattccaatgctattgttaccctcaaa

SEQ ID NO: 1242196 - DNA, 4001 bp, Homo sapiens
atcaaattctaaaatcaataaagatactcttttagtttgtgacaaattgtttctgtgtctaatttaacctgaaaaataaactgtccaattatttcttttatgtcttttctccaatctttgccaaaattatctgagacagaaattcagatagtccttgccccatttggcagctaggcaagaagctgacacagcagctaagtccaacgtaagaacagcctcattctagttgcttagtggcagtatctatcttttcaacaaggtcatttcctcaactcagaaagttccattaccgtcacctacacattcctagctgctctttctctctacaaatgtgaatcccttccataggtaggtccagtttagctatgtccaatttaaacacgactatctatggaataataagggctcgaaaattttatgtgtcctccagttctttgcttgtatgttattccccaataaaccctattttatatttatactgcatatatccatgaagcaggtccctatgcctcctctacacttcataatcctcagattgtgaagggaagataatttgcagccttgcttggaatgattcctttggaataatagcatggatagtttaccaatcttccctattgtaccaaccttcataatgaatcatactgtgtgggccttatgtctttgttgaacaatcttcatgagttgaaaccagggcctcctctttaattcagtctatgggcaaccctcatctctcccaccaacttccttacaggctgctcagttgagttttatctccaattatatctatattccagtgaattactactcagatttgcagaacacatcttcagtttcgttctgttcctggtaaactttctgaaaccacttgttcttgaaacttctcctgatacgcaactttcccagagatagcatctctccagtagttcctttataatatgctatgaaattatttttccttctttcttctgaactaaggagttggtaaactttttctaaaagtgtcagagagtaaacattttacgcttatggaccatatagtttctggggcaactactcaattctgttgttataatgcgaaagcagccatagacaatatgtaaatgaatgagcatgacagtgctctaataaaactttatttacaataacagatggccagcccatggaccatagtttgttaagccaacattagacacttaaaacttctggcctcttcatataccagcatcattataattaccttgaatctgtaaggatttacccacactggtaccataaaataacttcaatatattttatcaattaaaactgaggtacatatataaatttaaaaatatttgcaataagtataaaaaattctcattacatattggttaaccagaaaatttaactgactagaacacattcactgataattatagttaacttagctaattataaaaacagatgtgataacttaaaaataatcaatataaaaaagactaacagtcaaatatataatcaaatacatagaagactaaatatcttatgagaaatctatacaatggattggtaatggtggggattgtggtgattttacttttgagtatctatatttttggtgacatatatctataataaggaagtctctttaaagcagatgatgaaaagatacaattttatgattgttagaatttttcatttagtctgtaactaaaaatatttagacttaaaattaagtttaagaaaaacccaaccattctgtcctatgttctttttttaaaagaatattcatatcaattaaataaattaaaattttcatttacctgtcggttcctttcatccattatgcgtgtgatttgtattttcttccgccccattttcagtcaactttccttatttccttatattccaaatatttaattcaaaagttaattttcttcaataccctaatgcatcgtacacagcttctgttatttcagcttctagtccaagggctacagctgaaattttctacaagatctaaaagaaaacacaaattagaagatttaaaatctgtaagtttacaaatcatgtaagtgttatacaaatttcaaatttgcttttacactgcacacagcattattagttgaaatttctggttatacaaaattagtaaataagttgaagtcttgttaactttacccctaaaatacctcttgaatctctttgtgtctctagttctggttaaactaatgcaacaataatgtttgaggttttctcaatgtatacaataatagcaacaagagccaagccttactgagattcttctatgtactagacattttcctaagcatggacatgtcttaactcattcaatcctaatagcaatctataattattacctccattttataaatagagacactgagacacagaaaaattaagcaatacgcccaaggtcacgtagtaaggggcagagcttggggttataaactcagggaatctggttccagcacttctgttcttcacaacacagaatatccttaaaaacttctgatgacctccataccaaacaatgaactaatctggatagccccaatctgtcttttcaaattcttgcaaattgccctagcctccagccaaatcactatttgtcaattcacaaagccactatatactttcgtaaaaatatgcatttaaatgaaacattcctttggccatttaatgaacacctccttatcagtcaagattcagtttgcacttccagatgaagtgaaaatcaatttcccttggtagaataaaccacagcaccttcgtgtgtgtgtgtataaattttaagtctgctttccttcaagacttaaaaaatctttcaagcgttttttattccatttattctgtgtagtaggatgactggaaatgatatagtttgtcatgttctgaatgatggctgtgtcattttaaaaacctagtgctttcagacttacataataaaaatacgaggagatgggggcatgaatgctataatacaacagtcataataatacattcccatgggaattttatgcaagtattttcaatactgtacatgtgtatcaataaaacttcaattgtactgtgcaaatccagtgtgtgattaaatctggcttttgctcaaaagctataagcctttcgtttcttatcatttccagcactaacatcagcacagcatttcttatttatcttccctcattattttatttcttcattgatacaaacagtagttgatcatctattaactgataacctattaattgttcacctacttctaataaatgtacttccaaacactgaactatgcacagaggataacatggtcagaaaaaaaaaaaaggatatgattcctaatctagcagagttcagagtctagtagaagaaaaagacattaatcaaaccataatgcaaatgagtttgcataattccaaactagaaagttcatttatctgaattaaatttatggttcaggaaaggctcccctgaggatgtgtctcatactcaaactcgagtatgagatatacatattaggcagggagaacaacatgtacaaaagccccatgacaaaagggaacaggaaacattagaggaactgaaagatggctagtcactcgtggggcccaatcaaacaggctgtgttgtagaatatttcttttaacagatcacattgtatccaattcccaatataaacacttgtactgtagtaggcaagagaaatattaatacattttactacagagacagtatcgctaaggcatgcaagatattttaatggctgtaagatggatacagtgtactaccttatatcacctaaaaaattcttaattccagaacatatttgggcattttttgcttttgacaatggtggagtagtttgcttcaaaccaaccttcctttgagaacaactagaaaagaaaaacacaagataatctgttttatacactagagaactttcaaaactagagaatctgcagggcggagatctggaagaaataggtgagaccagtctc

SEQ ID NO: 1242197 - DNA, 4001 bp, Homo sapiens
ctcttcctcccgtatagcagctctaagcaagtcctttcacttctctggacctcagtttgctgatctgtgagtgggaggaagtggcgagattgcagtcctagacctcgaatttctagcggcttaaacaaaatgtgagcaacggagagagctggtgcatggtgtgcaccaggaaaatccgccggaggagcagaggatgctcaacgtctgctcaacgccctcggggcaccccgcccagtctgcagggagtgacggcagagggaccctctccggaaagcctcgagcttttggtacctctaaaccccctaaacctctcaagataatctcccgacagcactccaacaaagagagctgctgggccggggctccgctggctccgagaagccgcagaggtcggcgaatccggcccctccgactccgggaacgagtgggactgagcccccggcaggctccgattgccccagccggccgccgcgagccgcaccccccgccccccaccccccaccccccaccggccggggttttaacccttgtttccctggcagagcgccggaggggcgctggtgccggggcgcgaggacccctgcccaagggagccgagatggccaggagcccaaaccatcccaaaggcctcctccaacccgccgcaggccctgttctctcggctcttggagggatggagagtgggcgatcctgaagcggagccactttgaaatatttttccggagaacatgaccactcgggagacagtcacactggcctcgcagcgcgggctgcggggcaccgatcccgagacgcggctgccgctggatggagcccgcgagtccaggtccgggagaagccgcccgggctcgggggctctgggcaccgccacgccgaggctcggcgctcccgggctcaggacaggtgacggctgcatcccactcagggaccttgacgccctcgaggaacgattctgcctatttttaagtagtattttttctaacaaattaggaaaataaaccaagtccaggaggaaggcggctgcgctcggcagctccaaggagccacaaccaccacccatttccccacctccaacactaccgcccacggctgggcgagaagttgggaacttcgggaccacgctccaggcgcgcgcagagagtcacttgcttctcctttaactttgggagccagggtcgcagtctagggcaggaggatcgtcctgggagccaaccaacaaggccgtccaggtcctggacttcccggaatagagtaacggctatgggatgggaaagaaatagggggatacacgttccgcctcccttctcccaaaagcaaaagcgtgcatggcacttgctggggcttagcggccgcggggcgcatcgccggccgccgccgaaaacctgctgcgtccccgcaggctctgcctcccgaccccggcggggaaggcgccggtgcagtgagtgcagccggcgcacccggggcggcttgagagcggagtccccagactcaagggggcggacgggcgccctccccgggacacccgcgccgcgccactgctctcgggtcttcccccgcacgtggaggcgccgcggacgctgcatcccgactgcggccggagggctgcggctgcccacattgaggcgccctacatcctgccggaccccctggcgctcctgcaagccccggcatccacctactcccggagccaaactcggcttcggcagccgggacccgggcagggcggccggggtccgcggagctggtggaaagttagtcgcggggcctcaaagtcccctccccagggccggaacccccacccccgcgtcccctggtgcccccggcgtccgagactccgcgtcctcgcggtccccactcagccacctacctgctcccgcggccggcccagggatcggccggccagtcgcgcggtcctgtcctccggagcccgagcctggccagagcgccaggcaggagcagggggccgcgagcagccgggagccgggcggcgggcagcgggcaccgggagcgactgagcgagcgagcgagcgggcggctggagccgcggcggctgctgccgagccagcccccacccgcttcgtccctcggcccctccctctccttccctcccagccttcctcctcccggctcgcagctccctccctccgctctcccgcacacccccctcatttttttcctctttctctctgtttggtcctttcagatcctgctgttacgcgcgcgctcgttcgttctttttcctgtcttcagtctctctcttcagcttgcctttggattctcctttttctcccattcatccttttccagcatctcacctccctcctccccactttcgttcttttggtcatttttcttgctccctcttttctctattttctattttctcctcctgctaaccttctcgcgcgtctactcccctttctcttccctactccccctttccctcctgggggagtggagcggcctgcgcgcctcctcctctatgctctcgatgggagatcccggggatgggagtgggggtctgggggttaaatggagccaggggcacccccaggccgtgctcctaacaggccgaaggtcgagagggaggggtagggccggagacagggactcaagacaggggctcgagaaacgtcccggcaaggaaaagggcaagaaaagcaaagaactcaaaatgttaagacccaagtcgggctgagccgtgcctggtgagatgaggaaactgagacccaaagagaagagggcaatgaacttgtcttgccgaggtctactccaggcaaggtcgagacccccaccgctcctcgcagcctaggactgggctcctgcgctgatgcgggaagtgcgagggcgcctgaggcccgtcagctcgttcccgtccctttgcctgcctctgcgcccaagtcccgggggccatggggaggaagccttcctcctctgctacagcacctggggccgcctggctgccccacgacactcctagtgaggccaagccagacaggggtaaagacctggctcttaagagtggtgcagggaaccccctttcctccacctcctaccccttcccaggaaatgtgggctgactcctgcttacacgggataggagtggcggcagggtactttgctcgtggggtttgccctcttttgtccttgaactaaaactggagcggaaaggcccagggttggaaaggtggttatacacacctggggagatgaatttttgcgaataaagtaggcctaatgcctgagactgggagctgtgtgtccgtccgtgtgtctgagcacctagcccacccgggccattctgggtctgatggagcaagtccctcccctagaagcttttcctggcacttcctcgtttcagcccagtggagtcgggcgggaggagagacgtggggtctccgttcccatggagtccacgctgcggcccgacaccaccaggattctcatagttccacccctaatttctggggccagaaatttctgtggtacacaaccagaagcagaaacagaagtacaaccagaagcagaacctctgctcagcccctgggtaaaaatctactttggggtgctagcaaaactctgcacaaatattctattcattcctcgctttgggatatcaaattaagtcaataaagcccggcctgggcctctgtggttcacaccacaaagccagaagaagcatctgctcaaggctgagacttgggtggggcacgtggagtgctcaccctcagagtctgcaactgagggtgagcgcctccttaaattctcccctcagagcctccctgcctcaccctagtcccgactgcaggcaaatctgagggctgctgttcaccagctgtctggccttggtccatggccgcccccatgctggcattatttccccacctgaccatgaagaggctgaattcgatgttctctaagattttctccagctctgaggtgccacagtttgtgggtatcatagatgccaaatttgtatgcctgctccaccacttactaac

SEQ ID NO: 1242198 - DNA, 4001 bp, Homo sapiens
gaagccgatgaataattttgctattttttaaaatactggccgccatcatcaagcagcgagcagcagcagaagcgttgaagggagaggaggcatcgggacaggcccctcttaggagaggatttatatctaggtaagtgttggagatttaaacctaccctttgcgccatcagtctgcgctccaataaactcctggatgtgtcgtatatttaatatcccagtccggataagaaagtgatctaggctgaagattccttttttttttttccaaaccaaagagacttctcccaattctccaatatgctattttttaggggggaaaaaaagcccagtctagacaacgaagaatttttttttctgtgatatttcttctttttctcttttttcctcttcttcctcctcctcctgatcttcctcctcctcctccacctcctcctcctcccccctcccctcctcctcctcttcggtcctcctttccccctctttctcttctcttcccctcagttggaaaaaaaaagaaagaaaagaaaaagaagaaaaagaagaaaaaaattgtcaagcccccgaactgaaggttacgagcggcccgtcagcagcccacatgtaaccgaactgtcgtgtttcatggctttttgccactccagctgtcaatcaaagcccggaatgtcaaggtagtgaatgaatgatggttgatgatgatgaagaggaggaatctttcagacccgtttttttcttccagtaaaactccgcgaggggtttctgcttcttgaattttttcctcccccctccccccttttttagctttgcccccgcggtatctataatacgatcctctctctttaaagtattgttcaaagaaagcagtgagaaaaatcaagaaaaaaaaatgaatagtttgcaaaaattggacttcctccccccctttcctggtaggtattttgtctctccctctctctctttctcgctcgctcgctcgctctcactcgcgctcgctctctcgcgctcgctctctctcgctctctttctctctctgggagatgagtgagtgtcagtaggtgttggcaggttggctgctgcctggcttattgaagagcctcagtttggcggcgcgggtcggcggcgggagaacgaaatgacggaacccggaagtcgtggtggccatagcccgtcgtacggcggagacacatcccgggagtggggagcgggagcgaggaggagcgcgccgcgccgagcctctgatatgcaacgagtgcgatcggacagccccggctgggggggtgggggaggcgggggggcgggagggggaggggaggctcgagccgggcggacccgagcaaatcagcaagcctgctcctccacggggatgggggacggcgggggggaggaaaaggagagtgtgtctgtgtgtgtgagtgtgtgtgtatgtgtgtgcgtgcgcgcgtgtgtgttgcgcgcgcgcgcgcgcgaacagggagagagggagagggggagagagaagaggacagggagagcgcagagaggaaaactgcagaaaaccacagggaaagtacggtaccgcctcagatcttttcatttaaaaaaaaaaaaaaacttacttctagttcattttcccatcactcccggctcctgcctaactgggtcttgccggggacgtttggcatggcgctctagcttttgttccttttaattccgcggcctccctctcctctgcccgccgattacagcaccccgaaggcttcctgctaacgtccaagggcagcaagctctgcagacggtaccactgccgggctaaattttttattaagtggcactttcttttctgcgcagatccagcaaccttgtcaatactcatttttttccaggaccagaagagaccagcttaactcagagcacactccctccaagcggtgcggacaaggggccaccccgagagtctttgggggccgcggcggaatcgggagggaggaagtgaggaggcagtcatctgggtccgatgtagccaaaggcgtgtgtgtgtgtgtgtgtgtgtgtgtgtgtgtgtgtgtgtgcgcgcgcgcgcccgcgcgcccgtgcgcgcgcgcgactagtgtgcgtctccaaagtggatctcactcagagctgggaagcacaggaggaaaagacggagagagtgggggagaaagaagttgccgggcgaggaggagtggccggcgctcacagcccagctttgttgtggtcgcccgaggcgcagcggcgggccgcggtaacgcctgctaatggctgtgttaattacacaggggcgatttcgcggggtcagggagatggggccagctccgaaagaacttttccaaaaaggaaaaggaaacgaagggaactaccccacaccgtttgggtggaaactagttgtggccggtgccctgtcctccctggcccgagctgcaccaggcttcacctctgcgcggctggtttcccggcggccgcgcgtcaatcactacgagcccggagttgggggcggagccacggtcaccccgcgcaagccttgccgcccagcagcccccatgcccctcggccccttgtggcgcggccgggcggacaggcgctggaagcgcgtcctctccccaacttctcgctctcgccctcccagtccctggcccagagagtggaaagcggactgttgttctccaacagccgcatccctccccaactttgaacccattctgagaagtggagagtagtgtcttccgcgagccgcgtctaaccgactttcccgcggagggagggtgggatgggggaggttgattagagagaataaagtactctgtgtgtgtgttgtgtgtgagagagagagagagagagcgagagagagcggggaggagggcgggtgggagggctcttttttttggcccccgttccatgttccctgcttcactgtaagctttcgagcaacagaaactaggctaagattgcagcctgcagagactccaagcggagtcggagaaatttggcctcgttttaatagggctgaggaatgaactccggaggtcaataaagccctccaaaaatgatgaatgattgagcacctgtgatgatgatagtgattaccagagcaattaaacagtttgattaaatgagccatcataacaatgatgtctgcgggaaatcggccctcacatataaagaaagatagtgcgaaggggctggcagaggcgcggatagcgcgacgccagggagaggggctgcgggccgcgaggtttctgcccaatggcccgagcagggacggccagactcacggagcttcagggaggagagtgtagcccaggttttcagccactcttttttgccgggcttcaagcctgctagagccgacgggtaggaaatctgaaggttggggggagggtacttcctccacgtcctcttttttttcctagaagaactccaagattaaaagtatccttatttgttgctgagttgctcgtcgacatttaagagaaggtgagtaaaaaagaaaagaagatgaaagagaaaagaaaaagttggtctccagaattttatttcaatcgacagttacgcgaattcagtttagccgggaccgggaggtttgagagtgcggcggggtggggaggggaaaaaaacaaaaacgctgcggagcgttttcgactttgcaaagctgttgatgttggtgggtccaagttcccggtgcagcgccgctggctgagaaatttgtactcagtttttactcttctaattattcttaaattcaatttaagaatttaagtttatcgtcgccaataggattattgttgttttaaatgtcttgttcaataagtgccagttacgtttctttttaaaagaaattcctcagtgtccttgataaacctttttttgtaaagatcaacttcatgcggaacctctgccttgcagggtttaaacattcaacattgctaccttctgtttctttttctgtttttatagtgatactgtaaagtgagttagcatctctatagctttcatttagaaaaacttaa

SEQ ID NO: 1242199 - DNA, 4001 bp, Homo sapiens
tacatggaagcgggaacccctactccgtccatcccgccgtaatggggcagctcatcgtactgtcagaacccgggaagggggagggggcgcaggaggtgagggagaacagaggaggggggtggaaagggaaaaagagcagggagaagagggcgaacagaaaagagaggaagggataaagatgagagagagggagggaggtaagagagaagagaggaggaggaggaaaaggaggagagggggagagagagagagagagagagagagagagagagagagagagagagaaaataaaaataaaaacaaagtcagaaaggagaaaagtaccgagcacaagttgagcacacagaaaccaaaccagccaaaacaacggagttaaaagttgtgaggaaaaaatgttattaaatttaaaaatgaaaaagcatgaaccaagagcaacgtttagagaaggaagaggaggcggcgaggccggggatttgagggggcgccgggaggccccgctcccgccggaggcaacagaaccgtagcgagccaacggagggagaagtggagttagtgtgaggaggaagccccggatcccacccctaaccccccttcgcctcctctgaggatccaataaatcaaaaggcgaaatgaaacaaaataaagagaagaaaaacgctaataatcagcacgagaacgccgaggactaggaaagactagggccagtgcctccccgggggcagggagcggagggtgggggggcgaataacgtgaaagttaccagaaacattatttagcagcggattccctgcgtccttgtcaatttcagagacaaaacaagcagcccaggctagtagtctaggcggcggcgcagcggctgcggcagcgcggccccagcggcggccccggcggcggctcctacgcagcccgtgcccgccccgagccgcgcgagccacggcggcagcggcgcagcagcggcagcaggagaaccgggggaatcgcgctgctggggtaaaagctggagcgaggcgaaagcgtgtaacgattgcacacgcacacacacacaccactcacacgcactcgccgcccgcccgctcgcacagcgctggaacacgcgcgcccagacacgcacacacgcacgcacacacactcgcacacacgcagaggcacgggagggaaagaagccgatgaataattttgctattttttaaaatactggccgccatcatcaagcagcgagcagcagcagaagcgttgaagggagaggaggcatcgggacaggcccctcttaggagaggatttatatctaggtaagtgttggagatttaaacctaccctttgcgccatcagtctgcgctccaataaactcctggatgtgtcgtatatttaatatcccagtccggataagaaagtgatctaggctgaagattccttttttttttttccaaaccaaagagacttctcccaattctccaatatgctattttttaggggggaaaaaaagcccagtctagacaacgaagaatttttttttctgtgatatttcttctttttctcttttttcctcttcttcctcctcctcctgatcttcctcctcctcctccacctcctcctcctcccccctcccctcctcctcctcttcggtcctcctttccccctctttctcttctcttcccctcagttggaaaaaaaaagaaagaaaagaaaaagaagaaaaagaagaaaaaaattgtcaagcccccgaactgaaggttacgagcggcccgtcagcagcccacatgtaaccgaactgtcgtgtttcatggctttttgccactccagctgtcaatcaaagcccggaatgtcaaggtagtgaatgaatgatggttgatgatgatgaagaggaggaatctttcagacccgtttttttcttccagtaaaactccgcgaggggtttctgcttcttgaattttttcctcccccctccccccttttttagctttgcccccgcggtatctataatacgatcctctctctttaaagtattgttcaaagaaagcagtgagaaaaatcaagaaaaaaaaatgaatagtttgcaaaaattggacttcctccccccctttcctggtaggtattttgtctctccctctctctctttctcgctcgctcgctcgctctcactcgcgctcgctctctcgcgctcgctctctctcgctctctttctctctctgggagatgagtgagtgtcagtaggtgttggcaggttggctgctgcctggcttattgaagagcctcagtttggcggcgcgggtcggcggcgggagaacgaaatgacggaacccggaagtcgtggtggccatagcccgtcgtacggcggagacacatcccgggagtggggagcgggagcgaggaggagcgcgccgcgccgagcctctgatatgcaacgagtgcgatcggacagccccggctgggggggtgggggaggcgggggggcgggagggggaggggaggctcgagccgggcggacccgagcaaatcagcaagcctgctcctccacggggatgggggacggcgggggggaggaaaaggagagtgtgtctgtgtgtgtgagtgtgtgtgtatgtgtgtgcgtgcgcgcgtgtgtgttgcgcgcgcgcgcgcgcgaacagggagagagggagagggggagagagaagaggacagggagagcgcagagaggaaaactgcagaaaaccacagggaaagtacggtaccgcctcagatcttttcatttaaaaaaaaaaaaaaacttacttctagttcattttcccatcactcccggctcctgcctaactgggtcttgccggggacgtttggcatggcgctctagcttttgttccttttaattccgcggcctccctctcctctgcccgccgattacagcaccccgaaggcttcctgctaacgtccaagggcagcaagctctgcagacggtaccactgccgggctaaattttttattaagtggcactttcttttctgcgcagatccagcaaccttgtcaatactcatttttttccaggaccagaagagaccagcttaactcagagcacactccctccaagcggtgcggacaaggggccaccccgagagtctttgggggccgcggcggaatcgggagggaggaagtgaggaggcagtcatctgggtccgatgtagccaaaggcgtgtgtgtgtgtgtgtgtgtgtgtgtgtgtgtgtgtgtgtgcgcgcgcgcgcccgcgcgcccgtgcgcgcgcgcgactagtgtgcgtctccaaagtggatctcactcagagctgggaagcacaggaggaaaagacggagagagtgggggagaaagaagttgccgggcgaggaggagtggccggcgctcacagcccagctttgttgtggtcgcccgaggcgcagcggcgggccgcggtaacgcctgctaatggctgtgttaattacacaggggcgatttcgcggggtcagggagatggggccagctccgaaagaacttttccaaaaaggaaaaggaaacgaagggaactaccccacaccgtttgggtggaaactagttgtggccggtgccctgtcctccctggcccgagctgcaccaggcttcacctctgcgcggctggtttcccggcggccgcgcgtcaatcactacgagcccggagttgggggcggagccacggtcaccccgcgcaagccttgccgcccagcagcccccatgcccctcggccccttgtggcgcggccgggcggacaggcgctggaagcgcgtcctctccccaacttctcgctctcgccctcccagtccctggcccagagagtggaaagcggactgttgttctccaacagccgcatccctccccaactttgaacccattctgagaagtggagagtagtgtcttccgcgagccgcgtctaaccgactttcccgcggagggagggtgggatgggggaggttgattagagagaataaagtactctgtgtgtgtgttgtgtgtgagagagagagagagagagcgagagagag

SEQ ID NO: 1242200 - DNA, 4001 bp, Homo sapiens
tcccggggagtgcaggtcgccagctcgcacttctcaaagaccagagctaacagaggaaacaacgggtgcctaacgggcagcgccacgcagagacacacacacagagacggggtgcagaggggaaggagcaagaactgtaatcaacaagtttggagggtgtggagtccttctttaatacaacaggcacgcaccacactttacaacccttcctccatcaggcgagcctaagccagaaacagaaagggaaaagggcctggccctctcccgcagctcagaggtccctcagatctggccagagaagaccccggccactgcagcccgacaaataaaaacagcctcagttggaacgtaatgaaacatccgagacgctcaggcagtctggagcccgagtcgattctgatccactccccacactacggaggccgcggaaccaacccctgagacccagccctgacctcccaagaagggaacactgtgtgaaattgaaaaaaaaatagttttaactctgcattttaatgggcatttcagacgaggccaaaggcttcacctacatacacaccggagtgacacttcataaatgcaagagaatgctcttttaatctctccacctccttgccttataaacttgtttgctcctgttctactaaagccacagtgtgggggccaaaataataggaaggttacacactggagagcttccttccaaagaccacatttctcccagcgttgcagcagacaaaaataaataaatcgtgttttaaaactttaagtgtgcgtgcgcgtatgccctttgtgttcctccgggcggcttagccacacttcgggatgcttgcggcctctggcttggggctcagttgctgtttacccactgtcccctcccctcggcatcccgtcgctttgcccacctaccctcagccggaagagctcgtgtggtacacgttaggatcgtgcatctcacccctcgccaagtgctctcagaatataaaataatttccagccatcttccttactccccctaagagcggctccaagcaagcaagagtcccttccacctcgctgcacttcgaggtctgccccctttatttacagagaattaagaagtgggtgattaggacttcctggccgacagaagcagccctgatcccagctcaagctgctgttagtgactcccagaccctcagtaggaaacagaagaaaaaaaagtaaaaaataaaaaaacccaaagttgcttctcatcggcaggaaactttctccttcgtcaaggcctctgttagggagcctgaaacgagcagtcctgcgtcctttggccaggaatcctgtcctcggggagaaggccccggcaagattctggggactcagtcactccaggctgtggggtctggagtggtcgggctgtgagagcgaaagaggctagttcttcggggctttgactccaggggcagaagagcaggccccctccacggtcccttcctaaggcaagcggcgcccgccccccaccatacagaagtaactccccacttagtcgtccaccttcccacccccacagagacaaacacacactctcacactcacacacagtaagctgggtccggggggtcagtttacccatagatcgcgtccttgtcccgcttcaaggcgtcgttgacagcggatcccatactggccggcatgacattggggtgcggggcgtgcgcgccgtagtgctgtgtggcgtggagcggcggcccgtggttcaggtggtgaaccggggggatcggccgcggcgcgtgagggtctccgtacatggaagcgggaacccctactccgtccatcccgccgtaatggggcagctcatcgtactgtcagaacccgggaagggggagggggcgcaggaggtgagggagaacagaggaggggggtggaaagggaaaaagagcagggagaagagggcgaacagaaaagagaggaagggataaagatgagagagagggagggaggtaagagagaagagaggaggaggaggaaaaggaggagagggggagagagagagagagagagagagagagagagagagagagagagagaaaataaaaataaaaacaaagtcagaaaggagaaaagtaccgagcacaagttgagcacacagaaaccaaaccagccaaaacaacggagttaaaagttgtgaggaaaaaatgttattaaatttaaaaatgaaaaagcatgaaccaagagcaacgtttagagaaggaagaggaggcggcgaggccggggatttgagggggcgccgggaggccccgctcccgccggaggcaacagaaccgtagcgagccaacggagggagaagtggagttagtgtgaggaggaagccccggatcccacccctaaccccccttcgcctcctctgaggatccaataaatcaaaaggcgaaatgaaacaaaataaagagaagaaaaacgctaataatcagcacgagaacgccgaggactaggaaagactagggccagtgcctccccgggggcagggagcggagggtgggggggcgaataacgtgaaagttaccagaaacattatttagcagcggattccctgcgtccttgtcaatttcagagacaaaacaagcagcccaggctagtagtctaggcggcggcgcagcggctgcggcagcgcggccccagcggcggccccggcggcggctcctacgcagcccgtgcccgccccgagccgcgcgagccacggcggcagcggcgcagcagcggcagcaggagaaccgggggaatcgcgctgctggggtaaaagctggagcgaggcgaaagcgtgtaacgattgcacacgcacacacacacaccactcacacgcactcgccgcccgcccgctcgcacagcgctggaacacgcgcgcccagacacgcacacacgcacgcacacacactcgcacacacgcagaggcacgggagggaaagaagccgatgaataattttgctattttttaaaatactggccgccatcatcaagcagcgagcagcagcagaagcgttgaagggagaggaggcatcgggacaggcccctcttaggagaggatttatatctaggtaagtgttggagatttaaacctaccctttgcgccatcagtctgcgctccaataaactcctggatgtgtcgtatatttaatatcccagtccggataagaaagtgatctaggctgaagattccttttttttttttccaaaccaaagagacttctcccaattctccaatatgctattttttaggggggaaaaaaagcccagtctagacaacgaagaatttttttttctgtgatatttcttctttttctcttttttcctcttcttcctcctcctcctgatcttcctcctcctcctccacctcctcctcctcccccctcccctcctcctcctcttcggtcctcctttccccctctttctcttctcttcccctcagttggaaaaaaaaagaaagaaaagaaaaagaagaaaaagaagaaaaaaattgtcaagcccccgaactgaaggttacgagcggcccgtcagcagcccacatgtaaccgaactgtcgtgtttcatggctttttgccactccagctgtcaatcaaagcccggaatgtcaaggtagtgaatgaatgatggttgatgatgatgaagaggaggaatctttcagacccgtttttttcttccagtaaaactccgcgaggggtttctgcttcttgaattttttcctcccccctccccccttttttagctttgcccccgcggtatctataatacgatcctctctctttaaagtattgttcaaagaaagcagtgagaaaaatcaagaaaaaaaaatgaatagtttgcaaaaattggacttcctccccccctttcctggtaggtattttgtctctccctctctctctttctcgctcgctcgctcgctctcactcgcgctcgctctctcgcgctcgctctctctcgctctctttctctctctgggagatgagtgagtgtcagtaggtgttggcagg

SEQ ID NO: 1242201 - DNA, 4001 bp, Homo sapiens
gcaagagtcccttccacctcgctgcacttcgaggtctgccccctttatttacagagaattaagaagtgggtgattaggacttcctggccgacagaagcagccctgatcccagctcaagctgctgttagtgactcccagaccctcagtaggaaacagaagaaaaaaaagtaaaaaataaaaaaacccaaagttgcttctcatcggcaggaaactttctccttcgtcaaggcctctgttagggagcctgaaacgagcagtcctgcgtcctttggccaggaatcctgtcctcggggagaaggccccggcaagattctggggactcagtcactccaggctgtggggtctggagtggtcgggctgtgagagcgaaagaggctagttcttcggggctttgactccaggggcagaagagcaggccccctccacggtcccttcctaaggcaagcggcgcccgccccccaccatacagaagtaactccccacttagtcgtccaccttcccacccccacagagacaaacacacactctcacactcacacacagtaagctgggtccggggggtcagtttacccatagatcgcgtccttgtcccgcttcaaggcgtcgttgacagcggatcccatactggccggcatgacattggggtgcggggcgtgcgcgccgtagtgctgtgtggcgtggagcggcggcccgtggttcaggtggtgaaccggggggatcggccgcggcgcgtgagggtctccgtacatggaagcgggaacccctactccgtccatcccgccgtaatggggcagctcatcgtactgtcagaacccgggaagggggagggggcgcaggaggtgagggagaacagaggaggggggtggaaagggaaaaagagcagggagaagagggcgaacagaaaagagaggaagggataaagatgagagagagggagggaggtaagagagaagagaggaggaggaggaaaaggaggagagggggagagagagagagagagagagagagagagagagagagagagagagaaaataaaaataaaaacaaagtcagaaaggagaaaagtaccgagcacaagttgagcacacagaaaccaaaccagccaaaacaacggagttaaaagttgtgaggaaaaaatgttattaaatttaaaaatgaaaaagcatgaaccaagagcaacgtttagagaaggaagaggaggcggcgaggccggggatttgagggggcgccgggaggccccgctcccgccggaggcaacagaaccgtagcgagccaacggagggagaagtggagttagtgtgaggaggaagccccggatcccacccctaaccccccttcgcctcctctgaggatccaataaatcaaaaggcgaaatgaaacaaaataaagagaagaaaaacgctaataatcagcacgagaacgccgaggactaggaaagactagggccagtgcctccccgggggcagggagcggagggtgggggggcgaataacgtgaaagttaccagaaacattatttagcagcggattccctgcgtccttgtcaatttcagagacaaaacaagcagcccaggctagtagtctaggcggcggcgcagcggctgcggcagcgcggccccagcggcggccccggcggcggctcctacgcagcccgtgcccgccccgagccgcgcgagccacggcggcagcggcgcagcagcggcagcaggagaaccgggggaatcgcgctgctggggtaaaagctggagcgaggcgaaagcgtgtaacgattgcacacgcacacacacacaccactcacacgcactcgccgcccgcccgctcgcacagcgctggaacacgcgcgcccagacacgcacacacgcacgcacacacactcgcacacacgcagaggcacgggagggaaagaagccgatgaataattttgctattttttaaaatactggccgccatcatcaagcagcgagcagcagcagaagcgttgaagggagaggaggcatcgggacaggcccctcttaggagaggatttatatctaggtaagtgttggagatttaaacctaccctttgcgccatcagtctgcgctccaataaactcctggatgtgtcgtatatttaatatcccagtccggataagaaagtgatctaggctgaagattccttttttttttttccaaaccaaagagacttctcccaattctccaatatgctattttttaggggggaaaaaaagcccagtctagacaacgaagaatttttttttctgtgatatttcttctttttctcttttttcctcttcttcctcctcctcctgatcttcctcctcctcctccacctcctcctcctcccccctcccctcctcctcctcttcggtcctcctttccccctctttctcttctcttcccctcagttggaaaaaaaaagaaagaaaagaaaaagaagaaaaagaagaaaaaaattgtcaagcccccgaactgaaggttacgagcggcccgtcagcagcccacatgtaaccgaactgtcgtgtttcatggctttttgccactccagctgtcaatcaaagcccggaatgtcaaggtagtgaatgaatgatggttgatgatgatgaagaggaggaatctttcagacccgtttttttcttccagtaaaactccgcgaggggtttctgcttcttgaattttttcctcccccctccccccttttttagctttgcccccgcggtatctataatacgatcctctctctttaaagtattgttcaaagaaagcagtgagaaaaatcaagaaaaaaaaatgaatagtttgcaaaaattggacttcctccccccctttcctggtaggtattttgtctctccctctctctctttctcgctcgctcgctcgctctcactcgcgctcgctctctcgcgctcgctctctctcgctctctttctctctctgggagatgagtgagtgtcagtaggtgttggcaggttggctgctgcctggcttattgaagagcctcagtttggcggcgcgggtcggcggcgggagaacgaaatgacggaacccggaagtcgtggtggccatagcccgtcgtacggcggagacacatcccgggagtggggagcgggagcgaggaggagcgcgccgcgccgagcctctgatatgcaacgagtgcgatcggacagccccggctgggggggtgggggaggcgggggggcgggagggggaggggaggctcgagccgggcggacccgagcaaatcagcaagcctgctcctccacggggatgggggacggcgggggggaggaaaaggagagtgtgtctgtgtgtgtgagtgtgtgtgtatgtgtgtgcgtgcgcgcgtgtgtgttgcgcgcgcgcgcgcgcgaacagggagagagggagagggggagagagaagaggacagggagagcgcagagaggaaaactgcagaaaaccacagggaaagtacggtaccgcctcagatcttttcatttaaaaaaaaaaaaaaacttacttctagttcattttcccatcactcccggctcctgcctaactgggtcttgccggggacgtttggcatggcgctctagcttttgttccttttaattccgcggcctccctctcctctgcccgccgattacagcaccccgaaggcttcctgctaacgtccaagggcagcaagctctgcagacggtaccactgccgggctaaattttttattaagtggcactttcttttctgcgcagatccagcaaccttgtcaatactcatttttttccaggaccagaagagaccagcttaactcagagcacactccctccaagcggtgcggacaaggggccaccccgagagtctttgggggccgcggcggaatcgggagggaggaagtgaggaggcagtcatctgggtccgatgtagccaaaggcgtgtgtgtgtgtgtgtgtgtgtgtgtgtgtgtgtgtgtgtgcgcgcgcgcgcccgcgcgcccgtgcgcgcgcgcgactagtgtgcgtctccaaa

SEQ ID NO: 1242202 - DNA, 4001 bp, Homo sapiens
agcgccgacgcgctggtgctcatgcacttgacgcccagcttgaactgctcccgcgaaaagcggtcccgtgacttgtcactggccagggcgcacgcgtccgtcaggaacttgaggttgcgcgacaggccctgcgacacctccagcagcagctgcggcgtcatgtcggccagcggcgtggcgcgcagcacggcgcaaccctgctccacctcgtggcggcatcgcgtcacgcggtagcggtccaccaggcccggctgcgcgggctgggcgcccggcgtggccacagcggccagataggccgcgtgggccgagcactcggtcagcgacaccaccaggtcgcccagctccaccaggctgtcccccgcctccccgaagcggcccatgttgagctggctctgcacgtcgtgggtgaggatggagagccccttggtgcgcgcgatgatggtgtcccggcactgctcgaaggactcggcgccggcaccagaggaggcggggccctcgaagagcacgggccgcgcctcgctcgacagcagcagcaggtcagccaccagctgcatcttgcccttgcagtggtcgcagacggataccagcctcttccgcggctgcgagctggccccgccgatggcgctcgcaggagccggagaagccgcctcgccagtgggcttcccggcgctgccgctagccatcgcgcccggggggcactggcatgccgctggggagcccgctaccaccgccgctgccgcggccactgccgccgccccggcggccgtcgcgactcagctggccaaggccgcggtgccttccccgcaccatcatgccatccaccgccgcgggcagagggcactgggctgcggcggcgggagcccgggcggcgcggggtgggcccgagggcgagagaacgcggaaggctcttcggggcaaggggaggggctgcagctttcggcctcctagagggcttgcaggaaccatgaaccggggcagagcaaactcactgtccgcgctcctcgtcgccgggctgccaggaaagtcccttctgctggttcgccgccgccgccgccttcttgggcatggcctggcgcggccctcggagcggggagggcgggacggggaagctgggagttgtccttccttccttcctttctttgaaatcaaaatcctttcctcggggaggagcgcgggaggcagctcaggcgggctgtgctgtcagccgccgcgctcgaggccacctcgggctcggcggcgcacgtgggcttcaggcgccgtgaccccaccaggcggcacttccccgcgacggcggccggggctggctctctgggacgcgcggccgccccgggcgcatctcctgcctccagctcttgggaagcggcgccggcggcagcggggcagagggtgtggccggcactgtcgcggccgcgccgagtcagagtcgggcgggagcctgcactgattgcgcacagcggccgcccggatcgcgctcaagctctcgcccgcccgccacacgcccgggcgtgccgagcaccacggcggccccttcccgcctcgccggttcacagagcgcggcccggcgccgcggcggcacgccctcccagaccgcgcgcccggcggcccggcgctggctgtctacgcaagtccatccctgtcgcctcgtctggggcccgcagcagctgagctctcccgaggccccgggccccgcgcatcggacgcccctgcacgagtctccctgccaccgggccaactcagaaggtccccgcggcgctgcggcaaccggcccgggccccggctcctgccatttttgtcaaccgccaacttccgagcgagcgggcagaaactgaaaggaagggcgggggccgaaaggcagaggggaaaacacccgcttcctctccgcgcgcggcttcacctcggagcgcggccgtggctgcgccgccgcccgcaggggctgccggaggcttttcctgttcccgtccgcgcctcgcccccgggctcgccgccgccgccgcctcggccgtaacctccctggagcctatagaaatcttttgtgtggcgtcaccgcctttcgtttaaatcccgcttcctcctctcgcccttcctcccgccccctccgccgctcccggatgcttgcgcgatgcgctgctcctcccccgggaagctgggtggctgcgggggacgccgccgcccaacgcggacgctgccggcgtggggccggtggtcctgaactcccccgtggtcctgggccgagagactgggggagcggacaggggaaggcctgctccggcccgggggctctgcgcacacccatgggagaccggggcgcagccgcccgcgggccttacgtaagctcttagccggaccagggggctccacgcttcctccccgccaagagagcaagtctaaaaggtgacctggcttctgggctgaagggaggaggacactggatttcggcccctggtgatttgctggggccggtgggtcgtctcggtctgcgcgacttcgcccggttttccaacgccccctgccctttgttgtgtttgatccacttccacgatgggtttccgaccagcagtgcagtgtaacgaaaagaggaaaagagcactggatggggagtccgaagagtggtgctagatgcctgcccgttcctcccttgaaatacgccttatgcagtgagagcgcgggttctgaagcagatttcctaggatcagcctttctcaagccatttatgagttccatgacattgttcaagttctctttccaagtatccgtcttctcttctagaaattagagattgtgcacaggctgcttgagtacttggttcctaaacagtagctgttagaattattatgagccctgatcagcgcactttgccctctcataacgtctatttattcgtctgtataatggaataatagtggctgctgttaaatgaattaaatacgacggcgtttggagggaaacattactactccagttttacagataaggaaactgatgatcaggtgcttgaagtgacttccgaagatcaggaagacagcatatggcagggacaggaacccacgcctacgccccagcctctttttaccgaaccttgttcttcaggaagtggttaaaacacctgggctactcccagcaaaacgccagtcacgcagtcctgaaacaggtcctctaaggtgcccagcccaacacaggctgggcgtgctgagccaacagaatgtttgttcctctgtcccttcctagaaccccaagtcacctttctccagccagttaaaaacgttacttttaactaggatgacgtttcaatttatcggccatatccaagcatttctgagaatgaactgtgagacatgctattaataaattaaccatgaacagcaggttcaaacctggatggatagtcatcctacttataactgaaagtatccttaaatatctttagaatccggatgagcccacttagtttgcaaaccgaggtcaataaaactgacttgaaataggaagtaattatgtagggttaattcctttttttcttctacaagagaaaaaaaaaacagctggataagtcaaggtttttccatggtgacccagggattgcaccttagtccttcttaagctccaaaaacttatgagagggggccgaaagcgatggctcacacctgtaatcccagcactttgggaggccaaggcaggcgcatcacgaggtcaggagatcaagaccatcctggctaacacagtgaaaccccgtctctactaaaaatgcaaaaaattagccgggcatggtggcgggcgcctgtagtcccagctactcgggaggctgaggcaggagaatggcatgaacccgggaggcggagcttgcagtgagcggagatcgcgccactgcactgcagcctgggcgacagagggagactccgtctcaaaaaaaaataaataaataaataaataaaacttatgagagggaagtcagactgttctgtgcctagtttattcttgaggctgctctaagatcagattttttt

SEQ ID NO: 1242203 - DNA, 4001 bp, Homo sapiens
ctttgggaagccaaggtgggaggactgcaaaggccaagagttcaaaaccagcccagccaacataaggagaccctgtctctataaaaaataatttaaaaaacaaaatcaaccatcaagtcctgttaaaagtataaaaatctcacatttctcccttctactctgctcctgcagtttctagcttaatccacgtcttcctcactatccttcatttgcacttctgtcaccaacatgtgtggcagtacaggtaaaacagttcaaagaactggctctaaaagtcgcgaaagaatttgaaactcagctagcttgctgtgcgatgtggagcaagttatttaacctctttgtgtctcaatgtcatcatctagaaaatagggataagtacctccctcatggatggggtaaaaggattaaatgagataatgtgtttttcttggccttcaaagtctctccccactcatccatcctgttatctactgttcccagtgcaatctttgttcatctcttcagcaccctcttcgtctagctcagggtctgagtaggtcaaggggaggatttctcatgaggtgatgttctcactctggcagatcaaaaggctttatttgctggagtccaaaaagagacaaggagattgcaagggagacggtgaatggggacgttctctctacactcaaatctatcccaatctttccatcagctgttgatgaccacatgaaaacacaagcctgcattcttctagtcagatgcatcaggtggtattttaaactcttgtctgaaagtctttcccttctcccgtaacacacacagagataatcacaaaataacaaaacatcagtgttggaaggaatcttaggacccatcctaacctcctcatgttgcagataaagaaaccgaggcctagaaactagacataacctgcccaaggttccacagctatgcaagtcaaccaggacgatacaatcaccttaggaaggggaaaaggcagcaatgtggttttggccagtaatctttaccttaaagcgtattacacactccctgtaactgcacactccggtgcgtccaagtgacaaaccagaaaacttactctcctttgaacaaaaagcgtgagtttcacgatacagagccattagccattgatacttctcccctcagtaaaataaatccacccacaaaaagcacaaaattcccagcagggacatataccaaaataggaagtctaaaattatactgatttagaagacagctgagataaccattaaggaagaccatcttcactgcaacccactctcccacccactcaccgcaaaacagaaggaaatgctctttagtagattgggaaaggtcactctccctgtttgcagggctcactgaccacaagaatcaacgcaaagacaaccagggcactgaagggtgaagggagagcaaagctgaacagtgaggggcagatccgtgattgaagtggtttgagaaatggcaggaggaacagggcactggaatgacagagggctggagcgagggtcagcagggcgcgcgggtcagaggaggaatggagggtcaacagtggcttcagtgggtcagtaaggattcaaggcatgagtagaggaggttagggggtcagaaaggtcccaagacagaacaggtaaggggtcatagggaacagggtcccgcacagagaagagccgggagggtgtgcgcgcgccgcggacctcccattgctccagaagacgcgccatgtctgcatcattgtaatcgcgaatatccttcttcttcttccggggaggtggggtagactcgtcgggcgtcccgggcgagccttcggccgcgcaggacccaggcggtggtagcagtagcagcagcagcagcaggtcagaggcacaaagcaggaccacggccttgcgcgcccacctggaagccgccattttcgctgcgccgcgcagcgccctagacgcgcttacccgacctgcgcgggccggaccccgccttgcacacgccttcctgtccgcctttccgaggccccgcctcccggccctcgctagcctaccgggccccgccccgtaccatttcctaacccccgcctctggaagccccgcccctccgccattttggccccgccccactggctcctcctcttggtccggctgaggcgctctgtcccggctgggtgggtccctgagtgctcatttttcgttttccgtcagaggccgacctttttctctggaacgcacaagccaggtccaaaagttccttcagggcctccaggaaccactaaccaacgtccctgttgacctcagtttctcgcctgtgaaataaattggaactggaagttctggaggctgcctcggctctaaaaaagcccatttctggatgtcggacgtttatcctcagtctcttgcaatttcctttgagaacagccagttaaaaagaagtgagtggcaggtagggcaacttttttcagaaagtcataaatagttcgagtccactgctttcctcatcaataaagaggattcagttcaaccagctttcaatatttgttttttttttccaaaaagatcattactattcatccaaaaaaaaaaaagcttgcctttctttgatttcaacctaatactgtaggctctaactaatccttttcaaggctgaatcacgctactttttgtttcttaaaaagattttggccaaagatgctttgagattcttcttgttttaaacggctcatcagctgatgtctttaaaatgtttaattacataagaccttaaaaaacaaaaaacaaaaaaaaccaaaggccgcacggtggcttaagcctttataatcccagcactttgggaggctgaggtaggacgataatttgagtttaggagtttgagaccagactgggcaataaagcaagacccgcatctcaaaaacaacaacaaaaaacgcttcattctttatactgctgcacagttttatttggtattgttaaattaatagtttattttcctattgatgggcatttattaccaatttttctgctattacaacaaaaaagagctgtagtaaaccttattcaagccttgtttggataggattagtaggctgcatataaaagaaaactgactttttaaggtggtttaaacaagataaaaggttttattgtgattgacttttctttcacagaagcagtgtaaactcgaaactagggctggtatagtggcttctcagccatctggtactcagcctcttcctcatccttctatcatattagcctgtggcttccaccctcaaggtcagaaattccaggatggctcctggagctccagtcatcaagatgacattcaaccagaggaagggagaaggcaggccaaaccaagcacacctttcaagtggagtcaacttcttttaagcagcctacttgaacattgcatacatttctgtttacatctcattggctggaacctagctctccaagggaggctgagaaattgtcttctagctgtatacattgtcatctcaaatgaaattaggattgttataaagggaaaagaataaagtggaggttgagtaggcaactacgcctgctttccttcactcttaggaccagtgcaatttaaattctctcacaccgtaggagtggctgatattctacatattcatgcatgcatctgtatgtaaacacgctaagctatgacctttcctattgacgttgagcagaaacaactcataagaaaaagattttttcttttgtgaaatcataggggaaatgtcatgagctttctccccagagcacattgctccacccagtggcttggagccctatcctagtgcagtcatactaaaaaacatgcacagctgtggctgatcatgtgctctactgggaggggtcaccctggtaattcatattgccagcttcaaagttaaggggcaaacgtgttgggattcttggcccacatatctagttatagagaataagatcattgaaagttttacagaaattgttgggaatgtgtagaaagtttcagggctactg

SEQ ID NO: 1242204 - DNA, 4001 bp, Homo sapiens
atgggaaaatgccggcggagggtgggggagttccaaggccaggatgctcccgtgcatggagaataagaccacaggatgcaagaaaataaccccttggagctgttatccctcaggccccaacatgtatggagctggcaaaatcccacaagagctgagcgctgggactctggaggcctacctgggcttgagcgctgatcctcatccttctgtaaaatggttacttgagtataataggtacctgatgtacatacaataaatactcaataatggagttgtatttctacacagatattttggttttaaccagttccccaccaggttcaaagaaaagatgagcagattctacttgccgctgccttctcacaggacgtccctccccacccattccaggctgacccatctggactagatgctgagccagggctgggggtaaggccaaaggggtctgggcctgtgggggtcggggggctaaagattgcaagaacccctcccacctctcccatgctcttctttggagggagagagggagctctgtgtccacgggtaggaagaagaaattgccaactgacaccagtacagtttattcacaaataaataaattcacattaggcagagcctcctgcttgcctcaaagtgtctagccctatgggtccctccatggagggaggggctgagaagggccgccgcggtggggacggctctcacccgcaggaatgcccccgtcgggatcgcccgtgccctcttccaggaaaggcagtctgccaaggaaccacttcgaaggtgctgaggccaaaaagcctcggtgctcacagagacggcgtcagttgtcccttgtcacttgggctcctcaggcagccactccagaggcgagaggggcatccaggtctccaacagagccagcacgtcgcccggaaggagctgtagggagagacggaacagcgcagccctcaagcactggtggccttgtgcgggtgtccgcgctcgtgggctccactctcagggggcccctagcgaggggagacccagtcctctgcgtggcctttccctgccttcgcttcttggagccctgggcatactatggtggccaggtggccaggctgccggcggggagcagcagggtgcctggtcctcaccttggcgggcggtggggctgtgcgcgggggcacggacgaagggggcgcggggaaggggacactaaccggggacggtgggcttggctccatcgcctgcccttcagggcacgccgcctcggcgaacagcgcaggcgggtcgcgcggctcgggtgcagctcgggctccggggcaggcaggcggggatccccaggacgccccggcgcggacggcggataccaggcccagcccgcgcccctgcccctgcccctcagcctgcgtccgtgtctgcatctgcgcggggcagtcgtcggggcacagcgggcagccccgaggggaccccgcgtcaccgcgctgccggcaccggcgctggagactctcctcgctgaggcctagcacggccgacaggtggccgatatagcggatagccaggcgcagcgtctcgatcttggtcaggctctggcccgcgggcgccacggacggcggtagaaagcggcgcagctcgtgcagggcgcgggccagcgtgcgcatgcgcagtttctcccgctcactggcgctctgcctctgcccgctgcccaggcggctgctgcgcgcgccgcgcctacctacggagggggcgcgggggtcccggagggtgcctggccgcgcggggctcgccacggggctgtcggctggggtgctgccccatgagtctggggacgagacgagggagcggccgcagtccttgtcggagggcggcggccgccgagttgggccccaggccgcagagagcatccaggactcggagagcggcgggcacaggggctgggccatggcagcggcggcgcgtctgggggccggcggccggcggccgctttatgccgagcccgaggtgtgaagtggccccttccaggccgcatcagcacatcaaagtgggctcggggcttggagggggcggagcctgaccctttgaatccacggcggggggccaaggtgccagccccttgactgcgcctgtttcgccccacctgggccctcgcttgggcgcccgacccagcctctcggccttcccgcctgcgcccagtgttgggtgaagcccggggcgttgggccagccctgcaggttaaaggaagcggggtcagaaaaacgaaatctagatcctaggtttggggcctgccttcacctgttggggaccttatgcaaattcttagttcttttgcaccttagcttccaatttgtataatgagagcctcagggcatgcgccaattggacagtggagtagagtaaggaccaggagcagggaccctcattccctctaaaggtggagaaaacagtaaaccacttctcctttgaggcaggatggccctgggtagacccttccctggtaagaacatgtggacagtgcaaggaagcttgcaccccggcaaattcaataagctgccgagtctggtcaggatgctggaccttctgagcagagggagggggttaagcctgctccaaccccaggccacctctagcctggcaaggtctggagcttggcctgttgccacagctgtcaccactggcctttacctgatgttctgccgctattggacaggtataacaggttttcccaatgaaatgtgagtggaaatgacgcagcaaaggcatttgacaaaatccaacacccttcgtgatgaaaattctcagcaaactaagaatagagaggaatttcatcaacctgatgaaaggctcctacaaagaacctacaggtagcctcatactgagtagtgaaagactgaaatcttccccccaccccccgattgcaggaacaaagcgagggtgtctctcttaccactcctattcaacattgtaccagatggaggatctaggctatgcaattaggaaacaaaagacatacaggtcagaaaggaagaaataaaactcttttcgcaggttatggcagctctgggccctgctgcgcatgagcctgaccaatttaaagcggaatcctggctccaggaaacccatgagacgaccaaaaggtcggagaagaggtagaaaatgcggcagaggccataaaagagaaaggcagagaggaaactggctctgctgggctttggggatggccagactctattttacatcggaatcccaaaatacagatttaatgaaggacttagcttcagacaccagtatcaacctttaagtatcaatagactgtaatatgttactgatttgggtcgtgttgatcctactcaacctattgacttaacccagcttgtcaatggaagaggtgtgaccattcagccacttaaagaggattatggtgttcagctggtcgaaaaggccgcagacacctttcaggtgaaagttaatattgggccgggcgcggtggctcacacctgtaatcccagcactttggcaggccaaggggggtggatcatgaggtcaggagattgagaccaccctggccaccgtggtgaaaccccgtcttattaaaaatgcaaaaattagccaggcatggtggcacgtgcctgtagtcccagctacttgggaggctgaggtaggagaatcacttgaacccgggaggtggaggttgcagtgagctgagatcatgccactgcactccagtctgatgacagagtgagaccccctgtccaaaaaaaaaaaaaaaaaaaaaaaagttaatattgaagtacagttggcttcagaactagctattgctgcaattgaaaaaaatggtggtggtgtcactacagccttacaggatccaagaagtctggaaattctatccaaacctgttccattctttttggagacaacccattccaaaaagaatgcttccttctgaagcactggtaccatattccaccaatgcaaagaatcgtgggaacctggcagatcctgccaaatttcctgaagcacaactt

SEQ ID NO: 1242205 - DNA, 4001 bp, Homo sapiens
tggaaagagggaagccgaggccatttagtagaagatgcccaggcgggccccctccagatcttcttgccaaagttcagggcagccactgaaccgcaggcctgagctctggggagggcttgcttcactgagctggaaggcggcgcccggtccctggtcctctgagttgggcaccacctctgcactgtggctccagcacctcccgggggtctgaggctgcagtctctggcatgatgggtggggcaggagagatggagctcccagcgacagacagggctctggagacacagagagaccctgcaagagagatgagagcagcctggttagtgggctactccctgatatccagagatcttgaatctggctggttgccatggtatggctggcagcatccggacagccctggtgccatgaatgcagcaaagccaagtggttaagaggactggctcgggagacactctgctaaggcttaaatcccagttctgctactcactagtaatgagaactcaggtagcttcttttagtctcagttttctcacctgtaaaatagagatgctgataatacctacttcctagggtcattactggggctgaataatacatgtaaggtgccaagaatgatgatgggcacatagaaagtgttcaacaaattttggttaatatgattttttatggacgatgagtcattcatgagcctcatgaatgaacgaatcttgaagaaaacttgaaatcaccagctctaggcccatctactcaggaaatgctgcccttaccctgggacttccttcccccactgcagtcttaatagcacttgaagccagcacgcccaccctgctactttccaccctctgagaaagtcggcgggctccccctctttcccatggctgtgaagactgcttgtggtgactgtggagatggccttaacttcccagggtcccatctcttctcccacggagccgggggttccttccattctcccctccgttagataatcctggagtagataagctgggatcgaaaaagtacgagattctctgcagactggaggctggggaacacagcaagggcctccacacatacctggtacactgcggccagctccaaagttgctggggccgccgtccagggcactggtgggttccggggctctggggacgactgcgtccagggacagccttggggtggcgtccaaagagacgcgtcggaggttgtcccttgggacgaatacgggggcgactgtatcttggggcagtaagggggtgttgcccagggatccgtgtcgtggacccccctccccaggcgctcgggtgcggcttgggctccggggcaggcggacggggatccccaggacgcctcggcgaggacggcggagaccaggcccggcctgcgcccctgcccttgcccctgtccttgcccctgtccttgcccctgcccttgcccctgcccctgcccctgcccttgcccctgcccctccgcctgcgtctgcgcctctgcggggccacggtcggggcacagcgggcagccccaaggggaccccgcgtccccgcgctgcctgcgccggcactgcagactctcctcgctgagacccagcacggccgataggtggccgatgtagcggatggccaggcgcagcgtctcgatcttggtcaggctctggccggccggcgccaaggagggaggcagaaagcggcgcaactcgtgcagggcgcgggccagcgtgcgcatgcgcagtttctcccgctcgctggcgctctgccgctgtccgcccgctggtccggtgcgcgctcgtctgggcgtcgtcgcggctgcctctgcggctcgggagctgcagctcggaggctgtggctgcgggagtccgcgggcgccgtcgcaggggcacgaacccgacgaatcggaggaggaggccggggacgtggagtcccagtggccggcccagccccagccctgggcgaagatccagtggtcgtggccgaggaggctctgcggaggaggcgactgggccatggccgggctgcaggctctgggaggctgggttggccacctccaggcctgagcttttatgttgaccaaaggtgcgaggtggccccccgccaggttgcagagaggtgtcaaaacccacagagcccagggaaagtctgggcagggggcccctgggaaagcgggcccatttgcggaggtgtggattctgactccttgggggctctaaatggaggcccctgcagcccgggaagtatgggagggacaattcgcatctggatggagctgctaagcttctcaccacgctcccacccacgcccctgccccgtccactgctcacggtgagtgcccgggagcccaacagaggcgggtagtgccatggtctgtgggtgcctcagggaccccgtgaggagtgggtgcctctctcatcactaacctcccggaggtctgtgcccaggacgctgtgcctactgttgtattaaataaggcatcaagacaagcccggagggccctgcccatggtggctgaggaagaagtgcaggtgggcccttctggggtccccaaaatccacagtttctgatttgttgagtgacacaccaagaaaggcatctcactgcccatggtctgtatctactcttgagaaatggaatagattaggttggggaagaggagttgggtaccctaggtgatgaaaaccggcgaaaatgggtccccaagccggcctctttattggctgtgaccttggttaagttatttagctcctctgagcctcagattccctcatcggtaccaatagtgatacaaaatacctatgcctaggatggttcctggactaagtacagcgatccctgtaaagcacttaggccctggcaagtgagctgaaggtttgccatgatcgttttataaagaaggtactggccaggcatggtggctgatgcctgtaatcccagcactttgggaggccgaggtggatggatcacctgaggtcataagttcgagaccagcctggccaacatgctgaaaccctgtctctactaaaaatacaaaaaccagccgagtgtggtggcaggcacctgtaatcccagctactcgggaggctgaggcaggagaatcgcttgaacccgggaggcggaggttgcagtgagctgagatcgtgccactgcactccagcctgggcgagtgcgagactccgtctcaaaaataaataaataagtaaataaataaataaataaataaaataaaaggaaagtacttagatttcaaggcactaatggactttattcatttaattcatatttatttatttattctcttttttttgtttttgaaacagacttggtctatcgtccaggctggagtgcagtggcaccatctcagctcaccgcaacctctgcctcctgggttcaagtgattcttctgcctcagcctctcaagtaggtgggactacaggtatgcaccatcacgtctggctaattgttgtatttttagtagagactggtttttgccatgttagccaggctggtcttaaactcctgacctccagtgatccacccgccttggcctcccaaagtgctgggattataggcgtcagccactgcgcctggccgaattcatatttagcaaccagtaaatgtcgagcacacagggtgaatgagctagtcatggtctctgctctaatgagatttcagtcttgtgggaaagaaaagtgaacaggccattgtatgacagtagctgtatgcccttaggcagagcccttaacctgtttgagcttgagcttctgctcagtaaaacaggaataatgatagtatctacatgggattgtgtaagggatagttgagatagtaaaatttataaagtaaatgatattctcagcaacaattacagtttaaaggagattgtcaatgtcctgtgtggtcttggggaaagggctgagtcctgaggctaagagtcaaaagaagaccagggacattagggttctggccacagaggtgaagaagtcatagctgggccttgaaccatgcgtagga

SEQ ID NO: 1242206 - DNA, 4001 bp, Homo sapiens
gtggaagtcgttctcgtctgtgagctcaatgatgccgccggtacgcagagcaatgtgcgcctcaatctcctctcgagcgcgatccacgttctctggcatgccggtcacctcgaacaccggctccttatcccggctgggcgtcacgatgtacgtgtgcgtctgctgctggatgcgcttgattgtggcgcctttgggccccaccacgagccccaccacgcggtagggtacccgcacttggatggtggtctgcccgggcaggttgggcggcccaggcaccgcgccgttgagtgccgtgttcttattccgggaggcgcggatcatggagaagtgctcggcagcagagatgatctccctccgagccatggccacatcctccttcctgcccgtcacaacaaagacaggctcctccccgcgaactggggtcttgatgtaagtattggtcttcgcccgcagcgctttgattttacaacctacgaaccagggtgcggaggagggagtgggagagagagacagacacgcccattatcctggggtaaccgcggggaccggggacagcccgcgtccaggacagcgagacggcaggacaagagatgggcggaaagggggcgtctccctcactgacctcgggccgcgccacgggctgggcagcggatcccacccgcgaggcgctcgaggaacagcccattggctgcctggccctcccccagtgactgcagtcgtcccgaaccaaacccgagaatcccagaaaagtcatctggggagatgccgctgggatccagctgggcgcgccgtcagctctgaagacacggggaaggggctcggggaaggcagctgaagtcgcgatgcctcagcgctggtcgactgggggtagggggtggggtgtgagtcccgggacccattgttcctcctctgggctccattccgctttgcagaaatccagaatcctcctcccatcctatgctcactcctcctccttcctcctcccaaaggactgatcaaaggccccctcccccaagcatcttacatttaaattgtctttctggaggtgggctggttggggggcgttaggggagaaggcagtgattttagcagaagaaagtgcatcccgccagggcagcggcgcggctccgggagacagcctgcctgcactttctttgtctggggcgccggcccatcgcgcggctcttcctctctccccaaggcaccccacgccgcggatcccgatactgaacacgccttcccctcgaggcagtggcctgagaccctacaccacccccacccacctccccatccctcctcgacctaccttgccgccccacgatctcggcgacatgctcagaactgggtactggcacgcactcggtcatgttcacgctcttcttgcgcggctcgctgtcgtacagagaggcgccctcgtcactgtccagccccagcagggagagctggtcgagcgcgagctgcagggctctttggtcatccagggtctctccccctccgctgctgccgccgccgccgccgccgctgccgttgcgctccaggtctgcgaacagcgagctgggcatcgctcggccgtgcgcgccgcgcccccgccggccctcggctcggcggcgagaagctgcggccacaaaggcagccgggaagcgggtggtcaggggcggggaggccggtcgcctgctgagggctccgttgcttcttcctcggtgctgggaggagtgggtcgctccgtgcggtccgcaccgggcagtggctgcaggagcccccacctgggtccccaccccagacctgctggcgggtggggtgggggcagagctctagcggtggccgcgcgtgccccccgagtgcccggctggctggccgcaatgccgagcgaaaagcgagcaggcgagcgacagaagcgtttctttaaggagcccctccccggctcctccactccctccctcccgcccgcccgcccgccctcactcagcgctttttcctcctctcctccccgcctcttgactgagcctctgcagccagacgactccggagggggacgagggaggcgcaacgtcacaggcgggagctgacaccacaatgctactgacactatcgctgggggaggcgattggcgcgcgccaggccgggggcgggaggaggccgcgggttgagcgagcggagagagagcgccaccccccacccccgcgctcgccgcagcccgccccgtcctcctcccggccgcgcccctcccccgccgccgctaacgcctctctttgttgtctaatgcgggactggcaggctcgggacacttggatgtacctatcagccgaggacaatcattgtccctaagtctcctccctcgcctgactgagaaaagaaaacgcgcccaactctgatgcctggagccgggctctaaaagagcggtcctcaggaagtcccgttagtggctccaaataaaccatccgtggagccaaagcttcctctgtgagaagagtctgtagtccgcccaaaagggcgacccgagccctccgacacggaaaacgggactccaggtcttggggcgcacgggcagagtgactcccggcgcgggttgtccacctgcgcgggagcgcacgagacacaaaagcacacgcccgcccacactggcaaccgcgcgcgcgcgcgcccgcgcctgcatttctgtctccttgggcagcacttcgcccaactggccctgaaactgaggatgggaaagctaaaagctggctgccgcgcgagctcggcccgcccggccgctggcgacctctggaatgcatggcaccagtgtccagcacacgcccggcgcccgggccgagaccctgcgggttctgacacgcgcacgagcgccgcgccgccaccgcggggacgcaggccacagcgccagcgggcggcgcgggcgtgcgcgcccgctgttcccatccctcccctccgtgccccgcggccgagcatgcgcagtgcgcgcgaggagcgggcgggccctttaaggcgggcgctgcggagcgcgcgccggccccgcccgcggccccgccccgacgggaggtgagcgctccctgcccggccgctctttgtgcgcttctcggggtgggggtggcggcagagggaggttgcgacggcacttgccggcgaggacggcgagctgcgccccctcccggatctcccagggaccgtctccgagtgcgagagagaaggaaggaggatttgaggggcgggccggggcggtgcgcgctggtcctctccgcgcgcatccccctccgccgcccactagggcggacgccccttcgggccccgcgcgctctgctgtcctttgttccgggagccgccgggctcgccgcgccctttgcgtcccgctgcggatcgttccgcagagcggctgggcccgcggttcatagagtcgcccaagatcctcacagagggacgtcttcccaaaacaatgaggccatgcggccgcagccgcacacgggctgactggggagatctcgtggtgccgcggggcggtcccggggctcgaaggcagaggctcccctaggtgtgccctgcctgaccccggctacaggaacgagcgctgtgggcctcggtttctcacccgtaaaatgaagaaaataatccccgcctttaccacctcgtgggtcgttcggaagattaaatgcgacagtggatgggcgcgcgcttacaaatcagtagacagttccgcaagcgcctttacttttgagaacgcggtggtgcagctcccttcaccgcttgcttacctggagctgtcttgggaaagaggtgctgattatttccttggggaaatgggtttagaagccacttacagtggttatttcctcaggatgtttacgtcagcttcccggagcctggtgtgtgtttttcttaaaaaggaatgttcgatgggaggaggcaggtgggaggatggtgccgagtcctccgtgaaaaccaccacttagagctccagtaggaaattactgtattcttttgacccggtttatggacttggaatccaactaact

SEQ ID NO: 1242207 - DNA, 4001 bp, Homo sapiens
ctttcgagcataagtgatcctcctgctttggcttcccccaagtagcaggagcacatcactacatcccgctaatttttaattattattattattattatttttgagacgaagtcttgctcttgtcccccaggctggagtgcaatggtgcgatctcggctcactgcaacctctgccccctgagttcaagtgattctcctgcctcagcctaccgagtagctgggattacaggcgcctgccaccacacctggctaatttttgtatttttagtagagacggtttcaccacgttggccaggttggtctcgaactcttgacctcaggtgatccaccagcctcagcctcccaaagtgctgggattacaggcgtgagccaccgcgccgggccctaatttttatttttgcagagattggcgggggtggggggtggtctcgctatgttgcccaagctggtcttgaactcctggcctcaagcgatcctcctgcctcagcctcccgaagtgctgagattacaggtgtaagccactgtgctccacaaattcttatgttcttataacttactttggggagcaattggcaacaggtactaaataaagctagtattggctagagaatgacaattgcagaactttctttttttttttttgagagagtgtctcacactgtggcccaggctggagtgcaatggtgcgatctctgctcactgcgacctccacctcccgggttcaagcaattctcctgcctcagattcccaagtagctgggattacaggtacccaccaccatgcatggctaattttttgtatttttagtagagacggggtttcgccatgatcgccaggctgtcttgaactcctgacctcaggtgttcagcccgcctcagcctcccaaagtgctgggtttatgggcataagacaccgtgcctggccgcagcacttttttgaacaaggggacaaccacctgcctctcagtagggaataaagtgtggattacagtttattttatacaatggaattcataagctgttaagatgaatgaattagatgtatagggatccaaagataattctcaaaagccatgttgagactagatacggcggcatctactcgggaggctgaggcaggaggacagcctgagccccaggaattcgagtccagcctgggcagcataagcagacttctatggacagcaaaagagggactgtatcccgcacaatgccctgccaacaggcattctctatctatctatctagtctgatattatatacatattctgatatatacttaagttcctaattattagattaataatatacttaagttcctaagtaattacactaataatacataaattcttgtaattatatgtaattagtgatattatattctaatcataatatatattagactaatacatatattctagcatatatatattagacatatatattctgatatatacttaagttcctaatgtttttatatgtgtaatatatattatatatatgtaacattagtctaaggaatttgtggaggctaacagaagagaggtgcttgctgaatacgagagcaggccacaggaacaagatcggatgcaagtgggtgggggtggaaagatcgaagaatctggcagccagatctcaagagctggcggggttggagtggtctgtccgggagaggtctggaggttgctggggccggaaggggttaaaattcgactgggaagagggtgttagcaccgtacctttctcattgcgaactgggacggccccagccgtagactgaatgggcggttgcttcatgagagcgcttgggaccgacatgttgatggcagcgacggtgattcccgaaacttgactaattccaaacagtgaacaccagcaacgtcaacgaagagaagaaattccttccacctgagtccgcgaacacagctgcgcgactgatagagaaactacttacggctgagctagataaaccggaaatacgtgacgagaggattgtgggatggtggacgacgtttgggcgcccacagctaggaagtcgagtcggtttctgcgcatgctcattggctgcccgcatgtcctctacgtcgcagaatttggaagcagcttttggcgggaaattttgcttcctttgggctttgctgttaggactctgcggtgaggaaggttcgaatgaaagattttacgtgttagcttggtttgaagccaagaacggtatagtgaataagaaactcaggcgacagtgagttactgtttgaatggcttgttgaaagctcagaagaagtagagtttgatggaataaaaatcttgccagtagtatccgattagcttagttcataaggccagggtgggctgtggtgcggtatttggtttcacagggcaggtggtgctgatttaggccagtgaccgaaaaaaaaaaaaaaaaaactcccgaggtgcctgggacattgcccacctgaaatcccaaaactccacttttttaggctttcaggtttttccagtttctggaaactacctattaaaatacattcctggctagaaaatgtttgtatttaaatatctaagtaattattattcttttgagactgtctttttctgtcacccaggctggagtgcagtggctcgatctcagctcactgcagtctccacctcccgggtttaagcaattctcgtgcctcagccttctgattagctgggattacaggcgcctgccaccactccctgctgatttttgtatttttagtagagacgaggtttcaccatgttggccaggcttaagtgatccgcccactccggcctcccacagtgctgagtgttggcgtgggccaccactcccggctaatttttgtatttttagtagaggcagggtttcgccatgttgcccaggctggtcttgaactcctgacctcagatgatccacctacctcggcctccccaaagtgctgggattacagaggtgagccaccgcacccggcctatttaagaactctttaaggacttacaggataataacagaagcagctccaatttacaagctgagtcgtgttaaaaaatatatataatattggctaattggaaagtcaggacacatttcacagtagaaaggactttataactgcgggggagacaagggacagtaggaacaaagtcttaaagtccagaaacagtatgttttatacaggacaccatgaaaagtttggttttatcagtaatttttgagtcatgaggggccttgaagttgctattaatatgattaacccaaattacttcacctgtgttctacaattgggccttgagtgggagaagaaatgaaactggacaaatctcaggcaaggaacagtgtgggacccaactaagcaaccaaggaaacagttttgggctagaaggaaccttaaagagaatagccagaatcttattttattatttatagaagagggtcttgctctgtcgctcaggctggagttccgcgcaatcacggctcactgtggcctcatccttctaggttcaagccattttcccacccctgccttctgagtagctgggactacagacgtacaacaccacgctgggctaatttttgtattttttatagagatggggtctcactatgttgcccaggctggtttggaactcctgggcccaagtgatccactcctctcggcctctcaaagtgttgggattacaggcgttagccaccgctcccggcctgttagtgtttttcaaagcgacatcccagtaccaccagaatcaaaatcaccagtcaaaggtaaaaatgtcagttcagccccaggacatccctaaagaatttgagtctagggctttaagacagcatttttttttttttgagacggagtctcactcttgttgcccagactggagtgcaatggcgcgatctcagctcactgcaacctctgccccctgggttcaagcaattctgcctcagcctcctgagtaactgggattacaggcacgcgccaccaagcccggctaatttttgtaattttag

SEQ ID NO: 1242208 - DNA, 4001 bp, Homo sapiens
tttgccttggccgggcatggtggctcacacctgtaatcccagcactttgggaggccgaggtgggaggatcatgaggtcaggagatccagatcatcctggctaacacggtgaaaccccgtctctactaaaaatacaaaaaattagccgggccgggcgtggtggcaggtgcctgtagtcccagctacttgggaggctgaggaaagagaatggcatgaacccagcgggcgaagcttgtagtgagccaagaccgcgccactgcactccagcctgggcgacacagcaagattccatctcaaaaagaaaaaagaaaaaaaaaaaaacctttttgcctccccctcagagtcacccatctaaggctggagagtcctcctgaaatctcaaagccccttcatcccactccagggaaggcaacaacaccattaatgagcgatctgccctcagagctccccctccaggggcctcaggagcttaaagtggctcccaaggagctattagtcattggctttaaatagcaggtaatccttcctctgacctggcaggcgggggcgagcattgacacagacagaggcttgggttgggaatggactcttccctcccaactgcaccggccctctccctacactgctccagggcaaaacggtccagtgggaaaaagggaaagggaaaggtgtactctacccagccacgttacctgtgtgtaagataggtatggtgtttcctccttctggaaaaggccacatcaccctgtataaaaacatctttgggacttcagagtcctgctctttcggggactttccagtaacatttggccagagttcaggttggggggtacagggaagagtagaaaggggctaagaagatccagctgtctttcatggtggccggggagggccaggagctcccaagttcctgggagcttggagcactctggaagctctagccccgagggtcaggcagatcacaggacatagggctggggctcagctgttacctaccttgcttcagtcaatcccatttctatgagaaaatgatggaggggccacctaaagagtcctggccctgactccctcccagcgctccacggtgaatggcacggggcatccgcaagtccagcctgcaaggggcccagctggcctccggaggcctcctgggaggcggaggaggaccggggaagatacagcagccggccaaggccgcgggagggagggagtcaggagactcccatcagcaggcagccctcttccaagctcctcgaagcctctgggtcccctcccgggccccacttacggcctgcgtccattgcaccgactccccggcccttcccttatgtgaccaggcacggacaattgggagcgcaaaaatccaatgaactgtccagccaactggagttggcagggagatggccaggacaaagttatccagacaagacttatccatactagagtcctagaatctcccaggtggaaggggttcgaaagtcaaacgcagttccctggcctcatttttcaccagggaaaagagaggcccgacacagcggattcctttgtcattatctgtaagccgcatccctgggggcggcagggctgtcacccgatgtcccgagtcccagcccaaaagccccagcgcagagacagcagggccgcatccccctgtcccgccagggcgcagcggaagaagccgcccctctgcccagcccggtccccggggctttgtctaagtttgtcaacagtggaggtggagggcgggcgccgggcaaacttccgagcggcgcggggaggaggggcgaggggcagagggcggcgcgatccactcacccagggcgacgaggaggctgggggcgcagagcagcgcgccgcacagcgcggccagcaggcgggggcgcggcatgctgcggggacgcgggcgctggaatgggcacgctgggctgctcagaccccgcggggttctggcgccttctcctctgggaccggaataaatcaggcggctcagcacctcccactggccgtgcgctccgcccaagctggccagaggcggactgggggcggggctccgcggctgggagggaattggttgaaaggaattggggggcgcgggggtggtccgcgatatctgcctcttccgccactgccacaccggcgtcccgcgtcgtgccaacggccgggtcacgagtcttgagtctgttgggcgggaaaagttcaggagttttgtttttaagatttttagacttgaaaagatgctaactctttattcataatcagatagatgcaaattaaaactacaatgagcatcgtgtttcccttctcggatcggcaagtatcaagatgttaacaaggttagtggaggctgtggggaacaggtccaagcatgcttcgctgaagacagtataaattagttcaacttccctagagggctatttggtaacacctatcaaaacgacaaatgctgacaccttaagacctagcatttccacatagagagattcattctacagaaactcccatgtgcaaaatgacagatatacaaagatagcatagcaacattgtctgaaatggtaaaatactaaaaaaaaaaaatcagcgaaggtttctgtaaagggcctaatagaaaatgttctctgatatgtaggccctgagtctctgtagcagctattcatctctgcctttgttgcaagaaaggcaccatagacaaaatgcgaggaaatgggcacctgtttgccgaaagggaataaaacaaagcaagcctgtcaccgttgactttttactaaatgatttgtacttatcatgtgcaaatattacctgtttacaaataagtgattttaataatagtgttttggctgggtgcggtggctcacacctgtaatcccagcactttgggaggccgaggcacgtggaacacctgaggtcggagttcaagaccagcctggccaagatggtgaaaccccgtctctactaaaaatacaaaaattagccgggcgcagtggcaggtgcctgtaatcccagctactcgggaggctgaggcaggagaatcgcttgaacccaggcggcagaggtcccagtgagccgagatcatgccactgcactccagcctgggtgacacagtgagactctgtctctaataataataataataataataataataataataataataatgcttcaggctgggagtggtgactcaagcctgtaatgccagctcttggggaggccgaggtaggcatatcacttaagctcaagagttcgagaccttcctgggcaacatggcaaaaccctgtttctacaaaaaaagaaatacaaaaatattccaggcgcatgcctgtagtcccagctactcaggaggctgaggtgggaagatcgcttgatcccaagaggtcgaggctgcagtgagccacgattgcaccactgcactccagcctgggcaacagagcgagactgtctcaaaaaataataacaatactaatactaataagtatttaagtcagactagccaacaaacaaaatagaacagtcacacatctcccctcctagctgtgttgagacctaagttgggactagagtccactggcaagatgcccttcttaaaatattcagaagcgggtactgggcgtggtggctcatgcctgtaatcccaacattttaggaggccgaggcaggcggatcacgaggtcaggagatcgagaccatcctggctaacacagtgaaacctcgtctctactaaaaatacaaaaaaaaaattagccgagcgtgatggtgggtgcctgtagtcccagctgctcaggaggctgaggcaggagaatggcgtgagcccgggaggcggagctcgcagtgagccgagatcgcgctactgcactccagcctggacaacagagcaagactccgtcttaaaaaaaaaaaaaacatatatatatatatggggaaaagacatataggatcaactcaataatcacagaaaaagcatttgataatatccaacacgtcttcgtgataaaacactcaacaaac

SEQ ID NO: 1242209 - DNA, 4001 bp, Homo sapiens
tactgcctccttctcttcccagatatcatttgttactgctagccgcaggagtattttttattcctaagaatggaccctaactacaactcagggccagaaagctgacaggtctctagcagttgggtaagcagaatttgaagaacttttaaggcagaaactggcagtagtcaaacttgaagtaagtatgccaaggtacccagggcactgaatttcctcaagtctttagcctgtgttttctgtaaagtggacccaacccacttaacccacacaaacgctagaaacaaccgttggcggcaagaaacactagcgctgttccgatacgcaggaaagtaaaaggctcggtctcactgccttccccgagaggagcagacgccgtcgactattaatgacccacaaaccgccgcttttcaactgcaaaggacagctggccaagaaccacgtgaaaaaatgccgcaaggaaagctcttccggggaagagtcccgacagatcacgtgccgccggccggaacccgatgatcgctctgcgggacccagccgcgttctgttaccttggagactacagaaccagccaccagaccctcccctgccaacccccttcccagcagccgtcacgccgcccccaggcactttccctgcagcctagccgcggcatcgtgcccaaaaagaacgaacagagcaagcagttgttaaccagggactcagccgcataagcctggcaagctctacaacaacacgcgcgggtgggctcgagacttctcatgatccacgtgtttgctccggcgaggcgaaccttgggaaagttatcttcccaataaaagagtgcactttggtttctcgtgttggtctgccatcagtaacccctcctttcagacctcatttacccgttcctgcttccaccccggccagagaaagaaggcattcccagggttcgaaaggcaaggcaaaaatctgtacagcaagacactaccacttttgcactcccgacccagtctgaaacgatccctagtttccccatattcttctgacacatagatccctcaactttggctactggagctttgggggggcggtgggggggtgatgttaatgtcccagataccttgcactgagggcagagacctacttgaccatttaacagaaacgggaaaccccataaacagaactaggtaaaaggctgccccacagaggaataaagaaaataacacctgctcttcccacctgttttcccctccctcatttctgcacttacacaccaccggtcctttgtttaccaagtccccactcctacagctcacttcctcgccctcctttattaaacttgacgtcctgcctcaaacaatttggccggaaattacttgttagaaaagacgtttgcacaggtgtcaaaacgctgcgccaagttctcagaaaagcgacgccgacaccgtttcccttggagttctagaaccacgagacctaggctctaaactgaaaagcgcgtaagcgtggctctcgacctagagcccggcgccgggcgagaagtcgtcacgcggaccgtaccacgcggagcggcaccccacacacgcgagggcagggccgagccatgggcgcttctcacccctcccgcctcgtggccgctctctctggcgtcgatgttcccagttaggtagctgagcgacgcggaagtgaggccggggacgcgcgcgaggtgacatgcgcagcctcgctcagggaccacaggggcgcgccaaaggcggccctgcgcaaggcccggcctggcgagggcgtgcgaagctctctcagcggaacgtttctcacgccgttcaaatacacaagagcttcaaactctcgaaaaactccaatcgggccagtactaagcgatgccctccacccaggcccgagagttaccgtgcggggcgtggccggcctcacccggagtccttcacatcccgctgggggcgggttattctgttcggttcgcacaccgtgtgtccgctccagctgaagagcctgcgcgcgcgcaccggacgtccacgtcaccgcgcacgcgctcctacccgctcggagcccgccgcgcaggcgcaaaaggagacgcgagcagcacctccctgacccctcccccaacaccaggagtccaaacggccccagagcagcagcaagacccttgggacccgccccccgagtggaagccgctgcttttccgggtccctgcaacccagaaaagcctactgaaggttctagaaccaagaaaggcgaggcaggagggaggcacctaaactcctcaggcttgcacacgaagccttcgtggaaactgtgaaaccaatgcccggcgggcctttctcaactgtgcctttcaccctttccctagggctcctcgccggctccgccccggccgcgcccagccccacccacacggggctccgcagacccccaacctccacaagcccgtcaaatgaatctgaggtcttccaccccggagtaccggggcttggacagctccagagcattgggaaaccttgaagccaaagaccttgagagacggatggtcgagtttacaacatccacaaccgaagacgactaggaaaatggggaggagaccgaaagactcagtgcgcagttggaaagcgaagagttgccactaaattgccggatataaagatgaaagatatcttgataaaacagggaaacgatgcaggagtgtgttatctaagctttagtgccttgatcctgtgcattcaatttttgtttcttcaagacatttaagctatgaggtgcaaagaaagtattagtgaatatctattatgtgtcaggcagttgctgaagtaaatcaatggacagtatttctcctaaccttcaaaaagtagttttctttctccttctctactccttaccagctgttctttcttctgtgctcctgacaccagtaaaaaggaagcgtagtttcttaaaaggcaaaaaagaagtagggagtaggagagcagattttgtggtcaatgatccaaaactgccttctttgataagaattagcaagcactgagaacctactacgtgacatgctatgtgacaatacaaaacactatgaaggagaatgagaagactaaggaaggagtcaacagaaggaggcttatccaacactactgatctgacctactttttacttaggaaggtcatatttctctacactttgctcttcctgaggagatatacaacaacattgacagaaactgctggaatagtctgaactagaaaacgtgtaggctactttagagacttctgaaggcattctgaaaccccaagtcaggcacggtcagcaagagcattcaagatcctaggcaaaattgaaaagtaacagtttaacaccttcctcctcttccctgaacccaagaacttctttcctacaagctgccctgtcagaatctcccaccttaccaagaatgccttcctctcaaggatctgaggtttcctcataaaaattttccattttctggggaagaagtaaatttatgttgatttagcattaaaatatatgatcataaggtgtgaatgactggttaacaaccatgcatccccaaagagacaagttaacccaaatgatctctctaactgggggatctgtgaggacaacttgggaagaaggggaatggagattctcttttggtactccttccctacaccaggcaaacatataactaaatactagatactttaaaaaaacaaaacaaaaaaaaaacgctgaactttgaagattcagtactacagatctcggtgggagaggaaaactatccatagtttttcaaagtggagtccgcctaacctagagaggtcgggagatgtcaagaatctgagggtcctatgagaacttttaagtgtttttagatgatattctaaaaataatcataccaccacacacatttcagggatccagtttggatttaccatcatgcaggtaccaagtaaccgcttgtttttcttttttattttttgtttgctttgagtaaccacttaaatggttacattcaact

SEQ ID NO: 1242210 - DNA, 4001 bp, Homo sapiens
gctacagaatcaaattgaaatattcttccagctcataatgaagcaagtcccactggtcctcagagaagggtaactcatctctcagtgaaagaaaccgcttaaacaacagactggccagccgaagcacgacaagctccttcttaatgcttttatagagcatgttgccctctcccattcgcacaggctccacaagttgatgccagtatgcgctgaatgacccaccacctggcccaggaggctcatctccccagccctcagggtattcatgcttgtaaaagcatgtgtctccaaatgggcagttacccctgccttccgcaaaatacctgcaggccttgttgctcattgcctccttgtattgctgaataagtttctgcttctcttcctcctcctccacccagaactcactgggaatgaccaattcagaggtgaccctgcactgtgggcaagacttgacgatcctgttctcaaactgtctggcacttctccacctgcggatacacctaatacagaaggaatggttgcaattggaaagaatgccaaagcggcggtcattggggttggccttctcatagacaacctccatgcagatgccacacaccttgtccataccacgctgcacagcaaacgagagttccatatctttctcgtgtgcttcaatgcaggccctcatatgttcttccctctgggcagcatccatggggtgcaaggtctgcagcccacacatgtcgcatatgtctccatggaggtacatacagctctccccacgaaagcaaactcccctggaagcataatagcaaaaccgcaacccactgcccacagccatctgcttcctctcagtctctgagctctgtagaggagcctcgggggcagatgcaacccagcggccccggtagggctgccctggaacaaactcaatggcatccgcccagctttctacacctgctcctccagcagctccacggtctgcattgtctctctcggcttcaaagaaacccctttcagcagccgagccaatcacaggcaaggaaagggaggatgcagccgggggggcttccgccacttcctgagtcgggggctcgatgtgcgcagccgtgctagggcctccacctgcagaggccccaggcggcgaaacgccaccctcagtggccatcttccgaccagaaaggtcgtgcgaatagcgacagttctccccctccttgcactgcccatgtatataatacctgcagatgatctgctttgtccaaatgccgctgcttcggcttggcaacggactgggccaggctcctcctcctgaggctggggcaggcctcaggcctcctctgcggaggtgggcagggactggagctacagggaagggggcccagccccttgccgcatgtggcagggctgaatctggagcagcagattccccggagggctcacagacgggaaggtccggcccagacacaccctcccttgctgcctcagcacctgcctgggccccggctgcctcgtgggcttctgagggagctgcaggctcttccatggctgctttggcaccccgaaatggtgccagaacctctccggtattttttctttatgggcttgaggcccggaatggcggccgcgctcggaggcttctctgggggaagtgtgcatctctttttccttcccccctgcttttgggtccctctgactgtgtgttcctacctacttccgggcacaggcagcatggcggacacttcctgtgggggcaacgtacgtgctctgcctggtttttaccgcaattttccaatctgacatattttttcgttcacacaggcggggaccaacccagccccttttgtctgccttctgcctctgcttcgctgtgttccggcagtccctaagtcccttctcacacgatttcctcaggagaatgaggttttactttaatctcttctggtttcggtcatgcacgcttcgttgtattttcgtatctgtctgccttaaaaaaaatataatcctatagattctgaaacatttcatccatgaattatataaattctttttttattcactccatcttatgtctgtggtttttttcttttaatgcccgatcgcggcaggaagcttttttcaattcgttcggttgacaaggcgccgtttcttttggtctttgttttctgggatttctgagggcttacactggatacgcttttcaccagcaaggcattagcagagagcacttctgatccgaggctaagttagcacctttcagatgtctttctttattgtgattactatgctcattttcccactgtgttagaagcgccagacttcaaccagtcctgatgctggcctaataagacactgtcccctgcatgacccaggcttttattttctctactggtttaattcatggcagccctttgtttcccttcctttctttcaaccccatctgtgctgtgttgtggcaggacagcctttcataacatatcctgtgccatattatccacaaaggaatggtctttaatttccatgtatgagcgttttgtcatttttgcagataaatgtagtagattaatcatttttttgtattcctactttgctgagagtacgtatcatgactgcatactgaattctgttatgtagttttatacattttttgagacaattttgtttttccctttattctcttaatgtgattatttgcagctatgagtttcaaatatttaactaaccaatttgtttctaataagaagcccttctgtcatgatatatcattttatatattattggattttttttctataagtttctttgaggaaattttgttgcctaaatctgtaaagtggaaacatatctgaatatttataatcacccaagtcaacaaattaaattataattaagtaggtaaaagcaatgaaagcagaatgaagcaaataataagggcaagaaaagcaatgaagaaaaacaaatattaaataagggaaataaattaagtaaaatcccttaaactgcttattgaagccagataatttctggtgaaatttatcaaggaaaaatgaagaaggctctaatacccaagatcagtaatttcaaatatgttatcactacattaataacagacattaaaaatcattagagaatatcaggaacaaagttaggagataaaacttgaaaagttacatgaaatagtcatattggtggaaacatctattagtaaaaatgacaggagcagaaatacatgtgaatatggatctgttaaattacatctgtaatttagataattatctaaataaaggtctctaaaactttctctctgaaataaatctaaaggcaaaaaaaatctgtatttattattgcaagtcctagctagtgtaatagcaaagaaataaaagatgttataactggaaagaaattattgatggaatgcaacagaaaattgagaataatttacagataagctattagatttaataggtacatttagcaaggacactggacaggagtccaatatatgaaaatcatttttatttctctatcatcaataacatttgaagtaaacatttaaaattaataacattcataacaacattaaaagttagctaacctaggaattaaactaattaaggttatacaataaaattaaaaacattttagcttcagaagacctaaataaattgtgggatactttatatatagtctttatagtcggtcagtagaaggctcaatgtttttaaaaggtagtcttttcctaatttgataattatttgaaaatggtgctgattattcatcgtgaatgtaggaaatgttggatttatctttctccttttcatagttaccaagttttatattttgcatgcaagctgtcccaaagtctgcctcacttgaactttctgaaacaaactttctctttatcaggatttgtttgtcagccccagtgatttttacaagaaaaagacttgcagcacagctctcaggcttctacgccaagctctctacaaattcacaaacataagaatcctgaatataaaatt

SEQ ID NO: 1242211 - DNA, 4001 bp, Homo sapiens
atgtctcaattcttattagtttcccttttctaccaccttaatcccttaaaatgttgagatatacctaagggttcattttctaccacttaataatgtatacattaatttcagtaaattttttaaaggcacccctaaatttttgtttttagaaatttatgaaaggcaacacaattgtacttacatgaacaaaactggtagtaattacagagttcatatttatgttaaaaaaaaatctgagtgcttattctgtaccaggcactattccaagagtcttgcatgtattaactcattattaaaacaatcctaagtaggaggtactattcttattccccattttatagaaaaagcataaaaaataaaagcaggctgggcgcggtggctcacccctataatcccagcactttgggaggccgaggcgggcggatcacgaggttaggagttcgagatcagcctggtcaatatggtgaaaccccgtctctactaaaaattaaaaaattagccaggcgtggtgttgcgcgcctatagtcccagctattcaggaggctgaggcagaagaatcgcttgaaccccggaggcagaggttgcagtgagccaagatcgtgccactgcactgcaacctgggcgacagagcaagactccatccaaaaaaaaaaaaaagtaaaagcaacttactcaagggtccgtagctaaggtatagcagtagtaggattcaaagacaggccggctccagaaacccaggtctttacgattacaccgagctgaggcacaatcaggcatcacttacctgctgctgttgtttatctactcatttccagcattaacagctgactttcatcgtttccaaggtgcaaaatgaaaaaaaaagtaacaatgaatagtaaaacttaccttttgaatggcctcttccatatccaactcaaattgttcattttgtaataatctgagaaattgcttgcgctgaacacggttatcattttcattctgcaccatttgattcctgatttgactgttgacgttttttagagcttggacatgtaattttttgcagtagttttcatctactaatttctgatgcctttcactacagctcaaatttctccttttggaaccctacgatggaagaaaaaaaaagatgcatattttgatattccaaaatctaattttaaaaaatgtattgatataaaccttagtaagaaaggatacgaagagcctggcttccttcctaaattcaaaggagtataccgaataaaaagtaaacgtggtaaatatgttcacatatcgattaaataggtactgttattattacctattttatagatgaaacatgaaaagtaactttacccaaggttctgcagctaataaatagctgtgctaggattaatcgcaccctacagacccagatctttactaccaccagggaatttctcctcccctcattccacccaccaccaccaccaccacgactaccaccacagggccataaagtgctgttcagaagctggtcagattttcctaacataaatgtaataggtcaattcgccgctatttatcaattcgctttctcctacacttttatatctacttatttcttcagaggttctattgggcagatttaaagatgtatttaatacactatgcgaaaagtgccaaaaaagctggaaaccaccgcgagcgtcccttctaatagcacctgaagcctccgaaagcaaatacaagttccccaattaatgaccagattaagcacttaaaatccttttttagaagcagatgagcgccaaactagaattaaatcaacaataaacaagtagtttcaagtcccccaactggctcaccatcttggctgacgaaaaataccccctctcgtgggaccgcggccaccacctcccgccgcaaacgcagcagccagcagccccaaggagcgcacctggctgcgcgcgctcgggtgtttacgcggcgtcttggcaacggtggagctgcgcgccctccgctcgaccaaaagtgacccacgcagaacgtggcctcccattggacgcgataagatacaatcggcattgagcttcttaggaccagggcaggagggctacttctataggtctaaactagaaaagcgggaagttcagactgtggcctgacccaagcactttgcagtgggctagggaagctcgatttccctccagcggccgaactgtggtttcagtgggtttgggagccaagttcgggactgtggagactgcgcacagagaaatacgcaaactactgcctaatgcatggagccgaaggaaatttccacgcatggagcatcccgcacactaagtgcctagtcagccaggtctctgctagggacgatgactggtttaatcctcagcaatgggagtccaggtcgctgtcccctttgctgggttgtgaggcactgagggtagcacgagcttccagcagccttcacttcacccccccgccccccccccccccccgcagaagctgctggtaaattttgggactaaaatctatgagccacatgaatcttactctgctatgtggtccaggtaccaagagagagcacgttacatgatggcaggatgttgatctggttcattccataggcaggttagacactaaagtccattttaaatgggaagtttaagaatgataatggatcagagaaattagatatactgattttagaaatgatacattcagagaaatcttgtcaacactaaaatatttgtataaggtgattagtggtataactttgtgttattctaatttggagtccgtcttctgtagcaatatgtctgcttaaagattaataacaaatgggacttgcagtttcagtgctgacgtgtaaaagcttggaagttgtcaccccatccttacaaccagatcaaaacaactaaaaatcagcgacttctcttggttccatcatacaactgaggtcgctcgtctctctgtcctttggtcatttatcccgtggttgcatatctatgttgtctctagtactccactcattgccatcactgtttgagagaaatggagagaaggcgtaaacctgccctctgggtgttctgtgtaaattgatctggaatggagcaaagcaggcagcctgctataaatttctcttcttggcatatccatctccgcaaagggttgggcactgtatagaagagacaggagacaggcatgggttcagggttgaacagggtataacacattcaatagagtgtggggtttaatttgttaattcctaatagtgaaatagtgacattgcaaagtatttcagcaaacatgtatgttttttactgtttacttctcgaaatgaagactttcgtctctaaagggaacttcagttataattcctcatttccagtatacccttggatatggtagaaggattcatataatttcataggtaatctgagaaaaagatttttggccagaatattgacctaaatccaagacaaatttaatcaattgtaacaattagctgattttaacctttaaaaaattatcctaacaattactacatttttaatagactttgctcctttttcgaagcagttttaggtttacagaaaaattgacagaatacagagaattccccgtctcacctctcctccccaccgcacccatacaatttcccctatttttagcattacatattagtgtagtacatttgttacacttgacgaaccaatattaatatgattaagttcgtaattgacattagggttcactctttgttttgtacaggtctatgaggatttgttttgttttttttctgagatgaagtctggctatgttgcccagtctgtagtgcagtgacatgatctcggctcactgcaacctctacctcccaggttcaagcgattctcctgcctcagcctcccaagtagctgagactacaagcaaatttttgtatttttagtggagacggagtttcaccagtttggccaggctggtcttgaactcctgacctcaagtcatacacccaccttggcctccca

SEQ ID NO: 1242212 - DNA, 4001 bp, Homo sapiens
aggtagagtcaacagcttctcaaggtgagagaggggtattaaaagtcacacggccgagagcgatgcctcacgcccgttaaccccccacaactttgggaggccgaggcgggtggatcgctcaagcccaggagttcgagaccagcctgggcaacatgaaaccccgtctctaccaaaaatacaaaaaaaaaaaaaaaaaaagaaagaaaaagaaaagaaaaaacaaaaaccctaaaaaacaaaacagaacaaaacaaaacttagccggacgtgatggcgcgcgtctgtgatcccagctacttgggaggctcgctttagcccgggtggggggcagaggtgagccgagatagcgtcactgcactacagcctgggtgacaaacatcgtctcaaaaatacaaacaaaaaaagtcactcattaacaaaatacccctaaaacctccttaaatattccataaacttaaaatacgcagtactacggtttgaggtttacggctctaaaaggaattctaatgcaagtctaaaaacccctagaacaaaaatcgtacgcatgtagacatcgtatttacggtaactagcataaatttccatagcaatgaaaaggaatgttaaagtgttcctcctttctcaacaggactttacttcctttttagctattagacctccaccttattatacgttaactgaagcgttgtgaaaatttaaagagctgccttccactgggagtcagtctaaccttacccaaaactcatgtcaatcgaaaaccaattaataaaaagaaattcaactttcaagtcattgttaaacactgcaactaatcaaacaattactgcatttaaaaaatgacgtcgaggcaatgggacttacaaatgcaaacggcgtcaacactgcattcagatcatttttatttactttttacgagcaactgcaaagcgagagctcactcacattaccataggatctcggcactgcgcccaagaatagcagagtgatgcctccaggcaacacaaagcggaggaaaacgctcatctcacttttttttttctgtccccacccaccactctgtggtatgcggagggccccggcaaccttctggtcgtcgtggaagggggcgctgcatctgcccgtaagctgtgcctccatacgggaccgagacgccggcggccatgatggcgccgccatcttgcaacggccattttacaacgcacttctcccgccccgtggcgccaaacccacccccatccgcagctgagttgccaccgaacgcaaccaccccggggctccaggaagcaccgaaaaacccgtcgtagctgcccaagcggccgggcgcgccgcaggaccgcccgaaacagccaccgcccctccccccccgccgccacatcacttcccctaaccgccgccatggcgctcccgtcgcctccctacaataggctgctctctccgcgccctcttcctcagaacaataacaaacacttgacgagggtgtgccacgcgccaaacgctctctctcccactctaacgcctgcgcagcactctcgcttcacaaagcgctttctcacaatgacgcaccggaattgccatccgcaatgcgctttccccgcacaaagcactgaccgccgccttctcagggcgcagcccgcgccgcccccggccctcaagcctcaatcacctcgagcccgcctctatctcctgcgccgttaggtgcctttttcccaaaggcgcacactcaccctcctggaatttaggcttcgggtcctgcttcggcgccatttataagtgattcgccgcctcctccttctcccaccacccccgactaccgccccctactctctaccccacccaactccgcgtcagacgcgccgtcaggcactgccagctctacatcctgggccggatttgccagcgcccgcagacctcacagcaccgcgacccgcgcagccgctgctccagccaacgacagcccgccgcgcacgcgcccctgcgcccgcgccgccccagggcacgccgggactggtagttcggagtcggtggaggcgccccccccccccccccgggtgggggaggggccggctaccctaccccaccccacccccgcttctctctccatgcccccggctgctgcgggttggtaaagcggggatttgatttcgtgggaggttaaggcggagctggcgatgggggagagtgggggtggtgagccaccagtgataatagaatgggaaaggcccagttgcgacgtcccttgggcaaataagcccccgttgatgttgaagtagtcggagagaatagggctggctcggaaacctacattcaatagcattccgctagtttttgcatagaaaggctttaggatcagcaagagggtgggaactggggtccgcttctggaagcttcgttgtttagcaaccccactgcggagcctatttggtgggattgatagccatttgttggctcctaggtctacctcctcttctccagcccagccttgcggaaatgaggatgatgacgtgggaaacactagtcacgctttagctttttgagataatggagctctgctttctgaaaaaggctagtgtgaatatgtcaacgtctgtattccgtacctgccctgtttgtgcttcttgtcactctaaacaaacggatttcttcaatattatacctttttttttttttctgagatggagtgtcgctccgttgcccagactggagtgcagtggcgcgatctctgcttactgcagccttcgcctcccaggttcaatcgattctcctgcctcagcctccggagtagctgggattacaggcatgtgccaccacgcccagctaatttttgtatttttagtagatactgggtttcaccatgttggccaggctggtctggaactcctgacctcgtgatccgcccggtttggccttccaaagttctgggattacaggcgtgagccaccgtgcctggcctaaacaaacggatttatgtcgttccctgttcaaaaacaactttgttggctaagctgcaaaatagcaccatttccgtcagtttattgtgagaattacatatacgggcttagcgcggtacccaacaatgaataagtgctcaatgaactttagacgataaatctcaaagtccttagcctggtatttaaatccttccacaaacagcccttagcctacctgcatcccctatgtaaacctttatcctcctacgcaaacctttgtctccatgacttttcttttttttttttttctttctgagacggagtttccctcttattaaccaggctgtagtgcaaaggcgcgatctcagctcactgcaacctctgcctcccaggttcaagcgattctcctgcctcagcctcccgagtagctgggattacaggcatgtgacaccacaccgggctaatttttgtgtttttgtagagatggggtttcttcatgttagtcaggctggtcttgaactcccgaccttaggtgacccgctggcctcggcctcccagagtgctgggattacaggcgtgagccactgcgcccagcctgtctccatggcttttctaagccctcccctgcccgggttccacaccccaccaattccgggcccctctccatttatctgacttccatttctccttcagtctttttaacacaaccccttctctgacaacagaaacccacaaaaaccttccttattccagttgaatatacaccatcttgtcacgactacttctcgcaagcttgtccaacctgtcttattttgttgttgttttgttttgttttgtttaggcttttagcaccctgaagccatggtttttagtttcagtctctagtgataagtggaaaagggggatgaggaaggggctttactggcccaaccagaaacagaaactaagaacccatgactgtattcactcccttggacaccattgctaaattgtaaaaagggacaagggcttctttggaccccaccccaccaaaactgtcctgtacacttttaaattttttattgaatataaaat

SEQ ID NO: 1242213 - DNA, 4001 bp, Homo sapiens
tgttgagatatgaaaatatactgaaaatgctaatgtggtggtttttttcggggtttagggggagcaattacactgttaattgaaatactaaacttgggagatagaaaaaaaaatcttcctcaatttcacgcaccgtctcaattaatgcactgactctagattaagaatatctgctctaaaatgtctagtaaaataatgaacccataggaggtagagtcaacagcttctcaaggtgagagaggggtattaaaagtcacacggccgagagcgatgcctcacgcccgttaaccccccacaactttgggaggccgaggcgggtggatcgctcaagcccaggagttcgagaccagcctgggcaacatgaaaccccgtctctaccaaaaatacaaaaaaaaaaaaaaaaaaagaaagaaaaagaaaagaaaaaacaaaaaccctaaaaaacaaaacagaacaaaacaaaacttagccggacgtgatggcgcgcgtctgtgatcccagctacttgggaggctcgctttagcccgggtggggggcagaggtgagccgagatagcgtcactgcactacagcctgggtgacaaacatcgtctcaaaaatacaaacaaaaaaagtcactcattaacaaaatacccctaaaacctccttaaatattccataaacttaaaatacgcagtactacggtttgaggtttacggctctaaaaggaattctaatgcaagtctaaaaacccctagaacaaaaatcgtacgcatgtagacatcgtatttacggtaactagcataaatttccatagcaatgaaaaggaatgttaaagtgttcctcctttctcaacaggactttacttcctttttagctattagacctccaccttattatacgttaactgaagcgttgtgaaaatttaaagagctgccttccactgggagtcagtctaaccttacccaaaactcatgtcaatcgaaaaccaattaataaaaagaaattcaactttcaagtcattgttaaacactgcaactaatcaaacaattactgcatttaaaaaatgacgtcgaggcaatgggacttacaaatgcaaacggcgtcaacactgcattcagatcatttttatttactttttacgagcaactgcaaagcgagagctcactcacattaccataggatctcggcactgcgcccaagaatagcagagtgatgcctccaggcaacacaaagcggaggaaaacgctcatctcacttttttttttctgtccccacccaccactctgtggtatgcggagggccccggcaaccttctggtcgtcgtggaagggggcgctgcatctgcccgtaagctgtgcctccatacgggaccgagacgccggcggccatgatggcgccgccatcttgcaacggccattttacaacgcacttctcccgccccgtggcgccaaacccacccccatccgcagctgagttgccaccgaacgcaaccaccccggggctccaggaagcaccgaaaaacccgtcgtagctgcccaagcggccgggcgcgccgcaggaccgcccgaaacagccaccgcccctccccccccgccgccacatcacttcccctaaccgccgccatggcgctcccgtcgcctccctacaataggctgctctctccgcgccctcttcctcagaacaataacaaacacttgacgagggtgtgccacgcgccaaacgctctctctcccactctaacgcctgcgcagcactctcgcttcacaaagcgctttctcacaatgacgcaccggaattgccatccgcaatgcgctttccccgcacaaagcactgaccgccgccttctcagggcgcagcccgcgccgcccccggccctcaagcctcaatcacctcgagcccgcctctatctcctgcgccgttaggtgcctttttcccaaaggcgcacactcaccctcctggaatttaggcttcgggtcctgcttcggcgccatttataagtgattcgccgcctcctccttctcccaccacccccgactaccgccccctactctctaccccacccaactccgcgtcagacgcgccgtcaggcactgccagctctacatcctgggccggatttgccagcgcccgcagacctcacagcaccgcgacccgcgcagccgctgctccagccaacgacagcccgccgcgcacgcgcccctgcgcccgcgccgccccagggcacgccgggactggtagttcggagtcggtggaggcgccccccccccccccccgggtgggggaggggccggctaccctaccccaccccacccccgcttctctctccatgcccccggctgctgcgggttggtaaagcggggatttgatttcgtgggaggttaaggcggagctggcgatgggggagagtgggggtggtgagccaccagtgataatagaatgggaaaggcccagttgcgacgtcccttgggcaaataagcccccgttgatgttgaagtagtcggagagaatagggctggctcggaaacctacattcaatagcattccgctagtttttgcatagaaaggctttaggatcagcaagagggtgggaactggggtccgcttctggaagcttcgttgtttagcaaccccactgcggagcctatttggtgggattgatagccatttgttggctcctaggtctacctcctcttctccagcccagccttgcggaaatgaggatgatgacgtgggaaacactagtcacgctttagctttttgagataatggagctctgctttctgaaaaaggctagtgtgaatatgtcaacgtctgtattccgtacctgccctgtttgtgcttcttgtcactctaaacaaacggatttcttcaatattatacctttttttttttttctgagatggagtgtcgctccgttgcccagactggagtgcagtggcgcgatctctgcttactgcagccttcgcctcccaggttcaatcgattctcctgcctcagcctccggagtagctgggattacaggcatgtgccaccacgcccagctaatttttgtatttttagtagatactgggtttcaccatgttggccaggctggtctggaactcctgacctcgtgatccgcccggtttggccttccaaagttctgggattacaggcgtgagccaccgtgcctggcctaaacaaacggatttatgtcgttccctgttcaaaaacaactttgttggctaagctgcaaaatagcaccatttccgtcagtttattgtgagaattacatatacgggcttagcgcggtacccaacaatgaataagtgctcaatgaactttagacgataaatctcaaagtccttagcctggtatttaaatccttccacaaacagcccttagcctacctgcatcccctatgtaaacctttatcctcctacgcaaacctttgtctccatgacttttcttttttttttttttctttctgagacggagtttccctcttattaaccaggctgtagtgcaaaggcgcgatctcagctcactgcaacctctgcctcccaggttcaagcgattctcctgcctcagcctcccgagtagctgggattacaggcatgtgacaccacaccgggctaatttttgtgtttttgtagagatggggtttcttcatgttagtcaggctggtcttgaactcccgaccttaggtgacccgctggcctcggcctcccagagtgctgggattacaggcgtgagccactgcgcccagcctgtctccatggcttttctaagccctcccctgcccgggttccacaccccaccaattccgggcccctctccatttatctgacttccatttctccttcagtctttttaacacaaccccttctctgacaacagaaacccacaaaaaccttccttattccagttgaatatacaccatcttgtcacgactacttctcgcaagcttgtccaacctgtcttattttgttgttgttttgttttgttttgtttaggcttttagcaccctgaagccatggt

SEQ ID NO: 1242214 - DNA, 4001 bp, Homo sapiens
agaaaaaaaaaaaaaggagttttgatccacagttgcttaggatgggactccggcttgtgtagggagactccatgggggtggggctgagggtacctgccctgccttgcaagttgaactcttcctgaaagcagatgagtaaatggcagatatgaatagacatgggttggatgagggaagaccaggaacaagccccttggaatgagcttagagaaactcccctggcacaggccggtgagctgtttgcttagacttagttgctgcatgtgtcactaccatctggctttgcagagctaaattgggagttgtcagcctggatttggccttgggcaggagcctggcatgggtggggtaaaagtggcagtaaaagtcacgggagggccttagcataagcccttctgtaccctgacctctgcaccgcactctgtcctttaccttgttagggtgtgcctggatggacaggggtgtttcaactgagagcactttgaagaggaagggcaggttgccattaaaggtgtccttgacctttgagcccaagctgtcctggttctcagcaatccactggcttagggtcttctgtgagatgcggttgtcaaggatcttggcatcccctcgggggtgagtccccatccacaactggaaagacaggaaacttgggaggggaagggggaagaaacctgccaccctgagttggcctgtcccaatccgttatgctgtgctccccacagggcaactgagtcctgggaaaggcctcccaggtctggatacaaatgttcatgccatcatggacatacagggaggcagtagacccaggcccttgtccagactcggcctctagccatctatgaagacttggactagttatttcccttctttagatgtatcttctttgtctgtccaaagaggagaatgacatctgcactgtcaaggtagcagaaaaactatgactcttaaatgattctttcaggggttaacatacatcttccagtttcagaagcagaggcgaaagccttcctatgctttggctttttctccactaaataggcaggagaaatattttaggttaataaaaatgcaaaaaaatagtcaaagtaaaaaaacttaattgtcaaagagggctgaattaaaattcactaagtgctaagagtggttgggggaaggagagtgctggaaatcccagcctattatgacaaaacctctcttctttttgataacactatctagtccattagcctgaagagccaagtgggtctcctccctccttgctgcctcacccttcccagctgattcttatgacttgcctcaggccctttctcctgacctgcgggtaaagtgggctgaaatacagcccggggctcacctctgcataaggcttgtcctctgcgatctgggccagtggatcactgctggccaacagccgcgccacttcgctgttggaacccatcttcccccaggcatactgctgcaccgcacaggaaagtgggaatactaggggcacagacagggtcagctgccactccactcctcaggccccaccctagtgtcccgggaaaccaggcaagagctgggggtgctcactggggacagagtcaaataagggttttgtaggctgttggatgagacccccctccgctgcaggcctcgatgttcccaactgtcagatgggcagcagtaaggaccttgtgctgatctgaggcagggtggcggggagggagcagaaggtacctatcccacggcacgacgtctagaagggccccctcccctcggaggtcaatccccatcgcaggtggccacacctctgcccggcacccacccatctttccgcggaatgccaggagcggactcaacctggccgataatgccgggagtcgtccccaggacgcgctccacgaacacactcgccgacaccccagccaatggctcacctcgcggagcggccatgctcgccccctgcaccaggattaagcacgtatgcctttcccggcagcccccgcggccctctgcgcccagagcttcacgggaaatgtagttccctgagcgttccgccaggccccggggcacccgtgcccagaggcttacggccgcgatcttcggtctcactattcattcattctttccatcgccgggcacagatgtactgaaaacctgctaagtaccacggactgttctaagggctggaggatacatcagagagcaagatagccttccctctgcctttgtagagcgcttacattctggtgaaggcaagacagacaagtattgtaagcaaatcatgtagtatgttgaaaggtcaaggccacaaaaagtaagggggcaggtggcagtgggaggcagtttgcagaatataaaaggctgtctgggcaagcctcttgaggaggtgaggtttgagtccagacttggcggtgaggaaggcaggagtgttctgcggggaggaaacagccacagcggaagccagagcaaggcgggaatgtgggactgtgccgggcgtgttggggagggaactgctagcaaggaggccactgtggctggagcagagtgagtaagacaggggcagtgaggaggtcagagaagagaggaggggggcagagctttgcaggctattgctattgtgaagactttgggttttacttcgagtctcagcaattacagatttgagcaaagaattgctgtgatgtgagtagggacatactagtgatgatgatggtaaatgtcacatgcaaggcccttcactgctctgagctttgtagaatggggtgaataatgccagcctgacatgcttgttggagggtcagatgggatgacgtgagacacctataaggcagtcagctccctgtgctcctctgatccttcccgtcccaggtgctgtagaaagtcagaaccccaacttctactccaggctgagctgcttacaagttgcacacacagaagtcaggggaattacgaagagctgtgcatagggaaggatggccttgggccttggctctgcagtaatcttggctatatcctgtggtgaaaggctttgacatccagaccttctcagtcaacagcctcctaggaggaggacagtcagtggctcaggcctgtaatcctagcaccttaggaggcagaggcagaaggattgcttgaggctaggagcacaacagtcaaagctccggggaacctggaatgaggagttacagtcctgactctaccctcatcacccctgcaataccctcattcccacagcctctaccatatgtgcccaggggaaagagcgggtgccgttttccctgtaatcctctgcccaggtgtgggtatctatctcacctcccctggggtcctctggctcaaataaatcagcttgcattttaaaggaagctttaccatgcactaaggaataataaaatggataatacaagactcatgacagccccccgcctggccagccgccccgtccgggagggaggtgggggggtcagcccccagcccggccagccgccccgtccgggaggtgaggggcgcctctgcccggccgcccctactgggaagtgaggagcccctctgcccagccagctgccccgtccgggagggaggtaggggggtcagccccccgcccggccagccaccccgtccgggaggtgaggggcgcctctgcccggccgcccctactgggaagtgaggagcccctctgcccggccaccaccccgtctgggaggtgtacccaacagctcattgagaacgggccatgatgacaatggcagttctgtggaatagaaaggggggaaaggtgggggaaagattgagaaatcggatggttgccgtgtctgtgtagaaagaggtagacatgggagacttttcattttgttctgtactaagaaaaattcttctgccttgggatcctgttgatcggtgaccttacccccaaccctgtgctctctgaaacatgtgctgtgtccactcagggttaatggattaagggcggtgcaagatgtgctttgttaaacagacgcttgaaggcagcatgc

SEQ ID NO: 1242215 - DNA, 4001 bp, Homo sapiens
tacctctcacccgaaaataagacagactttttaagtcgtattatggtagatgtgagcaacaaagaaaagaatatgaaattatttgttacttaaaacacaaagcaggggccaagcaactgtcttttatttgggaatccaaataccccttttcccttccttctggctggcctaaaaggatcacaacctgttatgcgagctccaagtttgaactgtagaaatttctgctcccacatatcttccaaatcttgcgccagcaatatatcctgttcatcttcttcatcatgaaggtcagctttcttctttgccagtcgctggttttcatccagagcacgaagctcgtggtctgaatacaggcttctctctatctcaatctgggaaaattcaaagggcaaaaaactaccttaatctggcaaaattaaaaggaaaaaaaaaacaggaagaataaaacagagacatggcacacttggcaagctcagaagtttatcacccaacataaccagatacacagtcaaaacaccatgcagaaaggaaatggagggaaaaaaaggtcctctgaactttgggcttgagttacatttgccaaaaatgttacaatgtcactgggggtcaagagtgctacaaaaacagagagctgggttgggcaatgcctgctgactcaccacaatccagtcatgtcagtctttgatcagaatctcactcaccaaggactttcctgttcagggactttcaagaggttgttccttcttcctagaatgtttttcctcacattctttcttctgggagagtcctactcatctttctgatttcaatttaaatatgactgtctcagagagacatttctcataaagagaaaaacctgtattcagaaagtctgaggcattccttgacactcaccataaaatcaaaatgtgatgtatttgttaaacactcttatagtgccttgtgttttccttaacaacacttatcagggtctgcatttagttgtatgattatttggttactgactgatcccctcactcaactagactgaagtactctgagaaccagagctacttctgccttattcattacagcatctctatcacttaacatactctctgatgcatagtatgggcacaatgaacatctgtaggttgagtaacaaatatttgtcaagcgagcgagtaaatgaataaatcaagcaaaaagcacagaagagaagtttatagttctcaacagaccaagacaaaaacatctcggattctgaggaaacatatcacccttcaaacactttctgtagcgacctcacaccttcacagccactacactgtttttgcccatgcttcctcacttgcccctcacacagatagccccatgagataaaacagagtaggcttatcataggcatctgacagatgtgcccaccgcctcttgtatttccttcttaacattcatcacatcacaaagactttctccctccagacttgtaagctcctagtgacacggaccgattcttgttcaccacaggatccctattgtgttgcatgaacaagaagtagagtatctccaaagagttgtctaaggtgacaataaacacggccaatgaaaagaaaccactttttgttgaacatctatgtaccaaaccaagtcagtaaggtaggtaccattctgcggataagtaccgtatacttaagttcagagaggtgaaattactcgctcaaagtcacgcagaataaacgtcactctgaaccctgcatctcagtcccacctgctgcagtagagacgccatctcttcctgcaatggggtcaacggcttggagactacaggtggccgctgcaggcacaacgcgcccaacaagcgccatggggatccgttgcttgagggtgcggctgcaagagccaggctgcgagagcttagactgccggcccagagcctctcgaaccgccgccaaccccccgccacccctaacagcgtccgccttacgggcgccgccatctttcgttctcccacaatgcaccgcggctcccagggatccctcagccgcgggagcggcaaactaggggaaagctcagtcccggaactgctagaacgaaccattcgcatatggagggggtgacccaccatctcagaacattaaaaaagggaaagaatcccctggtgaactacagtgaaagtcttattgagcatttaaatggaaataaaaatattcagtggacctaatgaagagtagatgactttcccttctgtcccctccccgacaggcactcatggtaccggcgccggcgcagctgtgactgtcgctgcagacggaaactgactggggtcaattcaagtcatgcaggctgtgagaaacgcggggtcgcggttcctgcggtcctggacttggccccagacagccgggtaacaaatgactgccccctcgagcccaccgccacctccaggactatgctcctactcgtgtcccttgagccacccgggccccagtgaccgttaggccgtggccctcaccgagcttttcttcccagcagggtcgtggccagaacgccggccgggaccatctgcacaggcgctcgacagctccaagacgctgcggccaagcagaaagttgaacagaacgcggctcccagccacaccaagttcaggtgagccccacttggaccagccctctggagacccgcaacccctgactcttgcccgacaccctccagagtcagaaccagtgaattttcagctatgtcacttgctatccgtgggaccttatgcaaataaatctgagcctcagccttctcatctaaaaatgcggataatgctgagagaggttgtgagaatcagatgagccgtggtacagagtaaatgttcagtgaacattcgttaaatcaatgagtgaatgtgagatatccataacatgtatcagcgttcttttcttctgagatggagatcttttcagaccaataaccttccctgcctccaaaacaaaatggggaggtagagggcgctagcgatggaacagatgttcctgcacgtcttacggatggtccagggtgggttttgtgctcagccctaggaactggcatcttgcttcccaccagtgccaccacctctgtatgctgtatacacatccacttaacttcacatccatttaacaaacatttaccaagaatctactatgagtgagacaccatgctaggtgccgtgaatacagatacaaaagatcattcctccccacaagtagttcacagtctttgagggaagacaaacatgcaaacattttaaccataatctgctcaataatataatggaggtaagcattggttggaagtatgaaatcataagtgtctaactcctggccgggtgcagtagctcatgcctttaatcccagcactttaggcggccaaggtgggcgaattacttgaggtcaggagatcgagaccagcctggccaacatggcgaaaccccgtctccactaaaagcacaaaaactagccaggcgtgatgtctggcacctgtaatcccagccactcaggaggctgaagtagaagaatcgcatgaacccagggagcggaggttgcagtgagccaagatcacgccactgtactccagcctgggtgacagattgagactctgtctcaaagaaaaaaaaaaaaaaaaagaataagtgtctcattcctgaggaaatcaggcaagaccatggagaaaagaacatggagctcagaagtgaatgggagttcatctggacaagttgaagtgggtcattggagacaaaggtaaccatctgtgtaaaggcatgtggtatgaaaaaacatggtgtgttcaggtgtgtatgtgatggcagatgaggccaacaagacaagaaggcatcagaatgccaggggtcttgtctgtcacactggagcttttacgctgtccccactgaaggcagtgaggagctgctgaaagcatctaaaccaagattctgttgtagtcatttcttcaacaatgccaggcactgttcagagtgttggggatatatccctgaccaaaca

SEQ ID NO: 1242216 - DNA, 4001 bp, Homo sapiens
tgtcttctacccactggaatttaagttctatgagggcagggctttttgtctgtttggtcagggatatatccccaacactctgaacagtgcctggcattgttgaagaaatgactacaacagaatcttggtttagatgctttcagcagctcctcactgccttcagtggggacagcgtaaaagctccagtgtgacagacaagacccctggcattctgatgccttcttgtcttgttggcctcatctgccatcacatacacacctgaacacaccatgttttttcataccacatgcctttacacagatggttacctttgtctccaatgacccacttcaacttgtccagatgaactcccattcacttctgagctccatgttcttttctccatggtcttgcctgatttcctcaggaatgagacacttattctttttttttttttttttctttgagacagagtctcaatctgtcacccaggctggagtacagtggcgtgatcttggctcactgcaacctccgctccctgggttcatgcgattcttctacttcagcctcctgagtggctgggattacaggtgccagacatcacgcctggctagtttttgtgcttttagtggagacggggtttcgccatgttggccaggctggtctcgatctcctgacctcaagtaattcgcccaccttggccgcctaaagtgctgggattaaaggcatgagctactgcacccggccaggagttagacacttatgatttcatacttccaaccaatgcttacctccattatattattgagcagattatggttaaaatgtttgcatgtttgtcttccctcaaagactgtgaactacttgtggggaggaatgatcttttgtatctgtattcacggcacctagcatggtgtctcactcatagtagattcttggtaaatgtttgttaaatggatgtgaagttaagtggatgtgtatacagcatacagaggtggtggcactggtgggaagcaagatgccagttcctagggctgagcacaaaacccaccctggaccatccgtaagacgtgcaggaacatctgttccatcgctagcgccctctacctccccattttgttttggaggcagggaaggttattggtctgaaaagatctccatctcagaagaaaagaacgctgatacatgttatggatatctcacattcactcattgatttaacgaatgttcactgaacatttactctgtaccacggctcatctgattctcacaacctctctcagcattatccgcatttttagatgagaaggctgaggctcagatttatttgcataaggtcccacggatagcaagtgacatagctgaaaattcactggttctgactctggagggtgtcgggcaagagtcaggggttgcgggtctccagagggctggtccaagtggggctcacctgaacttggtgtggctgggagccgcgttctgttcaactttctgcttggccgcagcgtcttggagctgtcgagcgcctgtgcagatggtcccggccggcgttctggccacgaccctgctgggaagaaaagctcggtgagggccacggcctaacggtcactggggcccgggtggctcaagggacacgagtaggagcatagtcctggaggtggcggtgggctcgagggggcagtcatttgttacccggctgtctggggccaagtccaggaccgcaggaaccgcgaccccgcgtttctcacagcctgcatgacttgaattgaccccagtcagtttccgtctgcagcgacagtcacagctgcgccggcgccggtaccatgagtgcctgtcggggaggggacagaagggaaagtcatctactcttcattaggtccactgaatatttttatttccatttaaatgctcaataagactttcactgtagttcaccaggggattctttcccttttttaatgttctgagatggtgggtcaccccctccatatgcgaatggttcgttctagcagttccgggactgagctttcccctagtttgccgctcccgcggctgagggatccctgggagccgcggtgcattgtgggagaacgaaagatggcggcgcccgtaaggcggacgctgttaggggtggcggggggttggcggcggttcgagaggctctgggccggcagtctaagctctcgcagcctggctcttgcagccgcaccctcaagcaacggatccccatggcgcttgttgggcgcgttgtgcctgcagcggccacctgtagtctccaagccgttgaccccattgcaggaagagatggcgtctctactgcagcaggtgggactgagatgcagggttcagagtgacgtttattctgcgtgactttgagcgagtaatttcacctctctgaacttaagtatacggtacttatccgcagaatggtacctaccttactgacttggtttggtacatagatgttcaacaaaaagtggtttcttttcattggccgtgtttattgtcaccttagacaactctttggagatactctacttcttgttcatgcaacacaatagggatcctgtggtgaacaagaatcggtccgtgtcactaggagcttacaagtctggagggagaaagtctttgtgatgtgatgaatgttaagaaggaaatacaagaggcggtgggcacatctgtcagatgcctatgataagcctactctgttttatctcatggggctatctgtgtgaggggcaagtgaggaagcatgggcaaaaacagtgtagtggctgtgaaggtgtgaggtcgctacagaaagtgtttgaagggtgatatgtttcctcagaatccgagatgtttttgtcttggtctgttgagaactataaacttctcttctgtgctttttgcttgatttattcatttactcgctcgcttgacaaatatttgttactcaacctacagatgttcattgtgcccatactatgcatcagagagtatgttaagtgatagagatgctgtaatgaataaggcagaagtagctctggttctcagagtacttcagtctagttgagtgaggggatcagtcagtaaccaaataatcatacaactaaatgcagaccctgataagtgttgttaaggaaaacacaaggcactataagagtgtttaacaaatacatcacattttgattttatggtgagtgtcaaggaatgcctcagactttctgaatacaggtttttctctttatgagaaatgtctctctgagacagtcatatttaaattgaaatcagaaagatgagtaggactctcccagaagaaagaatgtgaggaaaaacattctaggaagaaggaacaacctcttgaaagtccctgaacaggaaagtccttggtgagtgagattctgatcaaagactgacatgactggattgtggtgagtcagcaggcattgcccaacccagctctctgtttttgtagcactcttgacccccagtgacattgtaacatttttggcaaatgtaactcaagcccaaagttcagaggacctttttttccctccatttcctttctgcatggtgttttgactgtgtatctggttatgttgggtgataaacttctgagcttgccaagtgtgccatgtctctgttttattcttcctgttttttttttccttttaattttgccagattaaggtagttttttgccctttgaattttcccagattgagatagagagaagcctgtattcagaccacgagcttcgtgctctggatgaaaaccagcgactggcaaagaagaaagctgaccttcatgatgaagaagatgaacaggatatattgctggcgcaagatttggaagatatgtgggagcagaaatttctacagttcaaacttggagctcgcataacaggttgtgatccttttaggccagccagaaggaagggaaaaggggtatttggattcccaaataaaagacagttgcttggcccctgctttgtgttttaagtaacaaataatttcatattcttttctttgttgctcaca

SEQ ID NO: 1242217 - DNA, 4001 bp, Homo sapiens
ggatattacatactgctttgcattttttttccttttaacaatgctatatatgctattatgtgtctttttgaaaaatgggttaaatatacgtatatttgtatattcactgaacatttctagaaggaactgaaaacagtggctgtctctggataaaggaactgggaactgctaaacagaggtggaaggaagtaacttttcactgtatatcctttgaatccatggaacttttttaccataaccatgatgccattcaaacactactttttaaaaaacaaacaaaaatacataacatggctatcattccatggcagtacctgtagcactacctcatcctttctacctgctgcatagcattctagtacccaggggggtacatttattaaacaggtattgtatgtacacgttgaggagttatgaggagtatgtcctggggcactataaagaaagcacaggagtaatggagctgccaagtgaagcatcatcagaagtatcaggataggccaggaatgatggctcaggcctgtaatctcagcactttgggaggccaaggtgagaggatcacttgatcccaggagtttgagataagcctgggcaacatggtgaaaacccgcctctacaaaaaatttaaaaatcaggcgtggtggtgcacgcccgtagtcctagctactctggaagctgagatgggatgattgcttgatctttgaggtcgaggctgcagtgagctatgagccggccactgcactccagcctgggggacagcgcgagacctcgcctcagaaacaaacaaaaaaagtgttggtataaatgtataaatgcagtgagagacgcatgtgacaacagcagcccatgaagggtgtgcaaagggaacatggggtttccttccgggtgtgtgcacagaggggtgtgtggaggaaggaaaaccacacaggggattgacgaaggattcaatacatgaggggctgctgtgaagtatctgtagggaaaaggagatggagatgaccaaaaaaagtggaaggaggactgcgtcagaaaaaaacagaatggggaaataaaaaacattaattgggaaaaagaggcagagaagtatatacggtattgccaccacataccatggactctcaggactggttggatttcaaataattttctttcccagtaaacaaaacttgttaaatattatgaatactaaatgtatacctaacagttctgatttataaatttattcttttgaaaacaggtcgtttttggactatgtccttgtatacaaggagcacagggggagcaaaagagcgagacacgggtgtgccgaaggatgggggtcaggaggaactgcaaagcagggaactttgaagtgggacctggttttagtccgaaccacctcggctgatgaccttgggcaatcgcataacctctctgagccacggattccccacactcaaaacgggcagggaggccgtgggactggcccgggggatgcaggcagagcgcccagccccagctcggcacagcgtgggtggcagggcgcctggagaacccacagaggcggcggggagtgaggggcgcagaccgcaggtactaggcgcccaaaggctgaccggcgggaatggcgcaccttctgggagccagaagacgccgagatctgggcccacaccgctctgccgcccatgctttccgcaaccagaagtccaaaaccctcggggccggccgcccgggcgcggcctggaggccttcagcggccgggtccccggatccctggcccgggtacctggcggcgtgcagcgcccgcagcgcctcgcgggcgaactggtccgtgccgaagaagagcacccgccagggaggcttctcgcggactctggagtcccggcagtcctcccagccgagtcgggccagtgctcgccactggggactcggcctcccacgcctggcgccatgagccagcggaggaccccaacagcgccgcaccaacaccctcatcgcctcggccgccggcggccggccctgcgcaggcgcatcggggcggggacaagggtgcagcctggggagggcggggcttgcctgcttggaggcggggtctggttggagttggtgaacgaatttgcccgctacagcggccctagatttttgttctgtttatttgcactatgtagccaatcctccagaataagtctttcttttctttttaaaatcgctttatttatttatttatttatttatttatttatttcagaaagggtcttgctctgtcgcgcaggctggagtgctgtggcgcgatctctgcttactgcaacctcactgctcctgggctcaagggatcctcccacctcagcctccggagtagctggggtacaggcacacatcaccatgctgggctgattttttgtagagagagtatctcactatgttgcccaggtctcaagcaatcctcctgccttggcctccccaagtgctggggttacaggcgtgagccactgcgccggcccaggataagtcttttggtaacaaatcgtgcatgttttcagacaatgaaacctcatgtatatagtgcatgtcatttcctcaaccattataaccaatatttgctgagtacttcactccgtgccacgtttttgctaagcattttatattcattattctggttaatcatcagatcaaccttaggaggtagatactattacaaatatgttactgaagagaaactgaagctccgtgaaattaaggacttaccagtgtataaggtccacacagctagtaaaggacagagcagaggtgggactcttgtaattccaacgcttgtaatcctagccgttgggccttctcagcgatcctatgtattaggcaagtcaattacccacattttgcacctgaggaaactgagccttagttacttgtctgcagttactttcttgaatcgaaggctccatctttactcctcccctgtgggttcctttgcacacagaaggataccatagaggtgattcctagggaaatggacagggaaccttatccccagaagacctccgaggaccgttagtgcttagattctgtatccccaaagcctccttgagtggagtcagacatccatgaaacaggatctgagcagagactgaaaccgaattttgttctaatcttattctcaccaccattttttttttttttttttttttttttgagatggagtctcgctctgtttttcaggctggagggcagtggcgggcgatcttggctcactgcaaccgctgcttcccaggttcaggcgattctcctgcctcagcctcccaagtagctgggacatgcgccactacacctagctaatttttgtatttttagtagagatgggattcactatgttgaccaggctggtcttgaactcctgacctcaggtgatctgcctgccttggccccccaaagtgctaggattacaggcatgagccactgcgccctgccgtctcaccaccttttcccatcacacagtcttaaacccagtgaccctggaccagtcctttttcctaaattatgagctctgcacatccctgctcctgtgcctttgctcatgctcccttcctagactgccttcccacatctcttcatctctaaatggtatccattcttcaacacgaagttcagacattcgccctgaagcttcaagctcttgcctccttagatttcttgtctttctccatgtgcccctgtttttttttgttgttgctgttgtttttgtttttgtttttgagacagagtctcactctgtcacccaggctggagtgcagtggtgtgatcttggctcactgcaccctccacctcccctgtgcaagcgattctgctgcctcagcctcctgagtagctgtgattacaggcgcctgccaccacgtctggctaattttttgtatttttagtagagatggggttttgccgtgttgggcaggctggtctcgaactcctgacctcaggtgatccacctgctttggcctcccaaagtgctgggattacaggcatgagccacc

SEQ ID NO: 1242218 - DNA, 4001 bp, Homo sapiens
aaagaattcatcttgttctccgaaattcatctcaaacattttccaatagaaagctttccaatttcccctccccaaggctatgtttccacaacattggtgtttacctttatcatatatctggcttcaatgcaattctttattcatgtctgtttcctcttctaggctctctgctcctttagagcaacaatcatatctttttcatctccacaacccagtatatagccaagtgtgcactacataggtgttcaacatatgtgaatgaattagctaaattttaaacaactagatagtaaggacaagagtctatatcctttacatctactaaaacacccagcaatgcttcctcataatagctaaaataattctgtttgaacgaacgaattaacatctgtatagattccctcatacacacctacatagatgaagagaggggtgaaatgagcatatatgctttactgctttaacccataggcaccttgaatttgagtaaataacggataatagaatagtgaagggtaattaagaaagcctgatggtataactaattccaaggaacatcaagtttccaaatatctggtgtctctgaagcatgatgctgggaagacagatcatcagtttgacttacaacagaattacaaatacgtacttattcaggggacattaaatttttcttcctctggtgtctaacaaaaatgagtccccaaaaactctttagaacatgccttcacaacaggatatgactgccattttattgataagaaaactgacattacatagactaaaaatacatagcagtgcagttggtgaaagtaatgaaacagaggtctgctaaccaacaaacacggaccctcacttattcctctcatttctctcttctgtttcctacgttcttgggaagcctggatatgatagccaagtcttcctttcgttcactcaagaaaaagcatttaatgttgaccaactctgagacaggaaaagcctaggccctggagctactgagacacagccttagccctccatatgcttagtgaagtccagtcaacctctgagttctgccctttggcatctccacaccttttttggtgttccctcgtctaaagcacctgcatctttctctggccattttactaatataaccggagtcttactcgtagctcattaactttaggcctcactgagggaacctgggcactcaggtgttcacccatctcctctaccacaactttctgttctcaccgtgctctcaccacagcaccgtcatccccacggagggttttcgagcaccaaaagagccacccatgcaaacaaactcccctcccagagataaatctgtcaacccctgccgtcctctcgctctttagccccacaactttcactaccgggccctctccccgccatagtgccaagagcgtccagaccacgactagggggcgtgcgcgcgccgggaggggaaacgtgcgcgcgccggggggtgggggggcgcctagcccagcgccagcacggaccatgcacagatcagcaatcgctggccgccaggccttcggagggtctgtccgccgcggcttccgctacgggcggcctcgcaccttctggctcagtacgcgggactggcgtagccgctcctcggcactcatcgcccgcagacgctgcttcagctctccccgcaggctccgcttggcgctgctcaccgctgccgccgccatctcacgcccaagccgagtccagtcccgccctcggcgccctgggcgccctcgggttcggtctccgcccctggccgctcccaggtggatccgcggcctaggggcgggtcggggctcggggaagcgcccccaccccgcttccgggacgcgggcccgcggcgcgccgcgcgcttacctcgcctctggcccttgggacccagccctcgtgcggtccccgtggtccggctcgccctccccggttaggggagcggtggcgaggcgccgtcgctgccctgccgcctgacctccctgagcctgggccctcaccgggaccgcggaggcggcagcgccactggcggggatggtaaagatggccggcagtacccacggtgcctggcatctcttgtactgttcagtagtgggacttcaggggccagaaaagaagggcaaggcaggacatgtagcgaaatcgtcacgagtcgcttaactacagggataggtctgacagatgccccgatttccttcttgtgcaaacatcagagtgtagttacacaaagttactacacacctatgctacacacctgtacagcgtattttgtaccgaatactgtaggcaattgtaagcaccgtgatacttgtgtatctaaacacagaaaaggtaatgtgttggttggctaccacatcagtaggtattaggaatttttcagctccattataatcttaagggaccacagtggttgatggaaatgtccttatgtgatgaatgtatagatgatacataatcgggaacactgctaaagcaataactgtagtgtaaaagccaaattttgcgggtttctagtgtgaatgtattccaggtaatagtgcccacataggtacttcctgttataaccatcagtgactgttcattcccaccactcagctctgattaaaacacaaaaatgaattaaaactaaaagcagttggggggtgggtgaggcacttgcaggaagaggtaaaagaaactgttaagtcttaaactgctcccagtagacaggcgcctcagatggcatagacggttgcctctcagatgtgacttcctaagaaaaccagagctgtctctgccaaaaatacgtccctactgaccgccccagtgtcttaatccccaccgttaagaatcacacctcctaggtaaagcattaattaagtgcccggtgagaatgcacatggcttgagaggggagttctggcttctttatggaatctatcaacagcttccagggaaagctaatgcaagtcccagggggactgtgttgtaagaaaaagggaaggccaggcaggtacagcgtatacatagtgcaattagatttgctgacctaaaagttagaacacgaggtctaacaaactacgtacttttctaatctgttcatttttaccaaaaaataaaaattaaaattaacactagctccacgttgaatcatttaccaattttctttgttcagaatatcccagagtatcctgcatatcaggttgccatatccatcaaccccaaatggcaagccagagagagaaggctggggaggaggcatcaatggaaactcttaagcagccaggggcactggaaactgcagaaagcatgggaaggaaggagggaagagggaagccgacctgagtctgcttctagcctgagtccgcttctcagtctagtctgcagtctagcctagtgacacagaaaaggacttttggggtaatggcacaccttaaaagtctgcctggggcagaaaagacaccgccttcctggtcatcatcccataattaattgcctggatcctgtgttgagcttttaccctttggctgaatttccagccagactccaaaactgaagacaaaaatggcatatagagaaaaatacatacaatttattcattaaatagggacaaaatttctgtaactctggaaggtcaagttacatcatcaaagttgtttatttaaaagtagaagtatgtgttggcaatcgttttcgtaagagtcagaaaaattaggccggtttcacaatatggagtgtcctttctggtcaacagtattgcttcaggacagaagagcatttcacagatctttcctgtaacttctagaaaagtcatccagccagatttaggctcaagcttctttacaaagccattttcctatgagagaataaatttaacattttaaaaatcattggagattaagtatgctggaataaaaagcaaaaatattttcatttaaataatgcaaataatcttctatccctctaaaggagcattgtgtaacagaaacacagtgtggcctacatctgtaattttaa

SEQ ID NO: 1242219 - DNA, 4001 bp, Homo sapiens
acacttctttaactctcacaatcgacctacaagagtgatattatccattttatagacaaggaaccaaaggttctgagagattatgagacctgtccaaggatatacagttaaaaaacaatggcgccagattcagcccagatctgtgcagttccaaagcccatgctaaactgtatcctgtcatctcttgcctaaatatccctactcacactcccctatcccatctttcccttcacctgaaagaattcatcttgttctccgaaattcatctcaaacattttccaatagaaagctttccaatttcccctccccaaggctatgtttccacaacattggtgtttacctttatcatatatctggcttcaatgcaattctttattcatgtctgtttcctcttctaggctctctgctcctttagagcaacaatcatatctttttcatctccacaacccagtatatagccaagtgtgcactacataggtgttcaacatatgtgaatgaattagctaaattttaaacaactagatagtaaggacaagagtctatatcctttacatctactaaaacacccagcaatgcttcctcataatagctaaaataattctgtttgaacgaacgaattaacatctgtatagattccctcatacacacctacatagatgaagagaggggtgaaatgagcatatatgctttactgctttaacccataggcaccttgaatttgagtaaataacggataatagaatagtgaagggtaattaagaaagcctgatggtataactaattccaaggaacatcaagtttccaaatatctggtgtctctgaagcatgatgctgggaagacagatcatcagtttgacttacaacagaattacaaatacgtacttattcaggggacattaaatttttcttcctctggtgtctaacaaaaatgagtccccaaaaactctttagaacatgccttcacaacaggatatgactgccattttattgataagaaaactgacattacatagactaaaaatacatagcagtgcagttggtgaaagtaatgaaacagaggtctgctaaccaacaaacacggaccctcacttattcctctcatttctctcttctgtttcctacgttcttgggaagcctggatatgatagccaagtcttcctttcgttcactcaagaaaaagcatttaatgttgaccaactctgagacaggaaaagcctaggccctggagctactgagacacagccttagccctccatatgcttagtgaagtccagtcaacctctgagttctgccctttggcatctccacaccttttttggtgttccctcgtctaaagcacctgcatctttctctggccattttactaatataaccggagtcttactcgtagctcattaactttaggcctcactgagggaacctgggcactcaggtgttcacccatctcctctaccacaactttctgttctcaccgtgctctcaccacagcaccgtcatccccacggagggttttcgagcaccaaaagagccacccatgcaaacaaactcccctcccagagataaatctgtcaacccctgccgtcctctcgctctttagccccacaactttcactaccgggccctctccccgccatagtgccaagagcgtccagaccacgactagggggcgtgcgcgcgccgggaggggaaacgtgcgcgcgccggggggtgggggggcgcctagcccagcgccagcacggaccatgcacagatcagcaatcgctggccgccaggccttcggagggtctgtccgccgcggcttccgctacgggcggcctcgcaccttctggctcagtacgcgggactggcgtagccgctcctcggcactcatcgcccgcagacgctgcttcagctctccccgcaggctccgcttggcgctgctcaccgctgccgccgccatctcacgcccaagccgagtccagtcccgccctcggcgccctgggcgccctcgggttcggtctccgcccctggccgctcccaggtggatccgcggcctaggggcgggtcggggctcggggaagcgcccccaccccgcttccgggacgcgggcccgcggcgcgccgcgcgcttacctcgcctctggcccttgggacccagccctcgtgcggtccccgtggtccggctcgccctccccggttaggggagcggtggcgaggcgccgtcgctgccctgccgcctgacctccctgagcctgggccctcaccgggaccgcggaggcggcagcgccactggcggggatggtaaagatggccggcagtacccacggtgcctggcatctcttgtactgttcagtagtgggacttcaggggccagaaaagaagggcaaggcaggacatgtagcgaaatcgtcacgagtcgcttaactacagggataggtctgacagatgccccgatttccttcttgtgcaaacatcagagtgtagttacacaaagttactacacacctatgctacacacctgtacagcgtattttgtaccgaatactgtaggcaattgtaagcaccgtgatacttgtgtatctaaacacagaaaaggtaatgtgttggttggctaccacatcagtaggtattaggaatttttcagctccattataatcttaagggaccacagtggttgatggaaatgtccttatgtgatgaatgtatagatgatacataatcgggaacactgctaaagcaataactgtagtgtaaaagccaaattttgcgggtttctagtgtgaatgtattccaggtaatagtgcccacataggtacttcctgttataaccatcagtgactgttcattcccaccactcagctctgattaaaacacaaaaatgaattaaaactaaaagcagttggggggtgggtgaggcacttgcaggaagaggtaaaagaaactgttaagtcttaaactgctcccagtagacaggcgcctcagatggcatagacggttgcctctcagatgtgacttcctaagaaaaccagagctgtctctgccaaaaatacgtccctactgaccgccccagtgtcttaatccccaccgttaagaatcacacctcctaggtaaagcattaattaagtgcccggtgagaatgcacatggcttgagaggggagttctggcttctttatggaatctatcaacagcttccagggaaagctaatgcaagtcccagggggactgtgttgtaagaaaaagggaaggccaggcaggtacagcgtatacatagtgcaattagatttgctgacctaaaagttagaacacgaggtctaacaaactacgtacttttctaatctgttcatttttaccaaaaaataaaaattaaaattaacactagctccacgttgaatcatttaccaattttctttgttcagaatatcccagagtatcctgcatatcaggttgccatatccatcaaccccaaatggcaagccagagagagaaggctggggaggaggcatcaatggaaactcttaagcagccaggggcactggaaactgcagaaagcatgggaaggaaggagggaagagggaagccgacctgagtctgcttctagcctgagtccgcttctcagtctagtctgcagtctagcctagtgacacagaaaaggacttttggggtaatggcacaccttaaaagtctgcctggggcagaaaagacaccgccttcctggtcatcatcccataattaattgcctggatcctgtgttgagcttttaccctttggctgaatttccagccagactccaaaactgaagacaaaaatggcatatagagaaaaatacatacaatttattcattaaatagggacaaaatttctgtaactctggaaggtcaagttacatcatcaaagttgtttatttaaaagtagaagtatgtgttggcaatcgttttcgtaagagtcagaaaaattaggccggtttcacaatatggagtgtcctttctggtcaacagtattgcttcaggacagaagagcatttc

SEQ ID NO: 1242220 - DNA, 4001 bp, Homo sapiens
cggtgtctcactctgccgcccaggctggactgcagtggcaggatctcggctcactgcaagctccgcctcccgagttcatgccattctcctgcctcagcctcccgagtagctgggactacaggcgcccgccaccatgcctggctaatttttttttgtatttttagtagagatggggtttcaccgtgttagccaggatggtctcggtctcttgaccacgtgatccacccgcctcggcctcccaaagtgctgggattacaggcatgagccaccgtgcccggccgatttcaggtttaaaacaggctttcctaagtatctggctacttcccctaataatcgcattaaacaactgacttttcctaattattatacaattgttatacaattcaaaataccataccaatattctgtatgctctaaaacaaacccctttctaccaccaatccctacttccatctctaaggtcacctatagcaaattttgttctaaagcagtgattctcaactgtgagatttttgtcccccagaggtaggggacaaaaaaaaattggcaatgactggtggcattttggtgtggcaactaggtcgcaactaggtggtgggggataagggtactactactggcatctagtgggtggaggccatctttgttgctatacacaggacagcctgcccgtccaactatgaattatctggccccaaatgtcaattaagtgtctctgctgggaaaagcctggttctaaactgaaacaagcaaatttgcaaatacagctgacaacttcaaaaaacaattgccaagcaagtaattcaaagttcactaagctctgttattggtatagagacacacacataataaaggcgtctttttatactatcaaaatgcattaaaatgattaatcattaatgcaataagtggcaaacacgtcagcaaagagtacttttactacccaagcaattaaacatatacatcttttcaaaaagaaattcgggagacaaaaaaggaaatgaggtaatgacattcttgacagttcctttttctcctctcagtcactagacttttaactggagaaagtttaatgagagaagggaagttaaccacatgatactagtcggcagaataatcttaaaccaaaatacgttgctaaagtatctgttagaatcctaactaatgtttacctggcaaaaggactggctccagttttttaatcttcggttccgaattgatcttatcgtcagtctgaaatacattagcaaaataaatcaaaatctcaatccccccaccctccgtaaaatgctacagcaaatgttgttttctaagtgatgacacatgcgaaagacacacagccccccatttaaattctttcgcatattaactgagctgtttttaagatctgctcattatcgacttggaagcctaataataaaaaatgtttaaactgccagtgtcgcttccaggtgttcacatttatgacagacgggtaaccgcctcgaccagtgaccccaagcgctgcaatcatgctggcggtcatacgagggagggtcgatgggttggaaactaaagaaaaccccagctcccaaggctcccctgggcctcaacactccgcaaaactacggacgacagaacttcgggcagagaatggctgcagaagagttttacaagttttcgccgagccagtgggggctcccgagaaggcgcatttcgcggcgccgggaatcaggcagccgcgctgctgtgggcagggagacgcgcgcagcctcctggggtcctccagttcccgggggtcggcctggaggctccacggaagcgcagaggagagtcgggcgctcgcggggaggggttgtttacctggggcggtggcaggaggtaggacctgaaggtgggtttgggcggcttgagggagaacatggtgccgccgccttttcgccccgttcccgtcgcgggccagtggcagcgccgacgcctccgggcgtaaagctctcagtgcggccgcccaggccctttctgcggccagccgagccgggcggactgacgggcggggatacggcgcagcgcccgcccgagcggggaggggccgggcacagccaggccgacgcgggcgccggggcccatccccggaaggggcccggtgccccgccccgagagacggcgcgcgcaaggccgcggcccgccgctccctgaccgtgtcccgtgctagtgccggaacgcagcggtggcgccaggtgcccgctggcgggccctcagccggggcgccgcggggagcggagcccgacggccatctcaagagcgcggcctctggagggtccttctacggcggcccgcaggggtcaggcggcccgcgggggcctacggcggcctgcgggggccacggcggcagcggtggctgcctgggacggcggcgcggggcgtcttctggccgggctgcagtcctgggacagttcccttgacttacacatgggccgacttcgccctccggcctgggcgagcattgttttgaagctctcaaggaggagctcagggcagggaaaggtgactcgggtccaggggtcaggcggtcaccccgtctgcgcccaggatgcgaggaaccggcactgggaaagtgggccggtgccgccaagcacaggtcacttctgagctcttacggtaattctgactggagcagattttggtgggagggggctagtggtgttacattttggtgaatctattacttgagactaggtccttcttataccttgaagaatcaaaccccaatccagcattttatgattaatgccacagggaagcttccatgcagccataccagtcacaatcacgctgatgagtgttactcacaggaacatttaacaatttaaataaagattcaaaaagttattctttttctgaaaataatttatcctggatttagaaccctactgatctttcaggttaacctgtttgaattccactctgcccaagaaccgtaaccataattgtattttttagagtcagggtctcacaccatcacctgggctgaagtgcagtggcatgatcagggctcactgctgcctccacctcctgggctcaagtgatccacgtgccttagcctctcaagtagccgggactatgggcatgaggcaccgtgcctggccataattgtactttaaaatgttagttccattggattagaagtgttaaaatcactgtcgtgcacactttttaaaaaatttttatgaatatgctgttattcctctatattcaacggatattttctacaaatactctttaagcaataattggctttttctttacacttaaatgactctgtgatttgggtttttctgtacaggttttcttaggatctgcaattctaatatgtgaccatacaactgaaaagtggaaaaactctatttccagatttattattgtcttaacactaaattttatggcatttcccagatatctggttgtattagtctgctcaggctgccataacaaaataccacaggttgatggcttaaagagcagacattaatttctcacaattctggagtataggaagtccaagatccaggtgttggcaaggtagggatctgcctaacttgtggcaggcagacaggtgagggctctctgccggatttgcagatggctgccatctcaccatgtcctcacacagtgcggggagggtatataacatgctctctgggatctcttgatgtctcttcttgtaaggacgctaatcctatcagattagagccccactcttactaccttatttaactttaattacctcctaaaatctccaaatgtagccataccaggggttagggtttcaacattagcattttggaggaacacaattcagtccgtagaactagttttataacctcttctcagaccctgatgcccttgactacgctgtatgtttggtgttattgcctaccccctgcttttggctctaatgtcactgttttgtcctgcttcacccatttttctgtttttgtttgttgtttgttttgttttggttt

SEQ ID NO: 1242221 - DNA, 4001 bp, Homo sapiens
aaaaagagaaagggagaggcgaattataagcaatatggaaataatctgtatttactagtaatatttcttcatttcttcaccttatatttttctcttcctaaattagaaaaggattctttctccacctttctcctttctcttttcctgtcttgctaaatcatgaagagactttagaagggaatagaaaatctgatggaggtttagataccaaacttcccctatatcaaaactaatcatacccaagtataggagggcttctctctgtaattcaaggctgcactttttgttcaggagaaaaggtggcatgtatactcgtgtttagatatgaatagcacatatttttaagtttatcattccaccggttttcatttctatttttaatgccaaattccagaaagcccacattttggcaagcatggtagaaagcacttcattccctttctggttcctcaattactgaggtgcaccactcttcatccaggaataaactccactaagttccaatctcttatacctgcacctctattctcctagaagatgctgccgatcctgttcaaactcatttgagagcaagagtgtcaaagagctggggagagctaccccatcttttttgccaccaacttttacacagactggtccagttcttaccatacaatttcaaacatgcttatacaaaggtcagaaagacctttcccttgtctattttactgtgagcatatatctattgctttctgctctgaggcataacagagaaggaaaaggatgttttcacttaattattaacatactttcaacttcaggtttaaggaggtaggcatatgaaagtaagcgcttaacttcatatcctcccacaggacaggaacaaaggagagcataacatttccctagaaccagaaattattatggattggggtcaactaaattctttataggcactggtgacagctgcgaccttaaaagtcttccttcatttgggaaaaaaaaaatcttaaccatctattataccaaacttaagataatcatacactgagttaaaaaaaaaaatactctccacagctgacgcacattacccagtgggaagggaagccacgcacatcgcacatttccctttttaaagtacgtctagccaattcaagagtaacacaaaacatagagtctaacagcacattattaaacttcctctcggtataaatcagtttaaaaatgaacatacactttagaaaacaacaaaacactaaacttgtgaagctcagaaagaagccaggaatattccttttaaatatgttctcggtggttaagaggaaatgtccgatgatgtcatccctagatactccctagtgatgaacactaactactggtccttaaagggggaccattttcctgcaaaccgtggcggtcgctgagctttgctcaaagattctttaaccaaagtcagggaagaggggtgttcgctgtctcgggctagaaatcagggaagagcgctggtccccgggcccccagccccggctcccagaccacaggcggccaggcctggggcgggcggggaagggcctgggagcggcccagctgcacctgctcctcaggaagccgatggcccgggggcgggccggggtctgggggtggttgtcccccatcggggcacagcccggcctctagccgcccggtagactccccgccccccacctcgccccggttcccggaggaaaagacaatacattttaacgccattggagctgctgctgtgctgcggctgctgcttctccgcctccgcggggtgcggctctcgccgcggctcgcccggcggctctgcgggctgcaggtgcgggctgtcgccaccagtggccccgggcacctcggccttgttggcgtccgccatcccgccgccgctgcctccgcctcggccgcctgagctgaggggctccgagcgcgacaatggcggctgccggggaagcggtaacggatcccgatttgaaaaggccccgagcgctcagtaacccggatctcgcgagaaccggtcgagactgggtgactgggagatggtgtgtgccgggtgcggggggtgggagtgcggggggaggggagccatgggagctggggtcagggccgctgttgctgcagtcggccctacacctgcctgggagggctggaccagtcctgaaagcccccggtggtggtgccatgtctgcccaccagcccgcctgtcgcttggcaccagtggagtcttcgcttgcaaagcgggattagacatcaaagccctaacacccagactgttcaattcattccaggtaggggcagttaaagaacacaccactttgcatctttaaagacttcttgcaagtcctcagactgcctttagaaatcctttgaattaagcaaatataagtctcttgccatttcaatgcctaggcacccttcggacattccataaatagttattgatgactgattgcaattcaccaaaaggaatgactttgaatttctttgagaattatttgttcttagggggtgaggatttcccaggaactcaactatcagcttagtaagagaagactgcagtttttctctggacatcaatcaatatggggaatccataattataaaatatcgtctactagatgggctaataatggacatttgaggttttgactgtgtgtttattgtatactgatggaaattctagtgaagtagttagttatacgctctcaaatttaattgccatatggagttttaaaatacagtcgtagatttttccccctaagtatgaaaaggaaaccgttaaatttaatcaactcctaattctcgagtactataatctttcacattgacataacctttttcagctgaaaagtttaaatgccttcccaaattttttttccatgaagaagcaaacacgtacagtttagtcactttgcagaatatcatacacacatcagtggtaaagttatagttagaaagtaatactcaaataacataatttcatcttcggcttttcaatgtgtagtttcctaccctctaccgaaaaataccaagttcagctacttcatcacacacacacatacacacacacacatacacaaacacacacacacataatcagaacattttaatgataagaatgctattgtagttgctgtataaattgtttctcattcaactctgagacataagatttataatcgcagaaagggcattcaattgtgacagacaaaatctgggttagaaccccagctctgcctctttttgcccataactccctgggcaagtcacctcatttctcaatctctctacaataaatagggatagcaataccgaccttacaggattgaggtgaggattaaaagaaagcactttatgtaggaaaaagtgctatatgaacataatgtaatattacaattctctatctccctaagctcagcagggttttagtcaaagacaagccaagtgatttttcccacagcactaaattataagtactttcaaaatagtcatcattctgttattcttttgctattgttgaattcagtatgaaaattgaaccccaccatcaccagtacaatatattcttgcaaaaatcctttaatcaactcaatgcaagatttttttaagaggcctttatgcttcaaacagagtagtaggtacatgaggaatacaaaaatgagtacagccctgttgggagagggctaatgtaaaaagtactatttaagtgctataatacaaataaaagcaaagtataattaaaaaattatttacaaaaacaggagactggcccacatgccttagtttgccaattaaaatattccattaaaatatttatcttgattactgagttttaacttttgtacccaagacaaatgcctcacccgctgtagcttggttctagtcctgataaagagcagaggttaattcctactgagagattggtgagggccttataaaagagctggatcttaaaagacaaagaattaaggcaacttctgaagggaagagaatgattaatcttt

SEQ ID NO: 1242222 - DNA, 4001 bp, Homo sapiens
atgattacagcaattctcaagtaccaggactatcacactgcttcaagggaccaggtgcccagtgaggtagcttcacccaaacacatgcccaatgggaatggttctctgctggggtgagggaaggggtccaaaagtaacgtagagtagactgacttcttaaaccttaaaactagaagaggaaatgtatagacaaagtgttctcttagatggggcaaaagtgacttaattttggactatgtaaaaagaaaaggctttggccgaggatgccttgaaaggtttctcgttgatgtttgtttgtaatcattctttggaataaacagcacggggcaagggggcttctgagctttgtgtgcaggtttcgatgggcctctgctgcacttccctcaggctgctcaccgggatatcgattttttaattagtgttgtgctggttatcattttgacttggcttctcttccacagccattagaaaacaacagcaaaccagaagaggacgagataatccacctaagcaggactacttgaaaagaagcaagtgtggaaactatgaagccttgtaatagatttttttttttttgatgaactgccgatctcttcaaaatagagtccttgctttcgtgccccgcaaagaaaagtacaccacgccaaagcccaagggaggtggctaaggttatacagggagggaggggagtgtagctggactggggagttggaatagcagaaaagtcacaagtcaaagaggcggccccttccacacattcccaaagtgccaaagggaaaacagcaacaaactcgaaactcgcgagggcgtcttcccgtgcgaagcgtcccctggatccccgaaaagccccgatcccctcgcgcttgggaaggggtggggtcctcttcaggaggtgtttacttggcgtccggggcgcggagaccctcggggccggcgcccggcacaggtccggggcggcgtggttgccgcccgcgcccgagtctccctggctcttgacagcccgccggccgccaggtgctcgccctacctggcgcccccgcctgcctttgtgcggcccgcgccgcccctcgccaaggcgggccagggaccgcccccgcccgcgtgccgctgccaggcgggacagctgcgggcgctgccgggcagcggagcggcggcggggaggagagggagtcggcgcgagggtgcccggggcggggcgggcacggccgcggggagggcaggggacgccgccagcggctgcggcgcgagtctccgagcacctcccctgccggctgcgccccccacgtcccagcaggaggaggggaccccctcccgcgccgtgcccctcgcagccgatgcgcccacaccctggcttccgacagctggcagccatagcaacccggccacagaaagtttcgcgacgcagaaaccgacttggaataaagttttccttggcccctcgctcgctctcccccggcccgggtttacggaaagcggcaggaaatcagagctcgcgacgtgccggctcccgcgtccaccttctccacccctggccccggcagcgcgcccaaggtgggtgcaccacgccggggtttcctgccccgtccccgggtccggcgtcctaggacgcggcgcggccaactcaccatggtgactcgcgccgcggtcgcgtcttcgccgggtcccgctgccggggaactggggctggaacgcagtcttctgggcgaacttcaaaagttggttcccctcgccaaaaacaggctcccgacacccaagcactcacaggagccaatgggaacccagaggggactccatccaggcgggattggcggtgctaggtgagggcgagacggcggcgacttagcaggcggggcgcatgctgcggagggcaagagtccactcgtactcgccggtcgccgccggcccaggtgagtccgatgcgctcggagcgtccgcctcgctcccctgcctcactcctctttcttcggccacttaatccgtactcctctggctgagtctcggctcgggccgggcaatctgtccataaatggagaactcagctcaggcctgaccaatcagggtttgttttcgtagcgtcactcctcagggaaaccgtagtagccaacaagcttggagctgctggagtttccaaagatctctggatcctgtagtcctcctcccgcgccagccaccgaagaacgctgcggacccagctcgctcctggtagcaagacccgaactgtaaggaacaaaaccctcgtgaaagaggagcaaacctttcacttcgctgcgttttaagacgaaagttagggtgggtttcgcttccaagttgaaggggcatgattttcccagaacttttttttaagaaggaaatattttatcagcataaaacatcagagtcgtggcagcagcccaaaggaaatcctttttctttcctacgtctggattgtgagcaaagtcaaaaatatcatttccccacccctccttttacctgaatttccttggaaaacaaaggaagacttccggctgctttttcttttcttttttctgtttttcttttctttctctttcctttctttcttgtttcttttttgcacgttttgatggcagaaaagttgttgcacgtgcagtgggcagagggaaggagagaggagagataggtgggaagaaaccccatccaacctcagccaacacatctgctgaaaacaatcagaactgtaaaaatgcattattccagactgtcgaatatccaaggagaagattggggtggggcggggtggggggaagcagaatcttaaaatcaaggtagggagtttgattttattgttctggaggctgaggaagtaaatttggtgagtcttaacaggctgccttcctggaatctgtagaagataaaattggtaaacttcagggcatagagaaactatgaagcataatgatattatgatactttctgaaatttggttgaggcagggcgctgtggctcacgcctacaatcccagcactttgggaggctgaggttggtggatcacgtgaggtcaggagtttgagaccagcctggccaccaacacggtgaaaccccttctctactaaaaatacaaaaattagcccggcatggttatacatgcctgtaatctcagctactcgggaggctgaggcacgagaatcgtttaaacaggggaggcggaggtcgcagggagccgggatcgttccactctactccagcctgggcgacagagcaagattctgtcaaaaaaaaaaagaaggaaagaaagaaagagagagagagagaagaaaggaagaaaggaaaaagaaatttggttgtagctcttcacttgactatctgagcatagagttagaaagggtattaaactttatcttgtctaaaagggtaaacaaaatgttacaacatggatgaatctcgaaaatatcgtgttaagccaggagcaaaagaccacatattatataattccatttaaatgaaagttgaggatagggaaatctatagagataaaaagtaggttagtggtttgctaggggctgggggagaggggagatggaagtaattgctaacaggtatgcattttcctattgaagtgatgaaaatattctggaattagtggtgatgattgtacaagtttatgaatatactaaaaaccactgtgttatgctttttaaatgggtgagtcttatggtacgttcattatatctcacttttaaaagttgaaagaaaatcatattgtccaaattcttgtagtaatcatttacatagtttggcaacaatataatcgaatgtgtgttataagacagcacagctaaacactggagctacaactggtccctgccctcactgagcttacaattttaggatggggaaaacaaacgataaatttttagaaagaataaatacaggaaagaagcaagcataatgaaatgcgacagtagttttgtgcaaggaactgccatatttggagctatagtttagggcaggaaattcatctgacatagttatgtagtatgaat

SEQ ID NO: 1242223 - DNA, 4001 bp, Homo sapiens
tgttttaagaaagtttatgaatttgtgttggggcacattcaaagccgtcctgggcccacatgcggcccatgggctgcgggttggacaaacttgatgtagaagtggaggggatgggctacacaaagtaaccaaggaatgtttacagactgattatctcttcatgtgaaaatgattttgatatttcttaatatcgacctcataagttccttatgaggattatgagttcatatttttaaaacgcttaaaacagtacctggcacatagcaagcaccatattaagtgtttaagttacttttaatcagtttccaattgcattcgttcatatgttagagatctacaatgcctaaagaaattaccaggttgagagagaagttccaactgtacagtcgttaaatctaaaactagaaagaaagaggtctcagacaatgtttcatgcaagctcatttcatggttgaagaaattaatcatatatctcatatttgcagagaaattcataggttacaaaaagctttcacaacgattattaagtttgattctcacaacagcttgtaagggatgcaaggcaagtataattaactgcatttactcattaggaaatcgaaccagagatgttaagtgacttgtccaaggtcacagttagtaagtcccggcttgaatccaggtctcttgatgcccagtcttctttcctctacaaaacacactgcaacttgggccctggacttcagtgacatttggaaacaatgattccagtgattacaggaccctaaatgaaagttctgttgcaaaagctaatgtgaaaaggcaactctattaactgcatgtagaagtaatcaatatctggcaaaatatctacctacacatgagtgtacagtataaaatgccatgattacatatattcacaaaggtcatcacaaatctgcgcagcactcaagtgacagttctccataatatgtcattcagagatcgccagaccctgagtatattgatgtcagtctaagaaaagactgccacttcccttaaaccaaacccagaagggaaaggcttgccccagaggatggtaaagacatggagcctaacaaggctctgcgggattacacgcaggttgcaaactcccagcgataaatgagtaccgaccctcccagccggtgaatcagctcgcgttcatccggcagcatctttccccggggctcgccacccccagcgcagctaaactggggagctaaaggtgatacggccaccgtttgcaggattcaaaataacctcacagaaaggctagctggcggtagaagcggcactgcataccaacacaagacgttattttaagcgcgtgtccccacgagagaacccatccgatctactggagcaagcatctcccacccgccgggaattttccaaagccaagcaggaggggaggcacgcccgccctgctaaatccacatgggccccctttccactccgaagcccgctctgcccccagctcgagcagcgcggcaggggcctgggagacccccgaggcgggccaccttccgccgccttcaccatctcgcccgaaagaggaaggtgccgcagcgggcgaccggctggtagggccgagggttctgaggcgctgaaggggatggcgctggtggggctcgcctgggcccggcgctcccgccccctccccagcctgacagctggcggcgagggccgcacagccccagtcctcgacgccggccgcggggtgccttacctttgtgtagagctccgacgcagccatggcgggccccgcgcgcctacgccccccgcctgtgcggaggccgcacctcgcctgggcggccgcccgagcggactaggaagcgcccgcagccgccggcagggagcagggcagggcagggccgggcggggagggccgcgcggggcggggcggggcggggcgcctcaggcgctggccgcccgcaggggcctcgccatcactcccgggctcgccgcgagcagccgcgagcgctccacctgcccggggtcctaggggtcgccgccgccgccgcagccacttcggcggcccgcgatgctgcctccgctgccgccgccgccaccgccgccgccctgtgcattatgggagcgggaggaggctgcgctccagcgctgccaccgcggctgctctgggctctctcgggctcacgctgcctcccatcggctacgagcacagagcatcatcatcatcagcctgccagccggccccgccgccgcctcgcgccctgccgaggcccggaaacccgcccgggacgtgagccccgagggcgcggcacaccccgggcgcccccaccccgaagcgagcccggggccctctgctgcggagcctagctcccgcggtagcgcagccatggcacgggctgttactgtgtccgaataaacgatgggagcctccaggctgctcctcccgtccttccaagcattcctagggagaggatttaggggaagccctcttgaaagactgtagaataacccaggactgtagaagagccttgtcagcagcagtgacccgggagatgggcaatgcaggaccgggaatttcaggttaaggttgatcaccaaggtcattccgagcacctcgatgtctgcagcaaagtcgtctcccgataccagagggcaagggccgcttctaagctacagaaacttaagtgactttgaaacgagatagcccggggacagcccaggtgcctctttcctagacctgtgcgtttgcggagatgcaactacccttctgtcccagccttcttcccgtcctgttcgctgctggtgattgtcggctccatggtggcacctgaagtttatccggttgccacctgaaaatgacggagtacttacatggaaaatctgtattacagtttaactcaacatcaaaagggcaaagccgccctcactctcctcacggtgatccttgaacatccagcacaagaatgtggtctttctactcccaaccctgcgctgtcttcatcctctatcttctccccaccctcattgtcgtttctggttgaataatcttcattctttattgttgtcgttgttgttgttgctgtttttgtttgtttaatccctgcctctttgtagtgccctcatctctcgtttctttgaactacaactggtccccagtgcctgtcatggtaatctggtagaccatttctatcacgaacaactctcatggctgaggcccccggttgtgtgtgttgtgtgcgtgtgtatttggagaaagaccattcactgaaaggaacggggccagtccttactccgtggaactcagacctctcctcttcgcccacaatcccctcagaaatgctagagggaatgtctactgagtcgaaagtcctacagatttgtctctgttccttcccattgcaaaaccaaatcgctttcatgtttctgggacccactctttcttcacccagacataaaaagagaaaacgtgtgcagtgacgaccagcggaacggaaggagcactggactgagatttaggaggcctggctcctacgccttgcagtttcttcatgtcgtgtgcaaggtggtaaccactctgcctgttttctcaccttcaaataatacctacctctcaggactgtcgagaaatgctgagtatactgagaaaaaaaaaaaaactaaaaaactggacgagttcttgtaggtgtgaatgctttcttcgttttctatttttttcaagtgatgaggagaaaacagaaaggggaattatcctcttataagtccagaacgcatgcattcaaccactcaaatatttggggccatactaagaggaaggtaatggagatgaggaggagaagagttttgtatttttatttattgattgattgatactgagtcttgttctcttgcctaggctggagtccagtggcacaatctcggcccattgcaacctctgcctcccaggttcaagcaattctcatgcctcagcctcctgagtagctaggattacaggtgtccaccaccacgctcagctaatttttgtattttta

SEQ ID NO: 1242224 - DNA, 4001 bp, Homo sapiens
taacaaatctaacagtcctaacacaccacccttgattctgccagcccccactcaaaacccacactggggaataaagccctgacctcgctctctggctgccatggccctccccttcacacctccagaacagacaaaatgggggctaactgcccaccaggaagggaggtggcagcctaggaacacaggtgtctacgtggacacaaggtcagtgggaatggccatcaggctgcgtcagtctctgggattctcagattctcattccctccaagcttgtacctttaaactccttcctatcagttttcttacattgtgcctggtacttactagacatttaataaatatctgaggtttgaggcacctaaaaataggggtgcttgcacctgtgtgtttctgcttctggaaatactgtcacctcaaataggttcagcagcagcatttttctctgtcctccaaagtatcgtcgaagactagtccaagacttttctttcacttccagtaaactgaaggctgaagaagcgctgttggctgtctgagggctcacagtctcactggtgaaaatattctagaacaaaactagggcaattcaaacactgtccatttagaactccagttaatggagatgcaatagaggagaaactacagttcggttgctttgtgtccggactgttactaagtaatcaaagtagaagaaaaacgtttgcttaaaccattgaaacatgattttttaaataactatcttttctatctacagcaaaagcatcttttaaagtagaaagctagagcatgtgtccggggaaatggatggattctagttccactcgtctgaatactgaggtctctagatttccccaactggtgtataggaggatcaggctttatggctattcaaatggattttttttttcaaaagtgctaacactgtcacactctttatccaaataattacccaagcccatctcagagggtttgggacatatgtgggaacgctgcccttccgaggtaagaggtggagccccagccagcagaaaggaagcttctgaggaatgctctagtgtttcccagagtcagggtatatgaaaggcgctttagaaactgtggtgtttgtactgttgctaacagtacagatgttaggcaaagagcctacgactgcacctcgtggcccctgggctccccaagcgcttggtgccactgcagtgccctcaagcctgtgacccaggctgcttcagcttctgatgagcctacatgcacgttcacgcactttgaagacacagaattctagaaagcagcccgaacactgcggccataagcttctatgccagctcgttcaagggggtcccaggaggggccaggagactggccggcgtctcagcttcctacgtccgcatgggcaactctgattccacccgtggtgtggtaggaagggaccgaggcgctccagtcccgggagatggggacgcacgcgcgacccctgggcactggggattctaggccccgaggccggagcggcggagggggcggcccctcccacagggtcttcccacccacagggcacccaggcgcagcggagccaggagggggcttacccgcgggcagggacggagcacgccggggccctggaggggcgacgctcgctcgtgtccccggtccccgtggcccctccgcggcgcctccgcggcccccagcgcgcgcccgcccgccctgccgtgtcaggtgcgcaggtgtggcaggtgtggcccgggcgccaggtcgagtcagcgttagcagggccggctcccccacagcgctcccaggagcccagcggaccctcctacctgcgtgtacagctcggccaccgccatgggcaggaggggccggggccaggccggggctgccgaacgtgcgaggctcgggggctgggcctgcgccgcagaggccgggcgcaggagagaccgccgcggaaatcaccgccgggccatcttgcccaaagttttccaacggcctcctgttcccgttcccgagttggcggcgaggggagggggcagcggcgggattggtccctccaagcttggcccggctagtcggcgctgccattggccggggccgggcggctgcacctggcgggagcgcgggtggagaaggttggggcccggggcgcgctgccaggcaggaacagatgcatccggaggctgcccggcccgagtgttagctcctcaaagagcagaggatacgaccatttaaatggaagacccaagggaatcaacgtactgaacacaaagaaatgtgttaagagtccagcaaggtcatcgtattcaaaatcaaatacaaaaataagtaatggtcctttatatgagcattgtctatgcaatacaagatatttacaatattagtgaaaatataaagtatccagagattacactcgcaaaaatgcccttggcctttgtggagaaaatgtttaaaattctcttaaagagcttaaaagaaggcccaggtaaacgggagacatgccattttcctggctgggaatatttaatatggtcaaggtgtcacttctacccaaatcaatatatatgcctaatatattggcgtcagaatcctacagaacttttggagaattgtacaatgattctatatttcatatagaataaaagccctgtataactaagacaattctcaaagaggagagatttgtcctgccatatatttagggacataacaaagcagtagtcattaaaacagtgtgacacttgcgtgagaacggatacgtgagtaatggaacatgctggagccccccagcagggccctacattatacggtagccttaaggaccagatagggaaataaaataatatttattagatgggcccgttatatggaaaaacaataaaagcagatccgtggcaaacactgcatccaaaaataagctccagatggattcacgattaaaacttaaaaccgggaaattattaggaataaaagagggataatatctttaaaatgttgggttatagtagtttccatatagaagaattgttaatcggttaaagaaaagaaatccaatttttaaaactgacaaaaattaataggcaattcacagatggggacacttaaatggcttgttagcatacaaggagatgtcaactttagcagtaatcagataaatacaaatgaaaacaacaatgagatattgctttttacccatcatattggcaaaaacatttaggttagacaatctcagatactgcctaggatgtgagaaaataaaaacttggccgggcgcggtggctcacgcctgtaatcccagcactttgggaggccgaggcgggcggatcacgaggtcaggagatcgagaccatcctggctaacacggtgaaaccccgtctctactaaaaatacaaaaaattagccgggcgaggtggcgggcgcctgtagtcccagctactcgggaggctgaggcaggagaatggcgtgaaccccagggggcggagcctgcagtgagccgagattgcgccactgcactccagcctgggcgacagagcgagactccgtctcaaaaaaaaaaaaaaaataaataaaaaaaataaaaactttttttgcttacataactggtgggaatatactgccatcctggagagcaatttgagaatagttatgaaaataaatgtaggcagaaaaattctcacagtcacccaaagagacagttaagtagatgttcatcacaacatagttatttatcaaagagttggaagcatctaaatatcaataggggaataaataaaatagtatatacatggcagacagcagagaaaaataaaaaaagaaatagtatatacatgtaaaactctacagctgttagtaggaatagacatgatctacttgactcagaaataaaaaacaatgttgaatagatgtctagcccaagtctttaatatttaaaaactcacaaaaactgcaatactgaatattgttcatgggtacaagtatgtgtgaatagaggtaaggaggataaattacaaagtcattca

SEQ ID NO: 1242225 - DNA, 4001 bp, Homo sapiens
gaaatatcacagaaaggatacacatgaagctggaaatagtggttgcctctaaagaggaaaaatgggtggctggagagtgaaggcggaacagaaatttttactacattactcttccgaaacttttggcttttacgtctagttattatctataattttaatgtgattttctcctgttactttaacattttttactgtgtgtgtgtgtatgactacaaagacctctttatatttcatctttataccaatattaaaattacgtactgatcatttgatgcaacattacatttctttcttgacaactcaggagctcaacttctacaaacattttattcaacattttactgctattgagaaggctgttgttggtaatgacctcagtgaacactgcatgatttctgtacttgcttcttggagaagcaagacagcagcaccaggcaacagaagtttattattaaaccgacatcgaagcattcagggattaaggaatgctacaaatcttatttttctagcaaatccaaaaaacagtgaatccaaaaaaagtcccctagtatcctttaaaaataaaaataagaaacagttctagtatctgcagcaatcgacaaggaggtgaagtaatactacaagacgacatagttatatccactagtgcaacgtgatttaatccttacagaggtccctaaaacatcagtgctggacaacctcacacgttctacacagaacagacaagacgaggtgcaggctctgtgaccttataatggcacacacacaactggcctcatgcttccataacttcactctgcctcccacttttttcagcccaacccctccaaacatgggtctcggtcggtccccttaagccacaatggagggaatacattaggctaagcaaatattccctcaggatttcatggcaaagccctttcaaccaaagaaaggatcgcgactaaggagaaagataacaaggtttgcttgaggagaggtctgttgagagaggctacagtcggtggtgggagagaagccaaagtctgtgacggtgtctagagggactgacaccacatctaccgggagtaagaacaccatgacagcggctatctgaaagccgtgatggctagggttagtgctagtcggcttggtgatgagcgagctgggaggggttctactaagaagagtagggcgaggggcacatgggggacgcaatgggttagggggcggtcgagactttgcctgagaactgtaatcacgtcagcccaagggaggatgtaacgtagtctagaagctccattaagagtcctaagggactctgaggggtactaatggggtctgctgggttggggggaccgtgacagaatctccggggaggctggagggccggaatggtgcccggccaatggaagatacagggggtggggtctactggggatccggggccgtgatctggtgtttgggaggctcggcgcagacccgctcgcggggcgtctccgctgggacggggcggggcggcccgaccggagccaaatagcgaggctgagacgtgggccaggacgggctgcagggccgctgggcgcttgggcgggtcttacctcgggctccgccgcggtggccaccgcagccccctcctcttcgacggaagctgccttccaccctccgccccagggtaggaccggagatggcagaagaggccgaggccaccgagggtcggacggttccgggagggtgggcccagcagcctcagggtccgggcgagcggccgcggcgcatcccccgccctgtcagagagactccgcccggcctgagcaggcacatcccccgccgcaccccgcccagagagcacgcgttggaccgccgcctcaaccgctgccagcggccgcctctgccggtgcaactactgcctccgccgccgcctctcgcagtccgggctgtcctgtactctctcaacagacacagccaaccgccgccgcgtcccttatccgcttcggtcgcgcgcccccgaccccgcgcacgcggccccgccccgcgcgactccccggctgcaggcgagcaggcgcgcgcgcacttacctcccacgccccctactgccagcacgggtcggccccgccctgtcccgcccccgcacgtgacgccactggagagtacagcgtgcgcttgcgcagacacgccccctttcctacgccccaggcggccccgcccaaattttttcttcttcaccttacggcagagcagggaactcagctttagattctccctgtactggaaagggatgtcgcaaggttggggacgaaacctctgagtttgcgaccgtagctgtcgctttccggccaacacagaggtgcctgaaggctggttggggtggtgaggcccgaggcaggtaagaagcctcctccccacttcggtttgtctcggcagtggatcgctctcccacccactcagattctggcgtatccgtgctccctcccgattctggacctggattctcagcgccgccggtcatagcccccgccccttttcaaacacgcacgctctctccacccactgccccctccattgtccccgccccgacctccgtttccattcatttctcagacttttcactgagtggtttccatgccttgggttccagaatgtcagaggcgaattaagtggtgtcagctttttgaagtgcttttgtataggagaccgtgagagaatccgcagtggtagtacaataaagtgacaatagagaaaaatgcacgggatgctgtctgcgcacagaagaggggtcccaggttgtgtaggaggataacgtgaggaagccctttccagggtgacttttgggtcacttttagaggactgtgttaaaagactagtaatccagtacctggtcaaagaaatacgaaaggaggtaaaagcagaataacgggcgcaagagcatgtgacagtggtggtctgaaagagaaaaaagaagtaaaataaacctgatggaaaccgtactagtgtagacttccctttaaagaagcatcgttataaagttagagaaatgaggaacgagaatatggccctcaggaatgttttctgtttaggtagaagactcaaaagcgtaccatgaaaccgagaagtggcctcttcgagggtgagggaggctaatttataagatcaagatcactagtggaacgcaaccttgtatgtgcatttgaatcacctgggaaactttttgttaaataaaaccaatactgttgccccactctagaccaattaaattctgggttgtgccaggtgtcattactgttttaaagctccacaggtgactctaatgctaaagattgagactcactaaactagagagaaggaagttgagacagttggctctgtaacattaagatggaggtcatttagccgggcgcggtggctcacgcctgtaatcccagcactttgggaggccgaggcgggtggatcacgaggtcaagagatcgagaccatccaggccaacatggtgaaacctcgtctctactaaatatacaaaaaattagccgggcgtggtagcaggcgcctgtagtcccagctactcgggaggccaaggcaggagaatggcatgaacccggaaggcggagcttgcagtgagccaagatcgcgccactgcactccagcctgggtgacagagcgagactccgtccccgcccccagaaaaaaaagatggaggtcatttaactacagagaggcttggagatggaatgagaaacttgagcggcgttatgtttggaataactggtctgggaaatgggagaaggagccactcttgcctttctcttcagcactgttcattcctcagtgtttatcaggtccaaattagttacttgtctctttgctctcccgttcccttccgtccaggattggtcagctgttgtctccagccttaaagctcaaaggccatccccacttctgtccccaaaatgatcagagctaagccaatttatgagatgcagagaccaacatccagagctaagccaatttatgagatgcaaagacca

SEQ ID NO: 1242226 - DNA, 4001 bp, Homo sapiens; identical to SEQ ID NO: 1242063

SEQ ID NO: 1242227 - DNA, 4001 bp, Homo sapiens
cactcttttatattataaatatgttatatgtatattaatagatgtcacaagacatctattaattttgataaaatgtagaaacttaagggaaggaaattatttttgttttttattcccatatgatgtgattacagacaatcttactgttttgttttgtatacttttctatatttgtgaatgtttttgaaataaacatgagttacatttaaagacaatagaactataaacttcacaaatttaggagtaatcatgagtagcgatttttcccaccctattaggggaaatagttgtatctgtatacactgtaaaatagagaattgtctcattcccaaccatactgctttgttaaaatgataaagtacacttttccaaaaatgattgtatcacaagaatctttaatgtttactttaaagttgactcacggtggggttgtatatgtgtttagtaaagtgtgccaagtgctcacactgagaccagtccagttcaaattagtgtactccacgagggtgttttctgtgcccagcaaggtcatgaagggccttgacttttcttggttaggccggctttgctggtgacttcttccaaactctgcaggagcagtctaccccaacacacatcatcagtcccatataaaagaataagatggaaactttctcaatgtatttcatcagtttagcacatctctggtacaaaaatccaagaaaggtagcacaaaagcgaaagcaccaaccaagcttacatataaacaaacatgcatacatcctaaatactacacaatagtacccaaatgaatacaacattgcattaaaggtataaaagcactgtactgaaaacttaaaagttacacgtgaatactgcactgtaaatcctgaatactataatgacccacccccacccttccacagccctggtgagggtcagaaaccattcatctgcctccagactttgctagtcctcagagacactgctgcgagggtagtgggcagtgggattagcctcccgcagagctctggcctcctccagagcttctctgtatcgggagggccaggcctgggggtctttcttaaagaccctggccaggaactccatgatttgcatcttggtgatttcgcggctggcccgggagccccaaaagaactcgtattcgggcggctccacgtatgggacgcgctggtacttcaggtaattcatttggacgaactcctcagtgatgagcttccgcacgtccccgaaggtggagtgcttcttccagggccgcagccccaggatgcgcagcacgttccagacggcgctctctctggcgccgcggcccttcacgtagatgaggctcaggatcatgagcaggaggcctgtcatgggcatgcggttgctcagcgccaccctgtccagctcctcgggctccagcgctttgaccagcgcaaactccatggtgtgcaggctggttagcctcaggtgcagcccgaacacccgggcgaggatgaggctggtgcgccggaggatgctcctgcaccacttcttgtagctgccgatgacatctttcaccatgtctggaaaccagatgatcatcttcttctggtccttgaccagcacgtaccacatgagctcgtgcgccttctgcaccagctgcgccggggctggcggtgccgggcccggctgggccgcgctcggggcctggtgggcgcggccctcctccgcagcctgctgcagggccttcgggtcgccctcgtcgttcggggcctggggaggcggcgcggcctgcggagcggccgtcgggcctagaggagggctctgcggctctgccagggtcgcggacggaggaaccccctccgaaaccccagggctgctgtgcacctcggagttgggggcctcggctgcaaagttagggtcgctcagatccttactttgttctgacatgtctgcgccgtctggcaagggcagggcctctgcgtccaggagctcttcgagcctgcgctccctccgcggattcctggagaggaagtgcgcgttgctgcgcgcggcgccttccgcagcgacgggcagggcggggcggcggcgggacgcggcactgcgcctgcgcgaccgcggccttggccagcggctgggggcgggcggggcagcgcggggccccgacggggagggtccatggcgaggcttcacctgctgggagagcgatcccggggtttcctgtttgggctgagaagatctagggcaggagagaagtgagatggatgcgtactggagaaggggccagtttaagggaaagataccttaagtttttgggatgttggggtcaagtttcttgggaaacgcttacctgggtatatccagaattaagttaaatatgagagtcccagagaaaggtctgggcggctttgtaaacatgagctttatgcgaaccagtgagaggaacagtcgggcttgtccaagaaaatgtgtaaactgtaaagtggatgtctgaggttggaatcctgagaaattccaataaaaaatgatcgactccctaccaaatcagataggctataagaaaaggggaaatgcagtgtgtcgttaacgtaatttcctatcaacccatgtgaactatgaactttttaagtaggcagtggacttagagcatcattaatgctttaacgggcataaatttgggttttacacttcctttgggtaactttgattccattttatttttttccatacttagtccatagcagaaggattgctatatcttttagcacaaacttgtatgataatgtcttttccctctgcccagcaccctcattcttcaattcaccttctctcaggaccctctctgaagctactgagtcctccacgttggaagccacacccaagtctttcctgagatttaaaaaaaaaataggtcccatgggtaatatctggtagtgtctctgagatgaccaaagggtagcaggggaaacataggtaaccctgttttccaggtatggaaaacagattcccagtgggcaaagacaaaactgtcactcctacaggctctccatgaaaaaaagggtcattgcctgagcatctgaaaccagggaccttaatgctgcttcagcatccttggtctgggctgatgtggtccttcagctcttcccgggtttcttctcatcagcagcttcttaaatatgctgtcttgaatctagttattgccactcgaagccaaaagcatatttaaaaattgtcttgacatgtctagagtcctcactgtgagtatgtatcttttcccactttatttttcctcaagcaggttgatgttgaaaggttttctgtgctttctctctttgggtttgcacgcacataacacttttggcagagccattaccacaccagtccctccaacaggactcttaagcttcccacttcaccagggtaattcctagatatcagtcttagttggaattatttcaacacttttctcctcctcctcaccctcctccacctcctccttctcctctccatctacttctcctttttctccttcttctatttatagatatctaccattttcttgggaacatcttacagaaatatgctaattatattcattgtttttaagaatgtctcttgaacagacttattacccccatgcttcataaatataatcctcatttattgcatttaaatctccatcaatattattctttattttgtttgggtatgtattattttctaactatttaaataaaatatttaggccaggtgcggtggctcacgcctgtaatcccagcactttgggaaggtgaggcgggcagatcacctgaggtcaggaggtcgagaccagcctggccaacgtggcaaaaccccgtctctactaaaaatacaaaaattagccgggtgtggtggtgggcacccttaatcccaactgcttggcaggctgaggcaggagactcgcttgaacctgggaggtggagtttgcagtcagctgagagcatgccactgcactccagcctgggcaacagagcgagactgtctcaaacattaaataa

SEQ ID NO: 1242228 - DNA, 4001 bp, Homo sapiens
gactaaaaccattttacaggtcaagaaacatctgcatacaaactaaggaacctatgtaaattcatatactagttatggtggggccaggatctcaacccagacagtccgattcccaaacaggcatggttaatggttacgctattgttttataagcctttttgagatccacagtgagaaatatatttcacctcatgatcctgattttgtttcacacaaaagtgaaacaacttctacaaaacagcattgaccttaatatgtagcaaaaactttaagatgttgatttccagtcatgaaattctctcatgacccacgatttaaaaaacacacaatgcttaagtgcttcaaaaatacagtatttattgtaataactacagtagcaagaagaaaaaaacgaagtggaactacgtgtttagcagcagagctgaataattatgaatataaacaattactattgggagaaaatacattacactcattgcttggaaccatgaataatacttatatatgtacgaaatatagaaaaataaaataggttaacataataaggatataggcaattattttttttaattttataaaaacttttatttttccttacaaactggggtagttaggagacctgataatagcttttttattttcttggcaccaaagcaacttacttatgtgttccttcttgcattatctgttccagatcatagtcaagttttccaattcgttttactaagctagcaaaattttttataccaaaaagagtaaaatcaaaacaaatgctcctttgtttatagatgaaaatctggagcaaaataacacaacattaaaaaaacaaaactttgcaaacacatcctaaagctacacacattgaagcgtttacagcaatatgctccctgggttcgttctcccttcccccaatcctctaaactgtgcctttgggtctcagacccttgtcccgggggtccctctgaatccacctttcaagaggatggagctgggccactaggctgaggtctggccctgttctcctcatctgccaaagcctcacagtactgcgctggccagtccttggggtcttgattatggaccttggccacaaacttaagaactttcatcttgctggtttccaggttggttcgcgggccccactggaattcgtagtcgacggggtcggtgtggggtatccgccggtattccaggtaacgctgtcgcacaaagtcctcagtaatgagtttctttggatctccgaaaattaaatgcttcttggtggggtagacccctaagcgccgcagaaagtcccaggcttcagtttccttgatggtgttgcccttcataaagatgagccctaagacgatcatcaggaggcccgtagtgggcgtgccttggtcacccctcatctcggcatcctcctccacaggctccagggtgttgatgaggatgtaagtgttgctcttgggttcaagttccaccagcttatacccgaagacgtactggaggcgctcggcggcccgtttgaagaggtcggggaagatgtccttgtagtccccgatgacgtgcttcagtatgtcggcccgcttgatcggaatcttcttctggtctttaatcagcaagaactgcaccagctcggacactttcagctccagctgcttctggctcctgggccccacggcgggggcggcctgggcccggcgggcgccctgaggcgaggggccctgcgacccctgcgagccgcccggcccgcgggacgtgctcggggcctcctcggcaaagccgtctctgagaacccgggcgtcttccccggcccgcgaagccccggggtttccgctatggctccagtctctgtccctctcggcctggccgccagagcggccccggttcctcggtttttgcaacatgtctccggcggcaggtgccggcgcacactccggtaggcaagcagccgcggcggggattgcgggtcggcgacccgctaacgccggtgcctggaggcgcgcgcagtgtcggctgagactgcgtgctgcgtcatgaagcctgcgccttgcgtcagggcggctgggcggtgcgcctgcgcggctgcggcgggtaccaaaaggaacagcgttttccgtgcagccctgcaggtccgggcgatgatttttagtatagtgaagtgttgttaccaaaccatgcaaacagagagcgagaaccgaaactcctaaacaagtgtgtcgctaaattcagaccacacaggctcaggcaagttttacagacagtattatgagtttctaaatcgggagcatttgtaaacggaaagaattcagaggatgaacgtgtgagaaaaaaaaaaggtgaagaggaagggccgaccgtggaagtaaagtaaaaacatttatttctacacaaaatgtagaaggacataaaagacccagagggctcttagttttcgtccctccacccaatttcataccctccatcccactgcccccagttactttctctaatgccccgtggagtctgttaaaaaccaaagtcggctgcaggctttctgcgcaagcaggacttcagtttcactatttccgtatttatattctctgcattaaactcctttagctagacaactatgagaagaccacaaaaaacgtgtcagtattaggtaaatgttttagcttggtcacatgggtttatcttttggaaaacaactgctttcgtcacaaccacaattttagcagaaatgggtaagaggaatgctgcaaacaaacgtgcactctcaagagattactacttaatttggggcatcactgatcaagaattgcaataatgtggagctcttaaatttcttaattcataatatattagctttgaggaaaaaaaagagaacactgggggatttatctctcatctatgatgtgatatacagtctctactgtatattttaattgtgcaactcaagtagccaaaatgagtcatttcattaactcaaaccatcagcagtctgctgccatgacttctacagatcttagcaaatttgtttcttctctatttacttgcaaagaagaaactgaatttccctgtgtctttttaaagctacccagaaagtggataaactcttcaaagaaccaaattgagttcctctttaatgcaaatatattcaaaggaaagcaatttagaacacattatctgagtaatagcatcaaacacaaccttattaaaattttgttaattgttagtagcataacacttttgtttgtaattcagtaggaaaatgcaatctgataatggcactggaactgcaatagtaaatgtaaaatcatattccatgaactaatgcaagtatgctaaaatctggtatgcaatgagtaataacttactgttccacacaagatgcaactatatcctcaggcatcaattttaatgacaaaggcctactatgaaaaacaaatatattatcaaggcattcatttttttacaatgagaaaattcatctgcttcagtttccttgcaaattaaaatctggacttaggttcatagaagcttcctgccatctagaattctgcaaaaggtccctactgcaggatgtggatgttgtattgagggaatagagagaccgtctcatattgttttatattgttttatactcagtacctgttttaagaaaaaacaacaaggaagtaaaaccaaatacaggcagcccagcgccaggcccaaaaccaggcctgggcctgcctggcctaaacccagtagttaaaaatcaactcataacttagaaaccgatgttattcatagattccagacattgtatagaagaacattgtataaagaacagaactgccctgttctgtttctctctgaccaccggtgcatgtagcccctgtcacataccgcctgcttgctctgatcaatcacgaccctttcatgtaaaatctttagtgttgtgagctctttaaagggacagaaattgtgcatttggggagctcggattttaaggcagtagcttgccgatgctcccagctgaataaagcccttccttg

SEQ ID NO: 1242229 - DNA, 4001 bp, Homo sapiens
cctctggagtacctgggattacaggcgtgagccactgcacctgatgaataccactcctaatacttttttttttcttttttgagacagagtctcactctgtcacccaggctggagtgcagtggcacgatctcggctcactgcaagctccgcctcccgggttcacgccattctcctgcctcagcctcgcgagtagctgggactacaggcgcccgccaccatgcccagctattttttttttttttttttttttggatttttaatagagacagggtttcaccgtgttagccaggatggtctcgatctcctgaccacgtgatccacctgccttgttctcccaaagtactgtgattacaggtgtgagccaccatgcccagcctactcctaacactttcatatcaccctgatatatattatctcatgccatccacacacaaatcctatgaaacaagtcagatacgtatttcctttctgtaggatacagacaccaataggtaaaatgacattatcaatacttttttttttttttgagacggagtcttgctctgtcaccaggctagagatctccgctcactgcaatctccgcctcctgggttcaagcgattctcttgtctcagcctcctgaatagctgggattacaggcgggcgccaccatgcccggctaatttttgtttttgtttttgttttttcagtagagatgaggttccactatgttggccagagtggtctcgaactcctgacctcaggtgatccgcctacatgggcctcctaaagtactgggattacaggcgtcagccacggcgcccaacctttttttttttttttttttttgagatggagtctcgctctgtcacccaggctggagtgcaatggcacgaccctggctcactgcaacctccgcctcccgggttcaagtgcttctcctgcctctgcctcccgagtggctgaaattacaggtgcccgccaccatgcccaacttttttttttttttttttaagacagagtccagctctgtcccccaagttggagtgcagttgtgcgatctcggctcattgtaacctccacctcctggtttcaagcaattctcttgcctcagtcactgggattacaggcgtgcgccaccacgcccagctaatttttgtatttttagtagagacagggtttcaccatgttggccaggctggtctcgaactcctgacctcaagtgatccgcccgcctcggcctcccaaagtgctgggattacaggcgtgagccaccgcgcccagccgacattatcaataaggtttgttgataaatcaaaaccatgtaaacagtatgttttcacatgtattataaacgttaagggaaccaggaaaaattaacagttgatctgaggtcccggaattatggataatatttaaattcccccgcgccggttgcacttaaatgattttacctctacacataccgaaatttgagaaacaaatgatagctcataaaatgttttccaaaccctccgtagtgttacttctctaataatataactttaattataaatgctttgtttcatttttttttttctaccagtaaacagaaaatctaaactattaactggacaataccgccctgaggttgacggtgggttttgacaacacaatccacgcagctagaagtgagtagaattagtaaagctatccatgccttaccatgtgccagaaactgctctaagtgtttcactgacggctcacaacaatcctgagagaggtactattattatttcaattatagagacgaagaaactgacgttccaaggctaatttacccgaggtcacacaggtagtgagtggcaaaattcttccgccttggcgtatacctcccgcactcacggcctggcctccggaggctagacggttcgccgcgctggggaggccccctcaaccctcaagtgccagggctctgtcgcctccccacacccgggacacaccaaccgccggcctgccgccgcttacctccccgagcctatagtgtaccttccgcccagaagccactttacccgtataggtccatctgcttttcccttccgatgccaaacaaggcgtcagaacaccaaagttccggccgagtacagaagcccaggaaggacagcaaggaccccgtagcccagccaactgaggtttttggaggtttttggtccacttggtcgccagttgtaaggaagcagtgagaattcagataagtttttcgcctctccttcctgtatcctttcaggcggcaaactccatccctgcgtctttttttttttttttttttttgagacggattctcgctctgtcgcccaggctggagtgcagtggcgcgatctcggctcactacaacctctgcctcccagattcaagcgattctcctgcctcagcctcccgagtagctgggattacaggtgcgcgccatcatgcccgactaatttttgtatttttagtagagacggggtttcaccatgttagccgggatgatctcgatctcctgacctcgtgatccacccgcctcggcctcccaaagtgctgagattacaggcgcgagccaccaagcccggccccctgcgtctttcaaatagaacccagttattgctaacgcgcctgtatcccttccttccttatctgtcgcctcggtccccacaagaactgcctgaggcctcaaaaggccgattctgctggaattgcccccatgaattcttgaggaccaccacgcacctggacagcagcccctcctaccagcccttcccgagtctcgccccacacggtcgccagttgctcagggcatctgtttgtaccttgtgcacacctctcttaaagcactttttttttttgagacggagtctcactctgttgcccaggctgtagtgcagtggcgcgatctgcaacctccgactcctgggttggagcaattctcctgcctcagcctcccaagtagctgggattacaggtgtgtgccaccacacccggataatttttgtatttttagtagagatggggtttcgccatgttggccaggctggtctcgaaatcctgacctcatgatccacccacctcggcctcccaaagtgctggtattacaggcgtgagccaccatgcccggccaaagcacttaaacattgtttgtttttgtttttttttcttactgccagggaagacagaatcaacattgtatctttcactcacttctcacttcctttgccacgctgtgagctttcttgggtccagactgcgctgtttttcctttccccagaatgtaccatagcggcgggaatttagtgcttagtgtgaatttgagagcatatagttccgtaacacctttgttctctaaggttccgaaggagctcactaaatacactagccctttccatgttttctccttcactagtttccgcgccgcctcctcttcctcaaattcggcttggcttctctagactctacacttgccccctcaaaccttacctttctgcccccatcactgactcttctattctcttcccacaacctttaatgcgggctgtctctccatggcccatcctgcctctacctcttttctagtttcaaatataagttatcggccgggcgcggtggttcacgcctgtaatcccagcactttgggaggccgaggcgggcggatcacaaggtcaggagatcgagaccatcctggctaacacggtgaaaccccgtctctactaaaaatacaaaaaaattggccgggcgtgctggcgggcgcctgtagtcccagctactcaggagactgaggcaggagaatggcgtgaacccgggagacggagcttgcagtgagccgagatcgcaccactgcactccagcctgggccacagagccagactccgtctcagaaaaagaaaaaatcgaaatgtctttttgttgttgttttttaggaaatatccttgagcaataaagaaaactaaatgtctaaaactaaatgtgtcatttttcctcctactaattcctcctgtctccctatttctgta

SEQ ID NO: 1242230 - DNA, 4001 bp, Homo sapiens
atttacaaatataaaatttatgactacaaaatactgctagctaaggaccaggaaaatatgtaaaactgcttggttacaataaatgttctccaaatatttcattaagttattctcatataaattaacatttaccaagaccaaaggaaacttaccttgcaagaattagacagttcatttgtgcaatctctgttgctgtctcttgataaattatccactttaccttcatttccagatgcaaactttatgagtaactgagatggtccccctttagaacaattgtgcttaaggctggatagacaggaaatatttggataagctcctcccaatgaaatacttcttcgtaaaataccatggtttttgttcatctgtgaatgtggtctttccaattctccattgatatttatttgacaatctacattttgggaggatggcaaacatgcagatgtcctatgcatgagcttaatatactctgaatcagaattaagcttaatttctgacatttctggtttacaatcaccatttgttgtttcacagtctaatgtagctgcttttcgttgggtgaaatgcactgaaacacaagaatatccttcagatgacttttcacagacagtctgtctgggagtattattcgaaagaacaattttcttctgtaacgagcccttcctgtgaagcggccgtatgtctcttacttctccgggggtacaaattgttttagataaccgaagtccattgacagctgttgaaagaaatcctttagcactagtgccatcctcattatgtgcaatttcactaggagaaataataaactggtgtgaagtttgataggatcctttgctcagaagagtacacagacttgttggagaagtcggtcgggtagttgaaggactcctaggaaaaatgactaaggaggagtaacgttttagtggaatttttgtgttcctgctcactggcaatttcataatctctaatccatgttccaagtcatcctggacaaaaggatctgtacttgtacttcttgaaaaaatttcacaaggagtagtattcctgtttggcacacttctattggaggtgctgtcagaaggtaagtttccacccaaaaaagtatcatcacttggtggaaaagtataactactactgtcactgatgacactgttagtatatgaacctccacttgtgatacttgcacatgacccaaaatcactaccgttgctgctgtaagacccattatcactggttgaaaagttactaaggctaccactacaaatggctggactgcttacaaggtgaccatcattcacagcattcaattcattatcgaccacagcactactgtaaataccatccttcaagatacaagtaaacgaagcatcatcactatcagctaagacattgctagactgaagatatccactgtaccttgttggctgtagtgaaatctgtagacagctgctctttttattaacattttcagatgagggaacagatgatctttcttgagactgaacgttttcctttattaacggagctagtgcagtctgtctgggagtcagcttcatttgaacaacgttagacgttgaaatccgtgttggtcttttgaagcacatgtgaacatggctatccaagtcatctccggaggtttctgacaaagggtaagtattgcttcttctggctgcaaagtgcaatcgtaagctttgtgccatttgttctcatttccaaacatgttaagggctgaaagtcataacaaagatctctgtccgtagacaggctagaagcagctgcactgcatcaaaagaaaaaatcatttgtggtgcctaaaagagctattaagtagtagtctttatcctaagtaaaacattagataccagatatcatagaaagaaaaagacgacccattccagagactgacgtttccaaaatgtcttgaatcgcttgtagtcaaaatgccttcacttacaaagcacttgatttccagcgacctttaagctgagctcagctgcagcacactgactcaaacacagccaaccttgtttcaattataccttctccaatttgcatgaatgagtaacacaagaacaacaatcttctaacatttcaagttgaaacagtattttttcaccccagctctactaaatgaacatttaactatgtgaatcacagtgcctatactttctccagccgactttgcccactaatatttttacccataggtatagaattacaggaagttggtaggaacaaaaccccatgtaattaagcatcaaatcaaagattgaatttccaaatagtagccatactaggaatctagtcaagttagttaatatagggactgttaattttttttttttaatgtgtgaattcaaacagttaggtaaatttggaaataccaaaactttacaatgaattaaaactttagcactacatcaaatagatacatattttagcttccaaagtgctagttacataaaaagtgaaagcttaaggacagaactacaaaattaacctagtaataccattgcaaaactgaagcataggttcaagaaaaaaagtttaagagaagctgtcactaagcattttctcctgtaattttaaggccttttccagccaagtagaacagtctttaaatgatgccatttatattttgactattaaaactgccaagaaatagcctaagcaaacattccaataaaaatatatgcagattagaaaaaaaaaactataccccaagatagtttgaacacacaggatattttattccactgtctctgcaattcattcacttaagagagtgttgtggtaagtaaagaagtctaaaaaggatttagcacatcaaataaacatgtctcaatgccaattctgttctgaaaaactctaagagctctttgctggcccctgctggtactttgaaacaatccatttagctgtttgatatctataaagaaatacaaaccaagctgcacatttctttatataaacgaagtacatacttgtttacatttttgagagctagccctaccctagaggtggaattactcaccagtgctgataaagctcccacagtagagaacagtggactgtttgtccttttagaggttgtgattttgtatatatattttttctgctttgtatttatttaacctttattttcagtttactaggcaatcaaaatttaatattttaatttctctctcaaatgccatagaccaaggttggtattctatttgaaagaaacaaatttatttttaaataatactctagggtatatttaaacccctcacctaaattttatagctggaactccagtaataaatatatactggctcattcataggaaagtaaaaggtaaaatagttccgttgtttataccacatgctactacacccaagttgtattttgctaagtaagttttttttcctaagtaaaagcaaatatgtaaaacatatactcatactttgttaaaaaaaaaaaactgcttaagatagatctgtttttgatcagaattttctaaacagatttttaatcaattaagacacaaaacagaattatgggaattcattgcatttcatttgactagaatgaaacagccctgtttttgaatgcgtacaatagttgaaaacttagtaatacaattattatgttatttttgcttttgtataaaccacctcctttatgattttacagacttcagtcaatattctcttaacatctttttcttttaaataaggaggagtcctgttttactctgccttcaaatgacttcagcgttctttctgggattaagtgtggggtctaataactcaaagaatgaatcccttctaataggctaatcaatgagatctaattgttcatgtctgtggcctaaaacttccaggaaataagaaaagctcctctcattattaacatataaaataatgaactccaagtatttggtcagataaatgtcttctctttggtaagcttcactataagcatcagttccatgtcccctaactagattttaactt

SEQ ID NO: 1242231 - DNA, 4001 bp, Homo sapiens
aaagggtggagtttctggcctttggccccagttccttaccgaccacccattaactgccacaattagttttatttcagctgggcagaggggtgatgattgaaaacagagaaattactaaagtagataattaaaaacactgatcatgtaccaagagggagaaaacagatggtgaatgatacctttggcactattttctttaagatcaactggctctgctggaaggcggtgagatgagaaatctgcaattagcagggcctacctgtgaatatagcagggaaagaaagtccaaggtcagcctgattgggttggacaccaccttgaagtcaactgcactgggcagtctacgtagcaagcagggaaatctgactgataagaaagcgaccacaggtgaagtgctgtattatcttctgatctcgtctacagaataaaggtgccattagctagaatgatatctttagctgtaacacattgactattgtttctgagggactatgagccgccaccatttgtccatcatcactttatttctcttctggcagcaatagctaggaaattaaattctaatcgcatcacgtaagcattctcaaaatatcctgaaataactgcattaacaaattgcccaccctttataaacaaagaactctcaagagaagtgtaaaatgtttgacgacaccaaggtactaagagaaggaactatacaacttaaatattacaatacttaagcaagcagtataaattaggttgatggattttcagttaactgggtctcatcttgataaaaggtacatgtggcagcttagtcagccaacaagaaagcaaaaaacttgatttttttcactcggaaccagtcactgttagactacatgcagccttttcatctcccacccatttgcatttttgagacaatctccaagaacacacagaagccacatatcatttacgacggaacaacctttccaaatggtcgtacaatatttttaataagcataggcataatcagcattagttatttagctgaaaagaaacagctttgccttcttcaaatcccagagcttaatctagttttcaaagggaacagatgtggtaacttctttataaagtatttatacttttttggcttcactttttaacatcaacgacgaccggtgaaataaagcatgaacttctcacactagacacttgttgctaaagaggaggaggaaaatttatgttcctgctctcccatccctgtctctagttaggggattaaaaaggatttcagataaagaagaaaaaaacaaaccagcgaatgacaattcacttggaactctccagaccgaagtccgtaaagttaagtcggcccggcctccgccagagcaagcaaatcaacagcggggatgctgcgaccgtctcccaacgcctgggagctccgcacacccggcgggggtggcaggaaggggctggcgcggtgatgtgggtcccccgccgaccgcctagccccctcctcaacacttcctgaaggaaactgacaagtaaggcggcggccgctccgggaaggggcgggtgtggacccgacaagcttgctccctccagcgagcccccagcgcccgcgcgccgagccgcccccacagtccccgcggcgcctcgcgcgctccccaggctcgcgccgagggaggaggggctgacagcagagcctccggtcgtggccgccgccgctacctccccgggtccggctgctgaataacccgaagggaagcccgccccgcagccccgcggtccccgcacctcgtcctccaggagcccgaacacctccaccgcgcaagttgccatttccgaacgcttccagcaaaccggacgcgctcgcccccgcccagggcaggcaactgtggaggaggaggaggagaagcgggaggaggcggggaagagttggaggaagaggaggaggcgctccctcagcgacagcagcgcctcccgcggcgagcgggcactagcggcacccggcagcgcggcgggaaaaggccggcggcgcgcgctcctggggctgggcgggggcgcgcgtggcggggctcggggagtggggagggcgtgcggcggggctcgggtgggatgagcgcgcgcggcggggaccatggcgtggggagcgcgcgtggcggggcgcgccctcggtcccttcccgggaggtgggtggttgacgggcccgccggggagccagggagcgccgggaagcgccgggaagccaagctgcagtgttcctcagcaacaagtctcgctgagatccgacccagagttcggcctctgactagacgcctgggaatccgtgagcttaatccccgcttaaatcccaaacggaaaatcatagcgctttcttgtcggttaagggtgtcattcccataagaagctggacctggggaccgccagggaaagcctgagcgtggcagcaaatggggaggcctggagggatcgcagcagtcttggactcgggatctgaaattctctccctaggatttgtaaacagtgccagttcctaagctatttgttgtcctatggtctgtccatctttaaatcccaccagtaacaatccaatctccaggctgaccctctaaacctgctttagctgggcgttgatccgcagcaccaccagaaggcagtgacgaagagggaaaaataaagtgaactaggacctcctgtagaataactcctcctgtggaataactcctcctgtggaataaggttatggaataatcatgctttttaatattcctgtctgatgggctttataattccataattacaggaagacctccaccaaataaggcatccataaaagagtctggggagaattatgaacacccaggccacaatttatatcatgttgtttttatacatttgcagaaatttgcagaattctgcaatctcaaaatctaatttttattttcctcaatgatttcagaataactctgatttatttttaacagtttaagatgctacgtgggaacaaggctatagcccatattactggtttgttacgtaagatttttctcgtacttggccgggcgcggtggctcacgcctgtaatcccagcactttgggaaacctaaggcggtgaatcaccttaggtcaggagttcgagcccaacctggccaacatagtaaaaccctgtctctactaaaaacacaaaaattagctgggcgtggtggcgggcgcctggagtcccagctgcttgggtggctgaggcaagggaatcgcttgagcttgggaggaggaggttacagtgagccaagattgcgccgttgcactccagcctgggcgacagaacaagactccacctcaattgtcgtactttatgattggtaggatccatttcattcatataatatgtatcaaaattctgttaatacacaattcagattttatccgtattagggggaaagagatggcacttaatcaaacatgactacaaaattacagaatggtcaggaattgttggcttacctaaatcgaaaaagccatgagagcattaatttgttttttaagttgtcacatatctgtgggatttgtgggttaagaataaaataatctgaaaatattgtgtgcccttctattttgcgaatatttccctcatctctcatgatacacatttttatgtttaattttaagttagttaagtcatttgaatttaagttaattcagtgtcatttcagggcacaattacaaacgtgtaaaaacagcttccgttactgctactaaaatttaatgaatatatgagaagtatacacagcctaaaactggtaattaaaaaaaaaaaaatcagtaaatccccaagggattataaagtaaagcaaattggccatttgatgtatccaataggtattagtgatgatacttctaaagaccactgatttgactcatgatttcttattctgtctttccgaatatgaaatcatgaagaattaaacagctaccaatacaagatgaactagagtaattattgtatcccggtcaacagctaggaggggcacctg

SEQ ID NO: 1242232 - DNA, 4001 bp, Homo sapiens
ctggtctcgaactcctgacctcgtgatctgcccgcctcggcttcccaaagtgctgggatttacagacttgagccaccacacccggcccccaattagttttgagtttccatgcccactggctcagggagctgacccaggacaggtatactgtcttgatctgcagatgagagaactgaggcccagaaggggcagggactcgccccttgttggccaagaaggcactaagagagtcaggtgtggagcccgcgactatgttcatcacacctggtgctggccctacctgaactgctggtactcctgcaagacacagggcccgcggcccggctgccactttcccccaaggtcccagcggccgaaccggcggatgtccacgaaacatagggcgagccgggggccaggcggggccgtgtaaaagcgcaggtgggcatggcgtggcagctcctcgcggggcaccagctgaaaagagccggacatgccgaagcggaagaccagggccagtggctcctgttggggctgggccccaggcagagggctcagtatcaggcgcagctccttgccgcgggctgaagctgagatgcggtaggcactgctctcaaagggcacctcagggttgcggctgacagaggacttctccacgcagccgccgaacaccagcgccctgcaggcctcattcacaaactggctggccaggtgcagctcggggccctcaggcatcctgagggagggtggcagagtcctgttggggaggaaggcagcgggttgagcccggtgtggactttgtgaggtagcggctgtcagccccatttttagaggagaactcggagggtcagatgggcatgtggccagctgcggctggcaggaaagtgcgggcctggccacggccctcaatcccctacccggacaggtgcctggaaagcccagggcgctgggagctggggctgcagagggagcaggactctgccttgctgctaaccgcttccttccatgggcttccaccgcgtttagacgaaagtcccaatccttgcggggccgcggctgcagccttacttcttcccggctcccctcactcacggatctcatctccgccttggcccctgctgtccctctgtcccagacacttgagggagacttcctgaccccccatctgagggagcaccccctccgcacacgctgtctctttctccaggctctcccaccatctgaaagggtcttaggatcgcgtggccgcccctccctgcgcccccctccccccacacttaggacccgcctggatctggccgctcaccaccgagggaaagagcgaagctcggcctggcgcgggggagcggcgggagcggccgaatcggccgcttggccgcagcgagaaccgggcctgccccacggaccggacatccccgcggccgcccccgggtcagggcaggggccaggacgaggcgggcgggctgccgccatgcgctggagccgctccccatggctccgcaggaggacggcgggcaccaggaagggctccccgagctcctgccccgggcctgggggagggaaagggcccgcggcagcgcctggtccctggggtggggggtatcgactcctcacctccgccctccctgctttgccacttgcctctgtccccgggcggttcggaatcggaggcgaaggtgtgccttaagtggaagggggcacttagcgacggcagacgcccgtaccttgccccctccacacctgggagccgcccctggcctggcacccacagggctcgttttgcgggagaacgtgaggctccaaatcctagttttggggaggagcggcgctctcgggcccgtcctccccatgcccccgctgcgaccctgtcctcggttaatcctgactcccctcctcctcagggccccccaaagctcatcttctccttagccctacagcgcaccccccacaacccgatcctgcacgccccctccccgggaacccgcactccgttccgctcgtcgccactgcagccactaaagggttaacgccagaacgggcggtgcccgggagcgcgctgggagccgctgggaggtgtagtccctcagggaagcggtcgcgattcttcggggtggggtccccgagcttggggggttccaggctttggggcaggcttcggggcagttacctggctgggaggtggcggaagaacctgacttcccactgcctggcgccggcgagatgcgggggcaggtctgaggccccgggtcgccgctgtctctgcggttgggggaagtcacccagctagcgtgggacagggtcggcacccccagcaggaaacagcagcgacgagccagagcggagtcgcctgcagctgcgcgcaggacgtgcacaggtgcgcggtacgcacaggccctagggacccggtggggatcttaagcaccaacgaacagtcagacctaactcataaacaaacatcatcacggcctgccctgtcagaagcgcagccaagcaacaacaacaacaaaaaaaggcgaggaggtagacccacttgagatggttctgttgcggagagtctctgaaatcagaaagcgccagtccgcaaaaacgaggaaacccgacgtgtccggcggaaggaaccgccagtacaaaggccctgaggcgagaaagagattggtcactgaaagaactcaaagaagtcctgtgtggctggagtatagctgcgggttagtgctggcaggtgaagacagagaagcaaacccaggtcaggtccggttgggcctcgggagggcctccgtgtggagtctgcacttcattctaagtgtatacctaacccatcgccacgatttcccctccttcacactaccctgctacgtctccttattaggcgtaataaaattatgtggctttgtaagaaattggtttttagagatgcatgttaaagtattgggtatgaaatgtcatgatttgtctaatttactttaaaatacttctgccataataaatgaatagaattaacaacttgatattagttgacaatatctaataatatctaagttattagaaattagttaacagtaacttctttttttgagacagggtctcactgtgtcacccaggctggagtgcggtggtgaaatctcggctcactgcagcctccacttcccgggttcaagtgattctcctgcctcagcctcccgagtaactgggattacaggcgtgtgccacatgcctggctaattttcatatttttagtagagatgaggtttcgccttgttggccaggctggtcttgaactcctgacctcaagtaatctgcccgcctcggcctcccaaagtgctgggattacagaagtgagccaccatgcccagccaacagtaacttcttaatatcatctaatagctagtccacatccagatttccccaattgtcccaaatatatatatatatacacatatagacagggtctcactctgtcccccaggctacaatcatgggtcattgcagcctccgacctcccgggctcaagtgatcctcagcctcagcctcccaagtagctgggactacaggcacacaccaccacgcctggctaattcatgttttgtaaggatgtggtctcactatgttgcctgggccagcctcaaactcctgggctcaagccatcccccgacctcggggtcccaaagtgttgggattacaggcgtgagccaccgcgcctggctggattatatctttttaataattttaaatctagatgaaaccaccttccctctcccacccacttcatccccttcttttatcttcatgatacctttctgaagagtctcagccagttgttgtttgagatagatgctgcatcacattctcaatttgtctgaatgtatcctcagggtgtcactgatattgtcacagagattggtcctctatctgtggttcatcctgcatgctgggaattagatctaaaggcttgattatataaatattcagggatacttcctaggtgctgctctgtacttcgttgttttttgttttgttttgtttta

SEQ ID NO: 1242233 - DNA, 4001 bp, Homo sapiens
tctccacgcagccgccgaacaccagcgccctgcaggcctcattcacaaactggctggccaggtgcagctcggggccctcaggcatcctgagggagggtggcagagtcctgttggggaggaaggcagcgggttgagcccggtgtggactttgtgaggtagcggctgtcagccccatttttagaggagaactcggagggtcagatgggcatgtggccagctgcggctggcaggaaagtgcgggcctggccacggccctcaatcccctacccggacaggtgcctggaaagcccagggcgctgggagctggggctgcagagggagcaggactctgccttgctgctaaccgcttccttccatgggcttccaccgcgtttagacgaaagtcccaatccttgcggggccgcggctgcagccttacttcttcccggctcccctcactcacggatctcatctccgccttggcccctgctgtccctctgtcccagacacttgagggagacttcctgaccccccatctgagggagcaccccctccgcacacgctgtctctttctccaggctctcccaccatctgaaagggtcttaggatcgcgtggccgcccctccctgcgcccccctccccccacacttaggacccgcctggatctggccgctcaccaccgagggaaagagcgaagctcggcctggcgcgggggagcggcgggagcggccgaatcggccgcttggccgcagcgagaaccgggcctgccccacggaccggacatccccgcggccgcccccgggtcagggcaggggccaggacgaggcgggcgggctgccgccatgcgctggagccgctccccatggctccgcaggaggacggcgggcaccaggaagggctccccgagctcctgccccgggcctgggggagggaaagggcccgcggcagcgcctggtccctggggtggggggtatcgactcctcacctccgccctccctgctttgccacttgcctctgtccccgggcggttcggaatcggaggcgaaggtgtgccttaagtggaagggggcacttagcgacggcagacgcccgtaccttgccccctccacacctgggagccgcccctggcctggcacccacagggctcgttttgcgggagaacgtgaggctccaaatcctagttttggggaggagcggcgctctcgggcccgtcctccccatgcccccgctgcgaccctgtcctcggttaatcctgactcccctcctcctcagggccccccaaagctcatcttctccttagccctacagcgcaccccccacaacccgatcctgcacgccccctccccgggaacccgcactccgttccgctcgtcgccactgcagccactaaagggttaacgccagaacgggcggtgcccgggagcgcgctgggagccgctgggaggtgtagtccctcagggaagcggtcgcgattcttcggggtggggtccccgagcttggggggttccaggctttggggcaggcttcggggcagttacctggctgggaggtggcggaagaacctgacttcccactgcctggcgccggcgagatgcgggggcaggtctgaggccccgggtcgccgctgtctctgcggttgggggaagtcacccagctagcgtgggacagggtcggcacccccagcaggaaacagcagcgacgagccagagcggagtcgcctgcagctgcgcgcaggacgtgcacaggtgcgcggtacgcacaggccctagggacccggtggggatcttaagcaccaacgaacagtcagacctaactcataaacaaacatcatcacggcctgccctgtcagaagcgcagccaagcaacaacaacaacaaaaaaaggcgaggaggtagacccacttgagatggttctgttgcggagagtctctgaaatcagaaagcgccagtccgcaaaaacgaggaaacccgacgtgtccggcggaaggaaccgccagtacaaaggccctgaggcgagaaagagattggtcactgaaagaactcaaagaagtcctgtgtggctggagtatagctgcgggttagtgctggcaggtgaagacagagaagcaaacccaggtcaggtccggttgggcctcgggagggcctccgtgtggagtctgcacttcattctaagtgtatacctaacccatcgccacgatttcccctccttcacactaccctgctacgtctccttattaggcgtaataaaattatgtggctttgtaagaaattggtttttagagatgcatgttaaagtattgggtatgaaatgtcatgatttgtctaatttactttaaaatacttctgccataataaatgaatagaattaacaacttgatattagttgacaatatctaataatatctaagttattagaaattagttaacagtaacttctttttttgagacagggtctcactgtgtcacccaggctggagtgcggtggtgaaatctcggctcactgcagcctccacttcccgggttcaagtgattctcctgcctcagcctcccgagtaactgggattacaggcgtgtgccacatgcctggctaattttcatatttttagtagagatgaggtttcgccttgttggccaggctggtcttgaactcctgacctcaagtaatctgcccgcctcggcctcccaaagtgctgggattacagaagtgagccaccatgcccagccaacagtaacttcttaatatcatctaatagctagtccacatccagatttccccaattgtcccaaatatatatatatatacacatatagacagggtctcactctgtcccccaggctacaatcatgggtcattgcagcctccgacctcccgggctcaagtgatcctcagcctcagcctcccaagtagctgggactacaggcacacaccaccacgcctggctaattcatgttttgtaaggatgtggtctcactatgttgcctgggccagcctcaaactcctgggctcaagccatcccccgacctcggggtcccaaagtgttgggattacaggcgtgagccaccgcgcctggctggattatatctttttaataattttaaatctagatgaaaccaccttccctctcccacccacttcatccccttcttttatcttcatgatacctttctgaagagtctcagccagttgttgtttgagatagatgctgcatcacattctcaatttgtctgaatgtatcctcagggtgtcactgatattgtcacagagattggtcctctatctgtggttcatcctgcatgctgggaattagatctaaaggcttgattatataaatattcagggatacttcctaggtgctgctctgtacttcgttgttttttgttttgttttgttttatttgagatggagtcttgctctgtcacccagactggagtgcagtggcacgatcttggctcactgcaacctctgcctcccaggttcaagtgattctcttgcctcagcctcctgagtagctgagactacaggcatatgccaccactcccagctgatttttgtatttttagtagagacggggtttcaccatgttggccaggctggtctcaaactcctgacctcaggtgatctgcctgcctcggcctcccaaagtgctgggattacagggataagccactacgcctggccactgctctgtactttgaattgcatcatatcaggaggcacccaatatctcattgtcccactttattgggagctgaaactgatcaagacaggggctgtggcagccagacctctgcattagaaaacatatggttcataccttgtgaacaccaaataatctatggagtaatttctttgttgttctcttgtttaaataaaggtataatttacatatagtaaaatttacccctttcagactgcaatatttgacaaacacatagtcatgtaactgccaccccaatgaagagataacacacattgaagcattattcccaagatgtggaaacaaccaaccgatacatggattt

SEQ ID NO: 1242234 - DNA, 4001 bp, Homo sapiens
atctttcctacccacacaccagactgtaaactccatgaaggcagagagcatatgccttgcacctcatctgtgcaaaataaaaacctgtcaattgagttaatgttgaaacagatgttaagaccacttcctgagactgcttgcattatttttattatcctaagtaataaaattactagcattttagttacttacaaaattatcggcaaaactttaaacaaaaacttgaaatttggtgaactacatatgaatttccatataaaatagatcatgagtaacaggaacttgttttccaaaatagttatatttctcttgctcatctaagagacagttggatcagtaacctgcatttcagcaccaaaatgtgttctaaaccatatacggactgaatgtataagggtacatcatgacataagtgatgtttaatttgacattaaaacactattgtttacgtagctgtttagagaataccgagtggtactttacgtttaaagctgttctttaacattggcaaaagccatgagctacatacacactctgcaaggaaatgaaaagtttatcagtcaagttaccttgcagtgtgattttaaatattatttcatataaatcagggaaaaacaagtactggttcagcggtaagactgctttcaaatgtaaaaatatcatatctcacacgagtgaaagttttgtcaagttttatggtacaccaccttggtcaaataattttaacagattacatgctaatttgcctttcaactgctgagtgtatcctgctcaacaataccgtaaggtccttcccggaaggcttggcatttttgttcgttggtccccttaataggaatgcaggtggtttcagtaatctataatattccaaaaaagaactgaaaatggcttttgaggttcaatgtttatacaatgccatctgaaaacattgtacaagtacctaaaatctgatgcttagacaattcccttggttaagagtggttaataggctgtaaatatagttgtaatccccaggaaagaagaggcatttcataacggaaacactaacagatacgatcactccgagccgctctccaaggcgtcctcatcgttaaatcaacaccaggggttgtgagcgggcaattgtgcccctctgacacccccgctcttccgcagactcgggctccaatccccgcgcgaggagtccctcgagactagccagctcttcctcgagacttcggaagctgggaaatccctggccagggaaccaggagctcaagccccctcccctttcctttcctgaaaattaatgaattggccgtctgattgtttatttaatgaggtgtgtagtggcctctactggtgctagtgtgagcacaagaatgtcccactcttacaagtgggatgagcctgggggaggggagagaggcgaggggtgaacctgcctccaggtacaaagctgggaactagacccctgcgcccccgacctgccccccggcagccgccccttccccggtggcgccccctctcgcccttctcctccccaccacgcgcgatcccctttctcttcggcaaccggagccgaggcagagaagttcctgcacgtttcctcctggatcctaaacaaaaacaccgcagccgcggccgcctgagccggtgccgcgcccccgcgaacccccgggcccgcgcccgccgcttacctggggactgcggcgcggagccgctcctggcggccgcggcgcccggcgcccggcgcccgagcagcagcaggcagtagagccagaaggagggggtgctgaggagtcgccgggctccccgctccgccgccatctcttccccgagagtgagcggcagcggcggcgacagcgccgcggagcccttgcctccttccctcccgcgcgcctcagccggtccctcgctgcaagctcggctcccgcggccgccgctgctccagcccagcccggcccggcccggcccgcgcagcccctctcgctggaggggagactccagggcgcctccctcctgcaagggggcggggaggggaggagagcgaagaaggggagtcagtacattccggggcgggggggggggggcggtgggtcggtctccaggttccaggcgccgccacccgccgccgactccggctccacacaccagcgcgaggggggcggagaccgcggacggcgggggcgggggcgggggcggggggcgggagtcccgggcgcgcacacgcgcacgcgcgcgcctcgcccgcaccccctcggctccgcgcgcggcccgcccccgctccaatcccggctgccgcctctcgggccgtggcgggcccgctcccctcccccttctccccggagccgctgacgggtgcggggcgcgcgcgccgggcgctgctgctggcgtcagggaaaccccggagaagcggatcctcctgctcctcccgcccgctcgccgcagcccctcggctccgcgcgcccccgcctcctcctcctcgcctcggggacaaattcccccctcacctccccagatgcctctggctgcagagacctgagggcgagaggcgctccgagctcaggctggtccgggaggccggcgtgggcgcgcacctctgcacagtccgggcctggagcctctatatagggcctcagaggaaaccgaaaggcctccgggaggaaacctgggtgcgcagtgggtcggcccggggatttatgtgctcgccaaaaacaatagcgatcccgcccgactcttgctgggccctggcgcggctcccgtgggagggggccggccgcgcagccgctgacctccggctcccaagccgggccgccgtcgccgcgcgcttcccccgggcagcgccgggacccgcccgaaccgcgcccccacccgcatcgctcggcccgggtccagggaactaggcacagacaaaggtgcccgctgtccacttcctcagctcgtgcgggggccccgaccgagccctgggactccccggggccagtcttctcgcagtaactgctacgttttacctgtacctttgcgggacacttggcgttttcctacctgggaatcacgtctttcgctgataaaccaaggagcaagtgggatatgattttaaaccacttagtaatcgtgaggcagcacccaggctacacaaagttaggagaaagcagtttgtagttccactgctgatgagactattgatcattttatatactgcacccatgaaaaatttttaaagaaaatttatttgtatgattatgcaagcagagtcacgtttggtggttgataggcgttgggttttattcactcttctgtgtagtcgataaccgaaatgtcttgcttcccacaagaaaatggctatttcactaacatatccctctgtgctttctcatagttactttccaaagatattttattctaaagcgccaaaatgaacaatgtaagacatggattaacgtcgggagggaagagctcagaatcttcataaaaccttaaatcatcaaaacggtgaaattaggaattctcatgctagttctttgaaacaattgacttaatagaggaaacacatgcttatggtttttcactagggaaaccatttaaatacctttttgttttggttagagttgttaaccagcaaaaatatttcctaaatacccgtgattgacctgttaaattagaaatagattacctcccaattacttcacaagtatttgcttaattaacctttaataatcacatcattattcagttttctgagataattaatgagaaaagctctttgaaaactgtaaattgccttgcaaatgttaatttcctgatatcttttctaagtctggaaaaatttcattatattaaacctataacgtgtaatatgacttctgagatgaagcttacatttatctccaagttttgaaaaatacatgagttgtggctaataacagactgattttcatatatgacttatatgaactgtctcactaatttatcagcccactgtgtatatcaggttaatatcaaaaagtttaaaacagttg

SEQ ID NO: 1242235 - DNA, 4001 bp, Homo sapiens
agacaggttaaataatgcattctggccaggcatggtggcttacgcctctaatcccagcactttgggaggccgagatgggaagatcagttgaggccagaagtttgagaccagcctggtcatcatagtgagacccccatctctgtcaaataaataaataggagaaaaaattgtttaaataaaaattaaaaaccactgtcatatactgcctcatatactgcctcaaaaaaatataataacaccatctataaaaaaagaattgagggccaggcgcagtggctcactcagggcacagagcctagtttttggtagagaaaaactattaaaaatagtacagctgcacacagtggctcatgcctgtaatcccaacactttaggaggctgaggtgggatgatcgcttgagccctgggaattggagactagcatgggcaacatgatgaggctatctctacaaaaaataaacaaaattaaccaagcatggtggcatgcacctgtagtcccagctacttgggaggacgaagtgggaggatggcttgggcccaggaggtagaggctgcagtgaccggtgatcacatcattgtactccagccttggcgacagagtgagacccccaactaccaaaaaaaaaaaaaaaaagtacccacaggagagtgggtgggacaaataattctcaatgtgtataccatgttatactgttaggttgagccatatgtaatactttacctactcaaaacaaaaaaacttaaaaactcttttaagctttcctaaattatagatcctgtcttcagaaaaatgcacctacctatggaagcaccagcatccctgtaccttaggttgggaacgtcacaacctacattcaagggttaaatgttgtgatgtctgcgatttactatttaaaaatttcagtaaaaatgaaccaaccacgtcataacgttaaaaactattaaaaccaggcggggcgcagtggctcatgcctgtaatcccagcactctgagaggccgaggcgggagaatcacttgaggtctggagttcgaggcgatagcgaaaccccgtctctttaaaaaacaaaacaaaacactattaaatctagataatgacagggttagggaagttcgttatattactctacttttctgataataaatttcaacgacaaaaagtaaacgaaaatataaaagcagtatcaaaaaagccaaacccgtttctgggctccagcatccttcacttctcatcacagcggatacaaacaaggtatcctgagtctcaccgtatctgctccatggcttcccacgtcagggtcctgggcggggcaccaggcgcctccatttgcctccgaattttctggaatcggattgcttgtttctgtcgtttcagggtgctgggggaagagaaccaatggcagaagccatgcgtggaagcagaatggatgtttgaagagcctcaggctaaatcatggagcgcccagccctcttctctttgatcgcaagggcaaccgggccatgttgccggcttagagctgctccgtacacccagaaagctaacacctagaacaataactgcctgtaagcatgccgaactctctaaactgatgatgaaatacgtcactaatgaagggaccagtggtcccaggggagctgaacacctgacgctgcgcccctaacaacgggtaagaagaaacaagggccgctgcgcaagcagcggcaggacacccggcgccaagggggcgcggcctggagcgccggggcacgaggccctgcttcaagctgagggcccggggagaagccggtacctctccacctcctgcagctcccgttcctccggctcccagtcggaatcggggtccggctcccggccaatagggcctgggcccgccaccccccgggtcgcgaacccacagcgagtgacggcggcgcaaacgcgcccgcccagcaagagactcagggtaaccgccatgtcgacgcaaaccagccttcagcagtcggctacgaaacagcagcggaagtagccgggtaagaccggaagtggaaggggcgggccggaggctgggtagtagcaagttatttcccgcttcacttggtgggggtaagatctgggctcacgctgctcagtggcccaccctttctgcctgtaactgtggagagggcttccctgaaacgtgagggccgaaatgaggtacaggacgctcctggaaaactgcataaactttaattaaagtacggattccgtttccaagagccgtccctccgccccagcggctgcccaggcctgcctgtctccgccacctcggtgggcagggcttccgctcggcagtcttctgacggcgacagcccagtgccttgggcactcggcttctctgggaaaggggctcattgtctcctggatggcctccagccccgggccgcacctagggttcagacccatcacctagcgataaacccaggctaaggcttgatgagcagaaatgagtacatggctggccttggcgcctcttcatcttctagtctttaccgatccccaattaatcttagggtattgaggaattcttggtgtctttgtattttgccttatacaaatggggttcctgggcagggcttttcaaagtggaacttggtggcagtcattcatttagcaaagatttaatgccctttggaaacctggggaggttatccaggagaggtagagtgcttccctcctgcttttacctgaactgattgatgttgaggagtgctctggaacgctgcagcatgggtgcagacgcagggcagaggggaaccttggctgctctgtgttcagagtttaccatggagggcaaggtgcattcagtccatgagtcagatgccactctttccggttgcagaaaatagccctgctttggggttaaagtgggtggcactgatcctgccaggactcggtttatggcttctagccttctgctggcttgtccttctgcagtggaaacatggatgtccctgagttggtattcacagaagagatttgttcacctctttcccaactgtggcccaattaccaacacagaggaagggcatctcatgcttccctccactgtctttcccacactgtattgtaattggtatggtatgtctttttgtccatgttcctattacctcttgagtgctgggactgtatttctgccatttctatcaccagggtctagtgtacagaaaggattaaataggcctggtgcggtggcttacacctgtaatcctagcactttgggagactgattcaggtggatcaggagttcaagaccagcctgggctacgtggcaaaaacaaaatatacaaaagttagccgagcatggtggtgtgtgcctatagtcccagctactcaggaggctgagtcaggagaattacttgagcccgtgagtggagtttgcagtgaagtgagatcaagccattgtacttcagccttggcgacagagcgtgaccttgtctcaaaaaaaaaggagtaaataaatgggtaccctaacttccccattcttacactggtggaagtgccatattatattttaggggcatccaagctctatgcttgctagtgggatttacatatgtcaaaatgaccaaagctagttttgcatacttacggctagtgagcctgattctggcactggaaaaatagcacctcccagccttcttcattgacaatgaacaggagttgatggctgccggctctcctgtccagttgaagttcttgggctgcagatggtaccggggaacatgtgggattgcagcattcatgcttggcagtgcccctaagatcctggggattgattcatggggcagaactggatgcaggaaatgaggagcgccctgctctgtggcagcccctcttaggagcaccagtaggaccagactcatagatttcagttcttgactgcccagcctgtcctagcaaaatctaggctagaggagaagagcagccccttaccacatttttatgtaagtttggatggagcgttggaagaaggaggtaactgaaa

SEQ ID NO: 1242236 - DNA, 4001 bp, Homo sapiens
ccggccgcaagatgttcttctactccggtttgtgtggtgttttcctcatgcttacgctagggccgtggattggggaggtgaggtgctttctcaggccatcctatttataaggtcacgcgcgttgaccatctcacccagtcctggggcctgtcacacggacagatgctccctgaagtgtggctgcggtgtgtgtgtatctgtgtgccttagagacagacacatctgcatccttggaaaatcatacttggttttatttaattctatttaaattgtatgggagaccactatgctttcactttaaagctaaattccttaaattatccatgattttatattttcattcgagactgtcgggccctttatctcttctctgaagccaacgcctggctcactcagagaaagtttcacctgcattccgccatgtaaattacgagttcactttctctcacaacccaagagtcgggggccacatccttcccagagagctcttaatattcttcttctaagagtatggccaagaaccacaagactttctcagtccctctggaagcaatggaaacggactgtttcacagcctgccatatcctgcattggcaaaccggtcccgtccggggcctcccagcacaaacgacactgacagagagctctaccccgcagagcactacggagtgcggtgctgcggcacatccacctgggaagtggccttggcccgtccagggcttggttttggatctgccgcgcgtgttctccaaactgaagatcacttgtattcatttggtgcaggtctaaggcgcagcgggctccgtaagagcaccccaggaacgcacagccctgagagcccgcccgggtcttccttttgcaccagcgaggcccctgcgggggactggaaatcccaggtcttgctctaccgagcgtaccctaggagcgggccgcgcatcggctgaagcggcgcttccaggcgggcgctgggctcgagcaccccagcaccgcgtccgcaggaggctcccggccgcgggttgcgggccacggcgagggctgccgggcggcgcggggcaggtcttggaccgagggaaaaagtcagccggggaagcccgcacaccaaagcaagccgctccagccgctgagaacggagaaaagccgtggcgtcggcgaagcgccggacgctcaggacgcacctgtgattcctgggccgctcccgggcccgagcgccaggacgcggcggcagcctgggcacgccgcggggagcacccgcccgcgcagccttcccccaacctgggcccgggccccgaccccgtcccctgccccgacccgggcgcccccacctgcgaccgccttctccgccgcccgcctcccccacccgcccgccgcctgccgcctgccgcccgccctacctcgccgcttggcacgcacgatgcccttcttctgtagcacgaacgtggacccgttcaccaggctcgacacgacggccacgcccaggccgagcgacacggcggcggggctcgggctacgcgccccctccccggccgccgccgccgccgccgccgccgctgccgcagctgcagtccccattccgcccgcgcccgccctccgagcctgcgcctgcgcgccgcgccccgcggggcgggatggggggtgaccgggaggcgcgggcgggggaggggagggggacgggtgggggaggagcaggaagaggggcgggggcgggacgggggtgccagggaccggcgccttaggctgcggggacagcagtggcgccggacgcggcggcagtgaggggccggtgaggcgctgggtggggcgggggttcccggatttcgcaaatggaaatgcaggactcctggttaagtttccagcgcggagaaacacgcatactttctgagtggtgtcctctgcaatatccgggcagcggagcgcggcaggacgcaccggcgggcagcggtccccgaagagcctccagcggaggccggcccaactcaccggagcgcgaagcccggcgcgccgctgcagagatcgaaggagagccctggcgctgggcgtttctcttccgcccttggcgctagagtcagctacatggggctctgggcttgtgatcccatagtctagtttcctcgttttaataaactacaacaagccgggcgcggtggctcacgcctgtaatcccagcacttcgggaggccgaggcgggtggatcacaaggtcaggagatcgagaccatcctggctaacacagtgaaaccccgtctctactaaaaatacaaaaaattagctgggcgtcgtggcggaggcctgtagtcccagctactcgggaggctgagccaggagaagggtgtgaacccgggaggcagagcttgcagtgagcggagatcacacaactgcactcgagcctgggcgacagagcgagactccgtctcaaaaaaaaaaaaaaaaagaaacaacaacaaaattacaagcttgaaaaataggaaaaagttattttattttttttggaaaaaaatattttttaaagtgactcaattccacaaccctcacctaattattagtattttaggtgttttcccataatgtatacatacttttacatgtttccaattacaatatacgaaatttcctttttatttaatatatatcagtttctgtatcggtacataaatatgattattctaatgacagtataataatttgtctaaccattcagccattgttgggtgttaggtagctaccaggttggtttgtttttttgagacagagtctcgctctgtcgcccaggctggagtgcaatggcgcgatctcggctcactgcaaccttccgcctcccggattcaagcgattctcggcctcagcctccgagtatctagaattacaggcgtccgccaccacgcccgggttaatttttgtattttgagtagagacgcggtttcaccatcttggcaaggctggtcttgaactcctgacctcaggtgatccgtccgctctacctcccaaagtgctgggattacaggcgtgaaccaccgcgcctggccggttgctgccaggttttgttgtctataaacgatgctacaagctgggcacagtggctcacacctataatcccagcactttggggaccgaggtgggaggctcgcttgagctcagacgttcaagaccagcctgggcaacgtagcgagacccgtctctaccaaaaaaagaaaaaaattaattagcggggcgtggtggcttttacctccaaccccagatactctggaggcagaggtgggaggatggcttgaggtggaggttgcagtgagctgttattgcaccactgcactccagcctgggcaacagagcaagattgtctcaaaaacaaacgaaaagtataaaccttttggcagctttgcatacagcattattattttgtgaagaaatataaaatagggccggggaggtggctcatgactgtaatcccagcactttgggaggcggaggcggacggatccggaggtcaggtggatggatcaggaggtcaagagatcgagaccatcctagctaacacgatgaaacccggtctctactaaaaatacaaaaaattagccgggcatggtggagggcgcctgtagtcccagctactcaggaggctgaggcaggagaatggcgtgaacccgggaggcggagcttgcagtgagccgagatggcaccactgcactccagcctgggcgacggagtgagactccgtctcaaaaaaaaaaagaaaaaaaaaagaactccaccccagacatttttccatgtgagtacataggttaaatgacaggcatattttatctgatggggaaacacatatgggattttaattaaaaacataaaactatattttgcttgaatttaacaaaagaaaaactgaaatgaaactacagtaactactgaatgacaaacattattttgccatgagatattacttcctaaaagatacacctaaaattaaagttagtaggccaggtacagtggctcatgcctataatcccagtactt

SEQ ID NO: 1242237 - DNA, 4001 bp, Homo sapiens
ttcgtttttccctaatgtcttacatctggtgttcacgtgttcttaggctcctcctggttgtgacgtgctttcagattccatgaccttcacagaggactggtcaggtgtactgcaagatttttttttttttttttgagatggagtcttgctctgccgcccaggctgagtgcagtggcggatcccggctcactgcaacctctgtctcccgggttcaagagactctcctgcctcagcctctcgagtagctggtactacaggtgcgtgccaccacaccgggataattttttgtatttttagtagagatggggtttcgtcgtgttagccaggatggtctagatctcctgaccttgtgacccgcccgcctcggcctcccaaagtgctgggactacaggcaccagccaccgcgcccggccgcaagatgttcttctactccggtttgtgtggtgttttcctcatgcttacgctagggccgtggattggggaggtgaggtgctttctcaggccatcctatttataaggtcacgcgcgttgaccatctcacccagtcctggggcctgtcacacggacagatgctccctgaagtgtggctgcggtgtgtgtgtatctgtgtgccttagagacagacacatctgcatccttggaaaatcatacttggttttatttaattctatttaaattgtatgggagaccactatgctttcactttaaagctaaattccttaaattatccatgattttatattttcattcgagactgtcgggccctttatctcttctctgaagccaacgcctggctcactcagagaaagtttcacctgcattccgccatgtaaattacgagttcactttctctcacaacccaagagtcgggggccacatccttcccagagagctcttaatattcttcttctaagagtatggccaagaaccacaagactttctcagtccctctggaagcaatggaaacggactgtttcacagcctgccatatcctgcattggcaaaccggtcccgtccggggcctcccagcacaaacgacactgacagagagctctaccccgcagagcactacggagtgcggtgctgcggcacatccacctgggaagtggccttggcccgtccagggcttggttttggatctgccgcgcgtgttctccaaactgaagatcacttgtattcatttggtgcaggtctaaggcgcagcgggctccgtaagagcaccccaggaacgcacagccctgagagcccgcccgggtcttccttttgcaccagcgaggcccctgcgggggactggaaatcccaggtcttgctctaccgagcgtaccctaggagcgggccgcgcatcggctgaagcggcgcttccaggcgggcgctgggctcgagcaccccagcaccgcgtccgcaggaggctcccggccgcgggttgcgggccacggcgagggctgccgggcggcgcggggcaggtcttggaccgagggaaaaagtcagccggggaagcccgcacaccaaagcaagccgctccagccgctgagaacggagaaaagccgtggcgtcggcgaagcgccggacgctcaggacgcacctgtgattcctgggccgctcccgggcccgagcgccaggacgcggcggcagcctgggcacgccgcggggagcacccgcccgcgcagccttcccccaacctgggcccgggccccgaccccgtcccctgccccgacccgggcgcccccacctgcgaccgccttctccgccgcccgcctcccccacccgcccgccgcctgccgcctgccgcccgccctacctcgccgcttggcacgcacgatgcccttcttctgtagcacgaacgtggacccgttcaccaggctcgacacgacggccacgcccaggccgagcgacacggcggcggggctcgggctacgcgccccctccccggccgccgccgccgccgccgccgccgctgccgcagctgcagtccccattccgcccgcgcccgccctccgagcctgcgcctgcgcgccgcgccccgcggggcgggatggggggtgaccgggaggcgcgggcgggggaggggagggggacgggtgggggaggagcaggaagaggggcgggggcgggacgggggtgccagggaccggcgccttaggctgcggggacagcagtggcgccggacgcggcggcagtgaggggccggtgaggcgctgggtggggcgggggttcccggatttcgcaaatggaaatgcaggactcctggttaagtttccagcgcggagaaacacgcatactttctgagtggtgtcctctgcaatatccgggcagcggagcgcggcaggacgcaccggcgggcagcggtccccgaagagcctccagcggaggccggcccaactcaccggagcgcgaagcccggcgcgccgctgcagagatcgaaggagagccctggcgctgggcgtttctcttccgcccttggcgctagagtcagctacatggggctctgggcttgtgatcccatagtctagtttcctcgttttaataaactacaacaagccgggcgcggtggctcacgcctgtaatcccagcacttcgggaggccgaggcgggtggatcacaaggtcaggagatcgagaccatcctggctaacacagtgaaaccccgtctctactaaaaatacaaaaaattagctgggcgtcgtggcggaggcctgtagtcccagctactcgggaggctgagccaggagaagggtgtgaacccgggaggcagagcttgcagtgagcggagatcacacaactgcactcgagcctgggcgacagagcgagactccgtctcaaaaaaaaaaaaaaaaagaaacaacaacaaaattacaagcttgaaaaataggaaaaagttattttattttttttggaaaaaaatattttttaaagtgactcaattccacaaccctcacctaattattagtattttaggtgttttcccataatgtatacatacttttacatgtttccaattacaatatacgaaatttcctttttatttaatatatatcagtttctgtatcggtacataaatatgattattctaatgacagtataataatttgtctaaccattcagccattgttgggtgttaggtagctaccaggttggtttgtttttttgagacagagtctcgctctgtcgcccaggctggagtgcaatggcgcgatctcggctcactgcaaccttccgcctcccggattcaagcgattctcggcctcagcctccgagtatctagaattacaggcgtccgccaccacgcccgggttaatttttgtattttgagtagagacgcggtttcaccatcttggcaaggctggtcttgaactcctgacctcaggtgatccgtccgctctacctcccaaagtgctgggattacaggcgtgaaccaccgcgcctggccggttgctgccaggttttgttgtctataaacgatgctacaagctgggcacagtggctcacacctataatcccagcactttggggaccgaggtgggaggctcgcttgagctcagacgttcaagaccagcctgggcaacgtagcgagacccgtctctaccaaaaaaagaaaaaaattaattagcggggcgtggtggcttttacctccaaccccagatactctggaggcagaggtgggaggatggcttgaggtggaggttgcagtgagctgttattgcaccactgcactccagcctgggcaacagagcaagattgtctcaaaaacaaacgaaaagtataaaccttttggcagctttgcatacagcattattattttgtgaagaaatataaaatagggccggggaggtggctcatgactgtaatcccagcactttgggaggcggaggcggacggatccggaggtcaggtggatggatcaggaggtcaagagatcgagaccatcctagctaacacgatgaaacccggtctctactaaaaatacaaaaaattagccgggcatggtggagggcgcctgtagtc

SEQ ID NO: 1242238 - DNA, 4001 bp, Homo sapiens
acacccggctgcccacattacattaacactttagagctcttaggtcgggcgcggtggctcacgcctgtaatcccagcactttggggggtcgaggcgggcggatcacctgaggtcaggagttaagagaccagcctggccaacaaggtgaaacccccgtctctactaaaaatacaaaaattagctgggcgtggtcgccggcgcctgtaaccccagctactccggaggctgaggcaggagaaccgcttgaacccaggaggcggaggttgcagtgagcagagatcgtgccactgcactccagcccgagtgacagagcaagattccatctcaaaaaaaaaaaaacaaaaaaaaaaactatatatagagctcttagttttctacgaaatctttactacctggtttccactgctatctaagttagcttaggcccggctcggtggctcacacctgtaatccccgcactttggaggccaaggtggttggatcgcttaagtccagaattaggagaccagccggtgtaacatggtgaaaccccggttctaaaaaaaatacaaaaattagccaggcatggtgccgcacgtctgtggtcccagctgctggggaggctgaggtgggaggagcacttgagcccgggaggcggaagttgcagtgagcccagattgcaccgtctagcctggggacagagcaagaccttggctcagaaaaattaaatacatgttagatttaattttttccaacctctcacttggctaataatttttcaaagcagtactgtacttataaatattacagaacctaaatctccaaccctaactatgcaacaatattagttataaattacaattttaacttacatgtaagtttaatatggtctctcttatgaaaaaaaggctgggagaggttagagatgacttattcactctcatttcctcgtaaataccaccctttattctcatttaaagtcttaaaccctggccgagtagctccagcctagaaagaagaaaacacagaagtaggcaaaagacttaaagttactaagtacgttttataatttggttactagccttcatactcattttgccaaccaatcaacataaaacctactcaatcgagcacaactactgcttcgacaggcagcttactggaatggaaactctcgactctgatatttcctcttactaaaaaaagtattaaccgggcacatggctatacacaggatttctagaaacagaacttaacatgcagtcctgtattaaatgaactaacaacctagaaaagaaattaaggaggcacaaacaccaaactaaacacacagttttgagcaattgtatagagagggaaataggattccgtgattttataaaaggaaattaaaacagtcaggctcaaaacgtcacagcagacttctaaggcttgtttaactgtcagttatgatccccgcagcagctgaagccaccttctaaaactcaccaagacaaatgaaattattttaatgaacttaatgaacatgcgtccccgacatggccaacgagccaggcttccgtgggactgaacggcaatccgattcacggtgggtttcctcactgaggattacaggaaaaccgcttcagaacacccggaaaggaaagttgcccgaagaacccttctccgacacaaggcgggctggctcgccaccaagtcagccccttcgcgcttgcctgaaaggaaggagtggcgacctcaccctagtcggccggccggccgcgcggcttcccctcgccggcgcagccttgggcaccgcggctcacacccccacacaggccgcccagtcctgcgctcgcacggccaccgccttcgtcgccgtccagtgggagatgcgagcattcggggctgaagccgttcgcaccgcctcctccatggagaagcgccgaggaaaacctgccaaggacaacctccggcaccgccgtcaccaccgctgccgggacctagggccggcgccggaaaacctaggcgcggctaaatgacgcaagaggcctcgcgcgcacgcgcagtgccgcaccacgtacaccccgcccccggggctctctcccgccgggttccggttcctttacaaggccccagtcggctgagcgcggagggcggggcgcgtagagtgtggggacgggggcggggcgcaggatccaggcgggacctggcgagggacgaagctggaagcgtagttaagcagtacagtatgctgccaggtggcgttggccgatcagttcaaaatcaaactccggcgtggcccttatttaaaacgaggattccgggcccggcgctgtggctcacgcctgtaatcccagcactttgggagaccaaggcgggcggatcccgaggtcagcagatcgagaccatcctggctaacacggtgaaaccccgcccctactaaaaatacaaaaaattagccgggcgtggtggcgggtgcttgtagtcccagctactcgggacactgaggcaggagaagggcgcgaacccgggaggcggagcttgcagtgatcggagatcccgccactgcactccagcctgggcgacagagcgagactccgtctcaaaaaaaaatagaataaatgagggttccggccgggcgcggtggctcacacctgtaatcacagcactttgggaggccgaggcgggcagatcacgaggtcaggagttcgagaccaacgtgaccaacatggggaaaccgcatctctactaaaaatacaaaaattagctggacgtgttggtgcgcgccagtaatctcagctactccagaggctgaggcaggggaatcgcttgaactcgggaggcggaggttgcagtgagccgagatcagccactgcactccacctgggcgacagagcgagactccttctcaaaaataaataaataaataaaataaaatgagggttcccaggggcagtcacagtgtgaagctgcatttaattggtgtccccgggcgatgccaaaggggaacagagctcccaagagggcaagaagcgggggaaagggtgggtccaaagctgggggcgggacggggcggggccgaaatagctgtggtagttcgacgaccgctgggcccttccttactgacccggtcgcggaatagatgtgaggttgacgtttggtgaaagcccgcctcgagacactgagagcagattgattgaatgattgattttgagacagagtctcgctctgtcgccagactggagtgcagtggcacgatctcggctcactgcaaactccgcctccccggttcaagcgattctcctgcctcagcctcccgaatagctgggactgtaggcgcgcgccgccacgcccggctaatttttttttttttttaagacggagtctttcttgtcacccaggctggagcgcagtgacacgatctcggctcactgcaacctctgcctcctgggttcaatgaagccattctcctgcctcagcctccccagtagctgggattacaggtgcacaccaccacgcccagctaatttttgtatttttagtagagatggggtttcaccatgttggccaggctggtttcgaactcctgacctcgtgatccgcccgcctcggcctcccaaagtgctgggattacaggtgtgagccaccacacccagccaatttttgcatttttattagagacagggtttcaccatgttggccaggatggtctcgatctcttgacctcgtgattcacccgcctcagcctcccaaagcgcagatttatttttcatgagatgtataggaaactaactgttaggctatcctgccttggctcctcctggaaaggagaaattccttgggatccaccaacgtggtttctgcaaaagtagtcaaagacagagctcatttgtaagaagcaaagagtagccagctagagttagatctcctagtaaatcaatgattccttggttgcaggtgtagagtcccttaggaatgttgttccaggttgtgactagacacaaaaacactattatatgaaattcaaatcatgtgggggg

SEQ ID NO: 1242239 - DNA, 4001 bp, Homo sapiens
atgcacacgtcagccctcacaagaaacagtgattcagcctagaacgtcaaatgtactgaagttgctaaaccctaccactggatactgaggcagatgagagaatgggaagagctccagtccaggtgaacaaggtccagactctgtcttggctgctgacttctctttccctctctgggcctcagggtcccattccggccacaagcatacacaggacacagcaaaggtggacttgactaatgcagcagggaacagcatgggtgggacaagactgtgtagactgggggagaaaggtcctgctccaaaaggctgatgatcccagtctgttactttagactgggtgatgagtcaggggaacttctttccctacttcttgccccatggggtctactgggaaggtcagcttcctttctttggactgttcctcctttgagctctgcctcaagagggaaaagcctggaaacctggctttctggggtccacacccataatgtcctagtcagacagtcacaccctaatacagtactgggtggtaattcctcccatgcaggatccggggatggccccagctgggccctcctgacattggagcaggggcccggctcacctggatttggggtgcggggcggctgaggctcacgcccagagccttctttagcaggaggattccgagcagatcatgactcagctgcagtcgctggtccctcagggaggtgtggggagctgtccccaatggggatgggctggaaggctccagactcttcttgcccatgaagtgacctggaaaggaggtgtccaggcacaaggaagtcaagcagccaggatcctacctcagaggaaaagttcctcatctctcccacgtttccgttcttgtagcgggaagacacttaaccttcctcctcttggtgcttccacctcaccaaggagccacaaaggtgtctgggtggtggcaaagcctgctccctcagcttttcctgaacaggtagagaggatggcacagctggcaggaaggtgggatggtccagggccagggagaaactctgctagttgtgtgggctgcttggacaagggacgaaaaagggcagggtaggaagtggagagtgaagaggcgcctggaaagtggaggtgcagcaaaaacacaccagcggttagaagattcggttaagtctcgcctaaggtaaggggcaccggctggcagtgggatttaggatctagcccagccctgtcttaaactggctgcgcgaccttagccaagtcactgacctgtccgggtctcaagtacatatctattaaattagatgagccccagggttttccacctgctccgacactagtgtccgtggctgaggagcggccagagggttgagaaggaaatggggtctgaactggatgaggggcgcttgcttgctccgtccccaaagacttaccggtggcccagaggttgcctcgcgagtgcactcggatcttgctggctcggctgcggggctccgggagatcccagctgagcggggcgacgccggcagcgagcagggcgaagagcaggaggctgccgaacatccgagcgccccccgcccgccgggccatggctgtgcccgggccgcggcttcgttcgggcgcgcttcccggccgctgggctccggggctgccttcgatccttttaaatccgcgcccctgggggcggagcctgccctgagcagcggagccgtgccccgcgcccgccgccctccccgccgtccccaccctcccgctaggttaccaggcaggggcaccccctttgggccgcccagagacctgcacacccacactctggcccgcacgcgggcaccgcttccgccaggggcttctggcggaagcccgccaccttcaggctaaggaccgggcaccggccaaacaggggcccggccccggcggcggagccgcttcccctggccctgccttgccactctgccacggctttcggccaaataggcacttcagccctctgagcctctcttcatgagggtagaggtcgggcgaggagctctcctcccgggtaacaggcttttttttttttttttttttttttttctgagacaggatctggcagtatcgcgcaggttggagtgcggtggcgcgatcacggctcactgcaaactcaacctccagggctgggctcaagcctcagcctccccagaagctgggaccacaggcacacgccttcatgcctggctttttttttttttctttccaagagactggatgtcgctaggtttcccaggctaacagaggcatttttacagtgtccagccaagtgctaggcaccaaaggacttccataaactaatccccatcacctccgccctttgggggaatctgacccgtgttcaccttgctctctgccctctcacagccagcatcacagtctggaaatgttctggcacacagtaggtgctcagaatgggaatgcagaatgatggagggtgggacaaagggccgcttctgaggaacgggcatccagctggagggcctggcttatgggcaggaagcagacctctgggtcaagaaagtggaaagagcactgcacccaggactgcactgcacccaggagtccatgtacaagctgtgacccggctgaacctcactttcttcaactgtaaaatggtaataaccacactgccctaattttaatacttttacatgttttagcataagtactctgtggccggaagcaacaattctgtaggacctgccctctcacacctggcactttgttctccccaggagctgtctggactttcttggaaagaacttctggataagtggtatcatataatgagcagaggaaaacactgtgctccagaagaatacatttatgtttgcttaattaactgaaacccattgttcagagcactacactagacacaagaagaggggcgacagataattccttgctcccaagggagttaaccatctcattggagagacaagtacacaaaggagagagtgatggaggagcgggggtgcagaccaccccttggactctggatacctctggaacacggaacagagtggccgtaccagaacctactcccatctggcttgataatgggacctgcttctaggactcttgcttagtatctagctcagcaaggttgctagctctgtggatcctcatcctagaaggggaagctcacatgaaaaactggctgtcatacccagctggaggcccagcttccaggagcatgacacacaggacagggacgtttcatttctggccctggctttccccccaatctccttgcttctcacctcccaccctggcatttacacctctctgctttcttgtcacagcttagccatggtgtacagatatagctcttatcaccttccggtaatcattcctttgtgacccccctccctctcctctgcatccatcaaacccccatcctatcttctctagtccatggataatagaaattagcgtgaacacacagaagctggtattgattgagtgctgcatcacttaaatgcttgaaggaatcttatttggtaggtttctgtctcctcatttttataggtgggaacaggctaagaggtttagccactttcccagaagtcccactggaatcagatttcaggtctgtctggaccactgcatcaggcccccaaatctatgcagggcagatacaactctccctaaaccacacccactcccattgtaccatctcaaatttcaacaccaagttgtgtttatgtatctcaggagggagagggagtgggcactgcatttcgagtttcacctctcttccacaggtgactggaccttgagttctgctaaggttatttatacttaagccaagcttcctctgacacagcctgggttcacagctgcagccacagctctgaggctggccccaggcacccttggaaccatttgctctgtcagcctactatagaaaaaaaagggggggggcctctgaggaccctggagaaaacagcaggggagcacctccacagacttaggag

SEQ ID NO: 1242240 - DNA, 4001 bp, Homo sapiens
agaattgcttgaacctgggagacggaggttgtagtcagccaaggctgcacccctgcactccagcctggacaacagatctagactctgtctcaaaagaaaaaaaaagaaaggcccaccactaaatcaatttgagttcaaagataagttaatcaggagaaaaatcagactaaacaggttaagtaactttctcaaagttatacaaaaagcaaatactggtcttctgactttcaattcactgacctctgtctgtaatatgcctattacttttacaagtactcttccatttttaatcaaaatcttatttcaagggacaagaaattacgttaagtgacaacagaggtatttttcagtgaatgctgacagctgtgaaagtcttaatctttcttccccaataccctcctatcatgaacagcacatgaccactcttgcaacagcaggactgaagtttttcttccaagtggtattgttgcaactctctggggtactctcctttatcatctccctccctttaaaaaaatactgccaatcctttcctccaacaactcacaaaataagagtttttcaaatcattttatctttaataatcttgtagtaatttaaaatatgagaaaaaaaagtcaaatgtgttccctttatgggtgatgccaccatgattgcctcacacaagcataatcaatcgccacgagagactggatgccaaagagtatggctggcaaaaaggcatcagggctcacagtccgaagagtttggttacggagtctccgaggggtaacaggtggcagaaaagacatcagtttaagggaccctcagaggacagggcgcggttgctgggtcatgagcaccttgaagcgtttcttgatggtgattcggtgtcgagagtatttgtcatctggggagaaccgagcaggatgggctgagcaggtctgttgtcccatcgggtcaaatttctgctccaggaacacagaatgtatgtcagtacaggagtgatgaaatggggtggggccagcgcgaaaaagggcaaacatgaaaatagaagatgcaatggtcaactcaaaaagttgtacaaataaatagagaaatataaaatttaaaaaggccgagcgcggtggctcacgcctgtaatcctggcactttgggaggtcgaggcgggaggatggtttgagaccagcctgggcaatatggcgaaacctcgtctctacaacaaacaaacaaacaaaaccaaccaaccaaacaaaaaaccccaaaaccaaaaattagccgggtatggtggcgcacgcctgtagtcccaactactcgggaggctgaggcagaaggattgtttgagcccaggaggcggaggttgcagtgagccgagaccgcaccaccgcactacagcctaggcaacaaagcgagtccctgtctttaaaaaaaaaaaaaaaaaaaaaaaggaaaagtgagtgcaatggcgctatcccggctcactgcaacctctgcctcccgggtttaagcgattctcctgtctcagcctcccgagtagctgggataacaggcgcacaccgccatgcccggctaattttttgtattttagtagaaacggagtttcacagtgttgcccagaatggtcgcgaactcctgagctaaggcaatccacccgcctcggcctcccaaagtgctaggattacaggcgggagccactgcgccccgccagaattttttcttttaattaaaaaatgagtcgcgcggtcccggttcttccccacctcggttctggactttctggttccccgcacccagctaggtaactccacgtatgacctcacccactcctcccatctacatttctcgccatgcctatttacaccctgttttctctcctcaccttcagcgtatagactcgatctccctgctcgttgaggtaatactggagaaacatgatcgcttataagccagcggtcccaattcggtccaccgctcagtctgcagtggtccgcccgaccgcgtcacgtgttcgtcaatttccttcctgcataaccggaagtctctctctcctggcactccggaaaatgtagtcaatttttgccttgttttcagctagccagaagggggcgcacgagagcagggcttggcttggggccctacttgcaactttgcaggctaaaacacgtggagtgtccctactgtgtgctaggtacacggcgttagaggggggtagggatggatgtggatagaatattgacgtatagaagcctgtctttgtctcaagatacacacccatttcaggagcagtgagttttcaatgcctgaagaaacaagggctccaggattcagagcccctttaccctagggaagaaagaagaggttttcttccctcccctcttttacatccagttcccctgctccatttcaaagcgttggcggtaaagaatgcatgttgagtatcaatattccgtaaagcgaaagagcgtaaagttattttatgaaactggtgaagcatgtttcagcggtcgaaccaagatttaaagttaggtccctaccgcaaattcagcgctctttcttatggtggtgagtagctaataataacgtaataaagtgcaccttctaggagtttttacaatttttaaaagaatatagaagttctccttataagactctcgtttaaagaaatgaaaatgagaaccaaaatatcattacaaagatcatcgttacgccattatttacaatgacaaaagcattggaatatatattaactgtgtaaccagaaaaacctgcacttttttttttttttttttaagaatatggtttggcggggcgcggtggctcacgcctgtaatcccaacactgggaggctgaggcaggcagatcacaggtcaagggttcgagaccagcctggccaatctggcgaaaccccgtctctactaaaaatacagaaaaattagccgggcgtggtggtgggcgcctgtagtcccagctacttcagaggctgaggcaggagaatcatttgagccggggaggcagaggttgcagcgagctgagatagcaccactgcactccagcctgggtccgtcttaaagaaaaaaaaatatggtttgtggctgggcgcggtggctcacgcctgtaatcccagcactttgggaggctgagacgggtggatcacaaggtcaggagttcgagaccagcctggccaatatggtgaaacccccaaaaatacaaaaattagcggggcgtggtggcgggcacctgtagtcccagctactcgggaggctgaggcaggagaatcacttgaacccaggaggcggaggttgcagtgagccaagatcacgccactgcactccagcctgggcgacagagcgagatcctgtctcaaaaaaaaaaaaaaaaaaaaaagaatatggtttgtatttacttgtagttgcataaaaaatctctgcaagtattcacaagaaacagatgatactggtttcctctgggatagagaacttagttgcaggagaaaggggtaagggttgggaggcagacttattgctatgtattttattacgcagtttgatttttgaaccttgctaatgtatttattacctgttaaaaattttttaaaggccgggcacggtggctcacgcctagtaatcccagcactttgggaggctgaggcgggcggatcatgaggtcaggagatcgagactatcctggctaacacagtgaaaccccgtctctactaaaaatacaaaaaattagccgggcatggtggtgggtgcctgtagtcccagctactcaggagggtgaggcaggacaatggcgtgaacccggaaggcggagcttgcagtgagcagagatcacgccactgcactacagcctgggtgacagagcgagactctgtttaaaaaaaaaaatttaaatctaagtagttaattttgttagaaaggaaaatgatgattttagccttcaggtctttagaaaagagaaaagatatctcagaggaagcaagaaagatgccatgaaccccagggaaggccttttgggggaaa

SEQ ID NO: 1242241 - DNA, 4001 bp, Homo sapiens
gagttgtgacagggcataggatgtctgtctagcacatgatgattaggtatgtacacctttctcttctctttttcatgcctattaactcacgtcactttccaagtcagcaagtcctagatggattcccatttcccacagggagcacagacagatgtcctctcagggcccctgcattgacttggggcagagccaggcctaagtcccaggcttcagactcctcaggttcttcttgcggaccacctgtctaggttctcactctctcctcgcctataaatgtgtggtcctagtaagtcactggagctgcaggcagcaaggagggtgctccaggcagcccctgccagaggccagtccaaagctcccagggcccaactcactgtggaggaggggggtgagatgaggcatggagagaacctgtagctgggagtgtcaagggccagggcaatgcccccacccagcctcccactgagataggccagctcctgcacgctcccaaggcaggggctccaggccctccagtgtgccagccactttatttagtatattggccccttctgtctttggtgcagcccagtgaggtaggtattattactatccctgtgtaccagaagcagcccacagctggaaaagaggaagagagcttcgcatcagaccttctcatccctcgtggcttcaacatcagccaaggagcctcttttaagagcttcctaggttttttcacaccagccccagagaaccactgtcctgggcccagccccacacacttctccccacccccgacccaacaatgactctgcttcgaccttcactgatgggcgttcactgcctgtgcagactccaagcttcgagtgcctgcttctcatgtccctgagctgaagccgccttcccatcactgcccccccaaagacattcacacctcccactgacttatagccaccctttggtggtttcaaggcagccctccacggcccaaaagagcactcacctaatgactagtggttcccaaactgcaatatgttcttgccagaaacatgagagtttgtaaaaatgtgcattctgactcgccaaccttggtggggaggaggcaggaatctgcacatttcacctgcaccccggatcttgtgacccacgcatgggtgacccacccatgcacctggagaaatgctgccctaggggttaaacagcctccactttcttcatctctcgggaccctcgggaaggcattccacaaagcagagagaattctggaaaaagggctgcatgcaagtgctaacgcagggaaggcagggaggaggtatctgctgttcacctcccacttttcagaaacaagatcagtgtggtgggcctgtgcaaggggagaggtaactctgggaaggggctgagaagagactgggacagccagagtgatctaggtggtgagggaatagggtgggaaggaaggtaacactgtaggtagcaggaaggagcgggaatcttcagatttcagagctcaaggggaacaatgtgctcaccagaggccagaatttaccccaggagaccaggattttaggtccagccttgctttgcaccagctgaatgaccagcccacaagcatctctccaacaaagggctatgaggaccaaatgagatgctgtttggaaaagtacaactggaaagcattgtacaaatgctgggtattgctattacactgacttggccagttctttattttacagatgagaaaacagacccagagagggctggtgacttatccaagattgcccagcttgctagtagcaaggcaagaatagagctcagatcttctgatttctgcccaaggcagacacagttaccttttgtagatcccacaaaggcaaataatcccacctttcccttgtccctggcatggaaagctggacaaatgagccactcaccctctacagccttcagggcccgtctgggctgggtctccagatgtgttcatcttctcctgtcttctagatcacaggtcccagaaagactgctgtccattgagctgcctgcactgtgtagccacccccctgactcctcctcttcctgactcctaaagacctgctcacacccacagtccctcataaaactggtggctgagttggtctagaaaaatcccaaccaggaagcatggaatgcaatggggcaagagttttattaggaaggatgagctgtcttccatctggcccagtatcttctctttcctttcctcaaaaatactatggtgaagctaggttatctaggaacatactgtgaaaaaaatcaccaacaactccaggcaggccctgcttataagtcaagcaagacttcgccaataacaataatatcaattatcaacaaaaatgtttaagcacttactctgagccatgcactgtgctaagaactttgcacgtattgctcagtttaattcgtaacacagccctatctggtgggtgttggcatcattctattgattagggaagtgaaacagagaggtgaagtaatgtgtccagtgggctcagcacaaattttacaactacattgggctgactgtggagattgtatagttaaccacccatggagctatactcagtctcaacatattgtgtacaactatattgaaacagtcacctgcagaggttcctagcccatagagcctagggaaaaaagtgggacctgcaagctattttgttttaaacttaagggaaattgtataattacttaggtaatactgctctgcgattaaaattcaaagtgtttatactttttgttttgcctggaaagagatcagctttggctgataaccctggccatctggtgcagattgggatgtcctagtggtgattttagatgtctctggttaatttccaaaatcagggaaatgattagttatcattatggttttgttttaaagcagagtgctacaagaaatttctcccagtatgtggctcatggtgggggtaccctaaagggatcctttggtgctggccatgtcaagtcttctgaaccagcaggggctcactggaagcctctttgctgtcactcacatatttttctacccacagattcagccagttctcatttgtttggggccagtcccaagacaagttctacagaatttcagtgatcttttggtaatctctggaaatggggtgctcccatgcctggagagcagcaattttggaggctactttgactgtttcaatagttttcctggcaaagtaaagagagaaatacaaacacatttcattaaatcagttcaggaataatatgtaggaaacagaaaattcttttgaggaaataagccaagcagtaaatatgaattatactttcaagttatggccagttaagggaaaaaagcaagaatgagaagatgtgagacagagctgccggtacccactgtaattgtaactatctgtgtgtgtctctttctgtccctctggactgtgagcccctaaaggcaagatctgtgcctcattagttttgaatcccaggaaactagcacagtgctcactatatcatgggcattccatgtatgtttgtggaatgaataaacctgcctcaattcaacaaatacttaggaaacactatatccaggccctgattgtatacacagagacaagtaagataatccagcatggtaaatgaagatacagaagtgtgttgtgagacagcattgggaagggagaaccgaggagacttcccagtgaaagtgactgatctgtagtgggttttagaacatgagtaggagtttgccaggtggaaacggaaaaggacattctgggcagctagaagatcgtgtagaaaggcatgaaatgagaatgcattctgtgtcctgggaactataagcagttcaggtaatgacctggagacgcacacatttgaaagcagaactggagcagggagcaggagtcaggtcatgacaaatttggcaggaagagagctaaaggcctaggattacctaggagctaggaagccagtaagcaatgctaagcaatggagcaacacatcaatac

SEQ ID NO: 1242242 - DNA, 4001 bp, Homo sapiens
gagaatccctcgagcctgggaggcagaggttgcggtgagccgagatcgggccactgcactctagtctgagctagagagtgagaccctgtctcaggcaaaaaaaaaagggggggaaaagggaaggggagggggaggggaaaattatggtgttaggcaagagactgcactgagttaagtgggtgtccagggactcctacctagcagtcccagagtgtactgtgtgacagtgttaaagtcacttcagttaaagtctccatatatgttagtcacttgtgacttgctgatctacaactaccaaaatgcaataactggtgttagtaataatgatcatcagacatcaagaaaagatagtagcatcttcattatgttctggtcctctatgtcaaggaagaaaaattttacaaaactttttattaaaaacagctacaaatcataaatgctagtatttaaagagctaactttagttacctagaacttcatctagaacttttcccattactattcataatttagattgtgttgtattttcagtttttaaatttgatttttaactaagatcgtttagcaattctgaaaaatagatttgcataatcagcatgcacgatagcgctttttttacacctgttaaattgtatttattgatttaagtgaaaccaaactccaacattactaaatgccacaatgaactacagttagactaaatggggaagcctcacctacctgacttaaatactaagtgccttaaggtgcccacatgatattgttaatatagtaaagtcttagcacccctgaatttgaccttattggttttcagctttcggggagggacaaaaattgctccttggcaggtcttaagttataatcctgcttaactaaggctttgaatgccgtgtgcgcaagcatgctctctgggagcgcatcctcaggtgagtgtcccagaccgcgacccacaatccacatgctctccaaattttaccgtacgggtcaacctttttttctgtacagggccagagagtaaatacttcagtctttgcagaccagactgtgtggcaaccacttaaccccgttgttctaacgtgggaaagcagccatgggcaatacgtaaaggaatgagcgtggtggtgtgccagtaaaactttattcacgaacaatgaaatgtgagcgtcatgcttttccacaagtcatgaaagagtacatttcatatttactttgaaaatgcaaaaatagaacatcacacaccagggcctgccgtggggtggggggaggggggagggatagcattaggagatatacctaatgtaaatgacaagttatgggtgcagcacaccaatatggcacatggatacatatgtaacaaacctgcacgctgtgcacatgtaccctagaacttaaagtataataattaaaaaaaaaggaagaaaatgtaaaaatcattcctagctggccagcagctgtcacacgacccctgcacggtcacacgcccaatggctggggaaggatcgggtgggcagaggaaggcctccggtgaggtgagggggttccacccgcgcccacggcccgcaggcgcttcccgtctcatctgggccgcgccgcctcagttgctgcgttccctgaccaggagaggagagggacacccctcggcgtcgaggccaggaccccggacagtgggggagggaggcatgtaggaccagggagaaggaagggccaggcttcgaggtcgcggagctcgggaagttcccccagggtgtccccggtccgctgcctcctcaggcccgtcactcactcggataagccggcacagacgaaggccatagcaaaagcgcaactagaaggactaagggcttcataggcgtcgtccgtagcactctgccatgcgaccggaacgtcctggggccaccaggctgggaacctcaaggccgaaagggaaggtgtcagcggagtaccgtcctgcctcaggccctgggacacccagcaacggttgtccccagcgcgcaagcgcagcggcatgggggaggggagagcgagcggccaaggcccgcccctcctgggaccgcgtgcagggggcgggggatcgcgcgcgccccgccccgccccttcctagtgcgcatgctcgctccgccttcgtaggtccgcgcctggtgtgggctgggaacgcctcgacgcccggctactgcgtgcggggtgctgcctcggggcgtgcggggctcggcccatcctgcgcggtagggataccgccgtggtttaaacgcggtccctgtgaggaaggaactgtaatgggagaggcagataacctggcaattaccacagcgtgaaagggggctgtagtgggggaagcgctaggtactgttgtgcacagtggaaacccacccccggaagcgggtggggagcttggctaagtggaggacagcttggagcaccccaagaactgagcatagttccggcgagttgcattgtggggcttgggagggcagttgttggaggacagggaggagaggtaggcaagggcattaaaaacgccctaaggggcttgggtgtttttgtttttcaaaagatcacattccatttctttgaccttcttaaaaagataggggtagggatgagggagagtacgactatgaaaggatagcatgaggttgttttggggactaatagatggcagtggccacaagaatctatacatgtgttaaaattcacagaaggccgggcacggtggctcactcctgtaatcccagcactttgggaggccgaggtgggcggaccacctgaggtcaggagttcgagaccagcctgaccaacatagtgaaacttcgtggctactaaaaatacaaaattagccaggcgtgggtggtggcacacgcctgtagtcccagctacttgggagactgaggcaggagaatcacttgaacccgggaagcagaggttgcagtgagccgagatcgtgccactgcactccagcctgggcgacagagcaagactccacctcaaaaaaataaataaaaataaaaattcgcagaactgcacatcccaaagaatctgtttttctgtatggttatttttaaaaattcacgtacactcatctctgcctcaggaagcaaggggcttggattttagtctgaggcaccagtactagagtactgctaggttttgagctgggaacggttgtgattagatttgtattccagaaaactcactcttcctgtagcatgaagaatggactggagggaagcaagactagaggcgccggcggaaactgagactgcgcacggcgcttgcgggccagcccgagttccgggtgggcgtgggctcggcgggctcggtgggcccggcactcagcgcggccggccgtccccgctggccacgggcagttggggggagcttagcacctgggccaggagctgctgtgctcgatttctcgccaggccttagctgcctccccgcagggcagggctcgggacctgcagcctgccatgcctgagcctccctgaggagcgccgctccctgctccacggcgcccagtcccatcgaccgcccaagggctgaggagtgcgggcgcagggccggggactggcaggcagctccacctgcgcctgggtgtgggatccactgggtgaagccagctgggctcctgagtctggtggggacttggagaacctttatgtctagctaagggattgtgaatgcaccaatgggcactctgtgtctagctcaaggtttgtaaatgcaccaatcagcaccccgtgtctagctaatctagtggggacttggagaacttttgtgtctagctcagggattgtaaatgcaccaatcagcaccctgtcaaaacggaccaatcagctctctgtaaagtgaaccaatcagcaggatgtgggtggggccagataagggaataaaagcaggctgcccgagccagcagtagtaaccctatggagtctctttctgtcgtgtggaaggtttgttctttcgctttttgcaataactcttgctgctgtttactctgggcc

SEQ ID NO: 1242243 - DNA, 4001 bp, Homo sapiens
aggcttgaaggagggtgtggagctaggaggtgttggggggtcagaagtgagaggcgctgctcctacgactgaattataagagcctcctttctcattagactgatcacccaaaatgggaacaaggtcagcaggaagagccagaggagagttagggattgtgaatgctattttctcatccatttttggtgtggtggaaagtggagggataggcaggatgaggggtccagtagccaggtcagccaagtcagggatgggcaaaggagctgagacctgggaagtgtaagtggtcaggggcagggagtctgtggtctgcacaggttgggagaaagaaggggcaggctgggtgatgctgctgtttgtcatggtctctgttttatcctccaagattctgctattccttttatactcagggctcttctccaaggtgtgtaggtctccctcaacagacaggcaggggagcttagcaggtgggggaagctcacctcgatcccacagcaatggcagtgaagggggcagcggcagcagcaatggaatcgacattttccttttgcagggcctgttgcgggcagctctgggaggagcagcgctccttggaggaatacagaaaggcttctcatcaggcatcctctttccggacatcagcggaatcggcaagcctagggagctgggcggtggctcttcattcagcacttccgcagccaacttctgctgcagcagggagcagccaacggctggctcagggggcgctgttgcatccggatcaggctttccaagatgccgggcacatccggcctggctgtgtgtgctgggcatggcagggccttccaagcaggagctcgctggagacgcctgggccttctcactcatgctgttttctgagaacttgtggtagacatttccctccagaggcccagggctgcatctgaaggaggccacgtctccctgggtgccctgggacctggatgtggacgatgcttctccgctgctaaggggggtccttttctcgtcatcctccccttcgatctgcaccggatcctcatccttcttcactcttctgggcccttcttgggcccacacctcggtctcctccaggagagtggctgggatgggcttcctggccttgaccgccggctcacgtggtgaaggcagcaggagagtgaacatgcggctgggaggagggatccttacggaactggggtgtccaaacctcggggggttccgagcaggcagcatgggtgtcttcctgatggccagcccccaacccacagccggcaggacccccagaggggcggccgcagcccgagggagaggacacggcctcttaggggcgacgaagatgctggctgctgaaggcctgcgacgggcgttccggcggaacaggccgcggaaagggcgcggggtgggtacagagtgagcccgaccgggcggggaggcgtcccgggacaggggagcgggggcgccacgccctggccctggcaggggccggcggcggcacccgggtctaaatttactaagtaaattgcccatttagagctagccgtgcctcctaccgtaaaacagggtcagcagtggactcaactctcctcagccaccgcctcctctggcgaccaagcacaaactgactggctctacgcctgcgacgccgccgcgaggttcctcacagaaccagggagcgccagcgggggcgcaaaaggcaggggtcagagggcaaagggcgacgccccgtcggccccagctgccccaggacccccggaagccccgctgccggtggcaggtgttgcaccgcgtggcctctatgagggaactgctggggcctgcgggcccatcgccagagctcttgtcacctgggcgccggctctgcctgttccttagccctggcccggcgctgttgcacgcagtggccctgtgtcggccgtccccattccccggttcacagagggcacatctgcttcaagttaagcacaggacaacctatatcctgccagcctcctctaggaccttggcagtgctctgtgctgcctggagccaggtgtgccgtctctgtggcgccagggtcaccagccaggccgtgagggtttccgaggaggggacgtggtgccttgtcctgactagatgctacgccctaccacatctcttcctggcaggcagggcctcttcacttcttttcacaaatttgttttaaacaacatttaaggctgggcgcggtggctcacgcctttaatcccagcactttgggaggccaaggcgggtggatcacctgaggtcaggagttcgagaccagcctgaccaccatggtgaaaccccatctctactaaaaatacaaaaattaactgagcgtggtggcacgcacttgtaatcccagctactagggaggctgaggcaggagaatcgcttgaaagcgggaggtggaggttgcagtgagctgagatcacctcactgcactccagcctgggggaacagagcaaaactcttgtctcaaacaaaaacaaaaacaaaaaaccacaacaaacaacagcaacaacatttaagccttaggctgcttgctccttgggtcattgatatgacagtggcctagccaggcttcgaacctgggctgtgtgattccagagctggtgccgtggcctgtgtgcctccttgttatggacacatcatgtattctcattatttcctgtagtccttagggtacctagcacacagcacatctgtattaagcacatgcgttcctagggggaagcccttacttcacctcataagttggtcatggcaggcactgggctccagtctcctctgaagacatggggcagcgacccccaatagtcagcaaagcagcatcccacactgttcttctaattgagccttgcagcccagatttcctttttggtctagtttgaaggatctaaatatgtaaagattatagtccagatccattttggcctatcccgaaagaaattcaccagtggattaatccaaatggataagccagttctctggccttcttggaatatgttagaaagcaaattcatcatgtatttgcaagtcagtagtggagcaatgtattcgattaaaatatgatcaatacaatttggtcattgtccgcatgccagcaaggcccactctttaccacacattactgtcacctaagtataactatccatattcttatgcccaaggaaggagacttaatattggtttttaggacaaaggaaatatgtgttactgttttaagagctggaagtttcagcatgacaagaaagatttggaaaatcctacacatgaccttatctagttttaatcttgtttctttggtttatttaactggactgctttgctctctttgggctaatgttgtgtgccagacataggacatgtggaaggttcagaaccaagaatcagagatcagtaaaaatattttaatgtattttttagtttaaaaatcgatttaaaataacatcaaacctagttaacatactacaaaatcctttttatccccctgttcatatattttatactatgtcagagtaaatgtgggcttccatacccaacaaagcttatgtttctaggacacaaagttttgctcagacccaaattctgtttaaaaagaggagacatattataagtccttcctaacctctcagggaaccgagaaattgtttacaattatggcatttaactgtaatctcttgatatcatttgaggagagtttaataaaaaataatctcttgattttatttgtttaaacaaaaagaacaatctggtacaagttttggacaaagatttcctacaagaactctgaaacaaaatcaaatgtcaggcttatttgaaaacaataaattacagcattttcccccaaacaggaaaaatgcattaaacaaataatgaatattggggcttcaggacaataaaaggaaatttggacaagggtattccagaaaaatccacctctttatttttcttgtcaaatgggaatagatgctttttttgaatataaaatcttccttgtg

SEQ ID NO: 1242244 - DNA, 4001 bp, Homo sapiens
aaatgtttccttcctgacccctgcagtgatatccaaggccatgaagcacacataaaatttggtactacgaacacatatttaactgatggatattgtcaatcctttattcgttttaggaataatgaaacaaactctaacattcagcattttaaacccagtttctcaaaaaactccactggctctatcactgattttttaaaatttaaattgcagcctctctaataagagtaatcataaattgttctggcctaacaataaacaatgaaagattagcaaaaataatttatagttcactctccagtactgacttctcataaattccttcacagaaaaaatattctttaacctcttaatggctgtttccacaagggcagaaacaggttcacaatcctagactcacttgtgaaagatcaattcagcagctgaatgctaacacatgtcttcaatcagaatctgctctgtttaggtccctatgcccatgattccccaccacttctccatcttctcaaaggagcttcaattcaaaacccagtaattctctgctttctactgtaccacctcccaggggccactttcatgttcctcggaaataacgtctcttctgtcttgaaacttttaaatctcaaaaatccacttccccatctccctgtcgccagtcactgccctcaatcccaccactgcaattagttgcagctatgtgtccctgttttcccaaaggcccgaccaatatcatacagcatttgccacatcccaactcctcccttccctaatttatcctccacactgcaaaccaacattacacccccgacttcctgcattttactcccttcccttatttttcgtcttcccccacccccatctctatacccaggcctccttacttctctaataaatattcccccacctcagttccaaccctttccctccatcctctgctcattttcctctccttatttagaaactcctttttgctctcccaaccactaccctagaatgcccagcactccaccctctttagcaaacccagccctcttcccccagctcatttggagacactgctgcttctctctccaggtcccctactgcagtcaacccactccctcatcttcccacccaccttccctctatccctagatccaaggttccctgattctttaccccctcctttggtctctagtactcagctcaccattagtgttcctcaggactctcttccccccaatttcccccttatttttaaggatgtcaccagtcctacggggcctcagtagaatcctggacgaccccagctcccggggggcctgacggacaccaccatccccgtcgcccggaacacaaacgccggtcttgtgccaccctccctaagagctgcgccccctcctcatccgcccccgctactccagctccccacgtcggcttcctccgtgtcccctcgccgacccggcacgacgagccccacgacgtggagcctccgagtgggcaacacctcgggctcaccccggacgcccccgccgctcggataggagcctccggtcctcacacccgcgcctcctcaaacccgcagccggtacctcctctcggacccgcagcccctcagacgcccactcggcccccttccccgagctccagcgtctcctcaggccagagccgggccccctccggccccggcgcccctcaacccccgcccggcccgcccccggcgccccgcttaccgttctgagcggcgcctggccctgggaggagggagccagagaccagcaacagcgagagggccagggcgctgggcagcgacgaacccgacatcctccctagcagaagacccaacagcgaatgggccggggccagagccggggccggggaagggaggggagggagggagggggcgggcgagtgcgcgagggagtgagcgagggaggcagccgcggctcggctccgtccttccccgtcctcctcctgccgccgcagcgcccaggcctcgcgagaccttcgctccgggtcgtgggcggctgaggagcgaccgccgcaaggatcgcgagaagaggcggctccgacggagactcccgccccgcggactcggtggccccgcccctgcagaggctgattggcctagcgcgaggtaggtcacgtgccgagggcgcctctggccatgtgacggggcgaggcgggactccgctagctctctgggcagtggggagctgggaagtccttcagtttactcctctgtggcccgggagcacccataaataagaggaagctttggaacacagtacatttcctccacccatcctgcctttcatttgttagcgctcttggctacagagtttcatacaccgtgcctcctttcctccttcctctctttgtccccgtcctgctgtttcttccttctggactttgaacatagacctctactggtaactggctccaacctccttctctcatctgctgttttttccttccaggaaaagtggtgcgccccctgtgcccccgttaccttgtgctttcctgcctggacatctgctccctttgcctgaaatgtcctcctttgccgcctctgcctactccccctcccaccccacatctgggccttattttagcttcatagactctcagggcctgaagttcagctagcctaattgcatgttcattgacacaattctacaaggaagtcgtgtatgaacttacatgaagactcctaagaagcgtcttaatgcggaaaacatttattgagaacgtgctgtgtgccaggcacatagtgaaacccacatgaaaaggtagtccccgtcctcatggagtgcactgcctaggctagcagaggagtgaggaagggtcaaatggccccataggaaaggatctagcaaagcactctggagggtgattggcagtgtggttactactgtttgcatagaagtttgggaaatgctctttttaggggtattttttgtactaccctcagggcttgtggttggcaaaggaatttctatggcttagctcatccctgactcacagcagacgtcctgggagtgtctgtggaaactctgaggggccaagtaaacagtcctggtggcctgacttgatttaaagagagggtttggaggacctggaagaaggagaccctcgcaatctctatcaagctaaagtggtctggaactttcaacaggaactgaacagctggtggttccagaccaaaatttctagcaaaggccaggaccactatggcatgttgttgattgaagtgaaaactatgtccttcaaaacctcaggtgtgtgagtgacaaaaagattggcatgtaccttcatctggacaaaggccattctgcagacagcccagtaaggagggctacagggctgcctgtggtgggatcaagattttcagctgatggaagctttggttggatgcaaccattctgcctcattatagctgtaacaaatgtggctctttgatccttacaacaagagattcttacaaaatgatcatggtctttttgtggatagggaagctgaagccaaaggaggacacgaacggctccagctctcagaatgtttgtattaatcattaatgccaacaatctggtttgcttgttaatagactcatggtagaagtgcattttcttgtccccttgaagtcgggagtggcattggatgtgcttgggtcagtgaaatgtgtaaagtaacatgcattgcttcaagcagaagcatttcatttccagtttagactctttcccatactctttcgtcttggtagtgattactgatcatgacgatgaaagcatatatcaaaacgaaccttgtgtcagcattagtccctgagttagcataataagcttaacccccctgctaacccatacagaacaggtaccctctgttgaattaaactgtgagattcaaggggtatttgttcctgtgacataacatagactgttccggctaatggaaagatgaaattcaagtccacaacaccaacattaccatccaggagctctgtcatcttaggcaaatgacct

SEQ ID NO: 1242245 - DNA, 4001 bp, Homo sapiens
cccagcctagctccccagcaggcaggccggtaggtacctgatcccggaagggcaggctggagaacacaggcaggttcttggcccacttgacggccatgaagagtaggcgagccgaggtctcatggatgctgtccaggccgcagggggaggaagaggagtatggagaggaggggaactcagggtcattgctggtgacatcaatattctcatcagctgttggaggaggaggttgtgatcttagcgcctgcttctcgggaggtggcagggagtacttggagccccgggggagggaggatcaaggcaaggcgctgcagccctgctgtgacccgggaagccaagccctgctgtgccctcagctgctctcccactcaccatcctctggctccagcttagcacaggtttcagctgttataaggctggccatgaagtggtggcccagggctctggctgcagacatgggtgtggggccccgtgggctgcgccctgccggggccgggggagccaccagggactccggccgggactcagtgttggactccatgctgtccaggtggacctgggctgtgcttcgcggctggcgctcgttctgcacggctggggaggcaggaagggtcaggacgacacgccagtcccgctgcccatttcttgtcacctccccccgggccagcccccgcctcaccgtcctggttcatccccgcctgcaggcacttcttcagccggcaggcctggcactggttgcggtgggccttgtccacggggcacatccctgcccccacctggcacctgcaggtgaagaggagaccccaggggtcagtgtccctcccatgccctgagccatgggcttggacatttttgcccaagcccctcttcccctgagcaccccctcacccctccagaacccctcaggggcagacgcccagcagggcccaccgcactcacctgtagatgagcctccgccgtacgctcctcttgaagaagccgctgcagccgttgcaggcatagatgccatagtgcttcccgctgctgctgtctccgcacacgcggcactggagcgaggggctcacgcctgaggggcagggggcagggctgggccagggcagggctgggccggggcagggctgcacgctcccctccttccctcgggtccctttcccagtcctcaggccccgctcacccgcatttgaacgaacccacgcgtgactcttccatctggagaagtgtctccctcactgtgcatccacaccccagcccccacccccattccttgccctctctcctccctcaatggccaattttcagcaagagtccgagccctagctccactttcccagctcccatcccttctctgtgggtggcttcaggctccatcatcccacagaaacattcttgtcaacgccactagggacctctgtgctgttaagccctaagggcgcttctctgttctttccttccccatcggctaggctgtcctgtcctggctctgcagcctgcccgcccccaacccccatccccgccccaccgtgtttctaggattctgggtttacccacaggctaccccacccttgcccacagccggcggggctgggtctgagttgttctggctccttccatggtccctgcgaacctctggcccttaccctgctccccaagggcccagacccaaccctacctccaggagaagccatacctgtgggatcctcccccaggccccatctgcctggagactccttcctggaggcagccccagctgcaggcgcagctgcagccactgtggagctcatcagagctgttggtctggtctccatgggttacagggcagcctctgcctgcctgcgggaggcctgggttgctgagcctggcccagcctttgcctcagtccatgaacctctgtctctctgtgcccctgtctcccttcctgaactctgtctgaactcaggagctgccccaaggtcccgaagcccctcacagcacaggctctggcttgaggagatttctcccggggcagccgctggacgcagtttatgatcctcttaatctttactgtctccacaggggatcaactggccacacctgcagcattaccaaggtgccccgggagccggtcagtcctgctaccccatgctggttcccgggctgcccaaggtcccccggggccctcctgccctgtgtgctcagctgttcaccatttcatgccacatcttgaagagaggtgtggactccacctctcccaaggactttaaatctttttctttgttttgatacggagtctcgctgtgccacccaggctggagtgcagtagcatggtctcggctcactgcagcctctgcctcctgggttcaagcgattatcctgcctcagcctcccaatcaggtgggattacaggcacctgccaccacgctcggctaattttttttgtatttgtagtagagatggggttttgccatgttggccaggctggtctcgaactcatgacctcaagtgatctgcccacctcagcctcccaaagtgctgggattacaggtgtgagccaccccacctggctggactttaaatccttttgagctgcttggcacacatccgaaggcaagtgtgtggccagtgtgtgtgtctttgcctgtgggggtcctgcctgagacactccccttgggtcctaggtagatctggctctgccccacgaggttctcactccaatcccttggaaagggactgcttggggctcacgatttgaggatccagcccccccagaaggctagcagtccccagacacctggcacagaggacgttcccagaaccgtcccccgtagggtctgaggctggcctggaggaaagaggcctggatccccatctggagggtctccttcaggcctgtgagggggcagaagaggagctggcaggctcctctggagagccaggcctgcaggactagagccagtgaggacacagccaccttgagcctggccacgggctctcaggagtcctccccttccccccgaactcggcctcacagctccgcctgcctcttgccacaccagccccctgcgctgctcccaggtccatccttcccacctccagcccagcgatgcctctgctcctgtgggaaggagagggaaggaggaacttgtcttacatccttgccttatagtaagccccgggcccccgcaagggagtgtggagagagcagaggcagacccaggttcaagtaccttctccatcaccggccagccatgtgtccctgagaaagtgactcaatctgtccaaacttcagttcctcacctgtaaaacaggatgagaagagcacctgtcctatggtgtagttggggaactaaagacaatggttcaggaaatgtgtttcagagcctggtactcagtaagaacctaataaatggtgtgtgcagctgatattgttatattcttggggttactgagaaggtcacactcagcagccttttcttgcctgctcctccacccccaggcccacttgccagccccctccctgcccgggacagagctgaaagcccatgttgtcctggaggggaccacttgtccccagcagaccagagctcacctcaggatgagctggggtggggttggtccagccttagaccccaaggggaagcgggcggagcgtgaagcttccagaaggatcatggagttaaggggacagggggcggggcctggcccttatgtaagtggggttaaccctccctgtgacagagaagcacaattagggatttgggaagtcagctcgaggggctttgcagggtaatccgctttctggggcctcagaagatcgaggccaccgggctgggtgctctcacctgttctcctctcctccgtcctcacccctccctgcctcctctgccaaaaagcccctcaggacaaggtctccagctccacctaagactgaagctgaggccatcctccatggatttgactggccactccctccttcccgaagccgctctttcccatctcttctggaacacgggtctttgccttga

SEQ ID NO: 1242246 - DNA, 4001 bp, Homo sapiens
atgtaaatttattataatgagaagaatggcaagctttaatttgcctagagaaagttgggacaacatttgccctaatctaaaaaagaaaagaaagaaactcaacacccaggaatataattttcttgcagaaagtggcctgatgggctgtatttctttacagattgaatcacaatatgaatacagaccccagcaaatgccgagtttaactctgaactcagtagaaaccagttccgtcctccaggattcattgaattcctcctttccctcaatctagtccgtgtgtgtttttctcttccaccacactggagctccatgaatagggaaaggggcttccattgtgtccctctgaacttccaagtcaatgcaatttttaaccactggcttgtggtactttgaaaatcaccaggggctgtcagagttaggtcctctgaaaaatttacagtgctaaatcagagcatatgctgggagggaaaaaattgcttaagattagagcaagtacagtatctgtctgccccctagtgtaagagtcctcgctgcctaaaattcaactttaaaagaaaaggagctcttaaagggaaacgactttggactcacgtaggcataggagaacgaaacttctgtacattttaatctgaataattcttcaggatttaaaattaattggctctggcttggttggaccgtactcggatctcgccacctctgcgtttcccgagtcactggcgaagaggtgatttttttttttttttgaactgggtttatgtgcgtccccctcaccccctcctctctttttctttctctctgtctctgtcgtctctctcgctggctttttaaaaatgaggaaccgctccttgaatgttctggacagagcacagaattgcttcttaagtcagcccggcgcggttgcaatagacagcaaaaaggtaaacgtttgcctgaaatccgcacgccagctccaccgccccgcccgatggtgagtacccttctcgtcgcgattctcctcctagcttaaccgagcgctcgcctacccgaaccgtggccgagggcgccgggctaggcttttctccctccctgcctgcctggctgtcagttgcacaaggttgcaaaatgaagcgcagaggcaaagcgaacagtaaattctgatacttagtgcgagcctagcagctcctttgctagaaaaccgagtcatctgctgcttgcaaaaccacgctttataggactggtttttagtttgctctgtggaaggaaatgagtttgaggagacaggacgaggagataggaggctccgcagtcttaacgcttcggtttaatcatattttggcagctttgcaattgtattttcccccctccccctccaccatctctcctaccacacacatgtaataaaatatggcaatgcattgaattgactctgatccccccttccccgaaccccttaaaccacagtcctcggcatttcatacacgttagcaaaccgatattttgaaaagccccaagtcatccccaaccccacacagcacaagcagaaaagtgagaaaggaaagagagagagaaaaaatactgtaagtaaacataccaaaaccatatttgccttgttcaaggtcccaaaccgcttgcatcttcctcctaaactggaataactctcctttagtttggcgggtgaaataaatgctttgttggccccctgaaaagatgtgtctttgataattaaagagaatctcctcctcggtgtttatctaagcgattgtgcaaactgataaaaagtaggcactagcctgcagggaaaaagaggaaaggtgaagggagagatcttccacctcaaggaagtgcttccccatgtattaggctctctcagccttggaaaaccctgcacactaactttagagagacaaggtttcagggagctttgtacatagctgctgaggaatgcaagcctcgcctttaagaaaaaaaaccccaaaccgtaggtaggagatgtctggagtgatccttgtctctcatctcattccttagaaggaagagtgcgttgttacaccttgtttggggctggaaagacgagactttaaaaacacccgtccaattgaaaaaaatctcccaacttaatgagtttagtcggaggctggagcaaacggctcagcctcagcagaaaaccgccaacaactataggcgatattgcaaagcaagacgacccaaggcacagccaaattccactgtttggggtcgagagagatggaggctaatcctaaagcaagttgggaaaaaacagaggtggaagaggagggggaaaaagcatcagcctcgcagactggcagacaggcttccctcgtcctggatcaaagatagaacttgagacaagagggcaacatttttcctaggaatcctttggaatcctcattttctacttttaactcaagtctccccaagtgatttttccccctctcccctgtggatttctgcctcccccctttccggtccttattctagaactttcctgaggaggaaatctatttcttttggggggaggggttccccattccatgccttcagataatgaatgcttcattcaccccctccctttctctactccccaaaacgaataaaggaagcaagaatacggtaactagtgaaaattgaatataaactatgctgcctctcacagtttaatactgtcttaactaatggatttttgttttgttttgttttaagagaagaataatggggaaacacggatcttttattttaggaaactgttatggtaagatgtatgtcagacttgacaaatggaactaacgctcttcggctgcttcttgtccttgtcttaaacaggaattaagttaaacacagtgctgaatgttaattacatgtttactggctaatgaaaattacaaatggttttgccacctcaaacaatgatgaaaactctgaagacactgtaattatatactttgagcaaaataactcagaatattgatcataagaagtgtaaatcttttttaactattcattaataccataaatatgggctacagaagtttttccttgcggtttgtctcatcagttatactgagtggatggatggtgaggctcctctggggaggaggtgaactcattctcttagtagaaggaggccacttgtgtaactcgggggtgccccctccctttcgcccccgcccccttcatccccagccgaaggtcgaggaatagttgaacaggaaggctggactcagggcaggtgaagatgatcacagcctggccttttctctcccctccctgcccatctcattcctctcccttctccctttcctgccagttctgatagatgactgccttccccagctcgggcaccagtgggataacctggcattcgggggttcctaatggaggaccagttagaccaagaaactcacccccacccacaacccagccgtggagccctgacaacttcaattccctccttcagagatggctcaggcagttcattgcaaaagaagaagaaaaaaaagttagggatggaggttgctattgggtaaggtggctcaggcggctgaaccagaactggtttccctgggtttgggagcagaaaaaattttttgttgtggttttcttttaactttggccaaagttgtagtgctggcagccactcggatctaggaggtcaaaggtgagggctgcactaaccctaaacggctgtcctggcctggctacaaggccaaacaggcaggggaaagggggtttgtcagccttgcagcttggcactttggagggggcatctgtggaacccatacttggggggcacagcatcaagtgtgggttttaagtgaaatattgaggatttttttttaaaaaagtgccctaggcttgtgggactagagtcctctttttccctgagaattcccaaggcgctggtctttgtcttagaaggaatggagtttctgaatggtgtgaaagggacagagagggtcgcttcaaatcgattttacttgtcctttctgtcttttcgg

SEQ ID NO: 1242247 - DNA, 4001 bp, Homo sapiens
tcggctgagtcaacgtgcagcgccttgagcttctccacttgctcttggaagatccgtatgtggtccataaaggcgaccacccggtcggcggacatgggcgaagcatgcaggccggcggcggccaggagcggggcgacgtggaggggcatggagcactgcgccgcattcaacacaaacagctcgctccaggtgaggcgaagcagggccacctggtccgtgatctgcaggtcggggaagaaggggatgttccgggcccactcgacggcgctgaagagcatcctcgcggccagttcgcaaatgttctcgatacccatgatgttgttgggctgcatgcattggctgccgaagcgcgacgtgggatagggctccgcgcgcaacagcagggaaatatatccggacaggtacgagtggcagttgaggggatccccgttggtcagcgcgaactgcccgtgggtcggctgggtcggcggcatcctgcccctctgcaccgctgcggggaggaaaggagacactccacagttaatgaccagcctcagtccccaggttccccggcggggtctgccccagcccgacccccacctgacccaggccctgagcagcgcaagaaccaggcaggcctgccacagagctggagtcgccaggctcttggcaccattcctttcaaaccaccacccaggcgagctctgagggccagaggggcacacttgcctccgaggcccgctcggggctggtccgccgaggacccagaattggccaccttgcctcggggtccccggcgctgtgggcgggatgtagcattctgagggcatctttcttctttactgctaaacagctgatatttcttattgattggaggagagggagcgggaggggcgagtctggggggagggtgaggcgcttttgcaaaaggcacgagggtccaccccagacggcctgtggccactccggaacgactctcccacaaaccccgaagccccagccccagcccggcggggaacccccccagtgagagacaagcagagagcggaggtctggcgtctgtctaatcagtgtgctcggagaaagagacggagggagagggcggagagagagaggccggctaaagagagaggaagccgggagaggcagggagcaggcggccggcactagcggagcctgggcagggcctgtaagggccggggaaagccggcgaggctcgggcccaggctgttatctgactccggaccgggagagtcgctctcgcagaaacacaaagaaaccccggcgttggctcgccccaacccggagcccgcgccccgcgccgagcgcgccattggcaaagcacggctcgcggcgctcggcgaattttatatcacaaagacccaactcgcgcagagcgaaagcagccgcccagggcccctcgcccaccctttcctacttcctatcgcgctctcttcgtttcaaaaagtgaaaggaaaaaagaaagcagaggtatttttttttttagcaggatgttaatccacggagggtcacatgagcgctgcccgggcggcagcgttaatacggcgaagtgcataaaattgccatttgtaatttgaacctcctgtacaaaagtacaatctcaggtttttttttttttttttttgagagggtgggggctggggaaaggggtgagggggagggacatgttgaacatgcaggaaaaacaagggcagagagagagaagtaaactaggctttaaaacaacaacaacaaacaccccatcccttgcagaaaggcagactccagtgaactcacaatcaatgcaaaggaaatggaaacagcccaaagagagagtaaagaaggaaatcagtcggccaaagcatgcggatttggggtctgggttccaatgcagaactcgcttctagtataaaacccttttccgctgcaatacgaagagaagagcttggggcttcttgtccttacccagagcaggctagccaaacgtacccaggaccccgggacccaggacgagggaaggagaaatgagaggccgataccttcccgtctcatgcccactttgaggcactttttgaggcggcagtactggcactggttgcgatggtgctggtcgatgggacagttccggttggcgcggcacgtgtagctcaggttcctccgcacgctgcgcttgaagaagctcttgcagccctcgcacgtgaactggccgtagtgcttgccgctcgacttgtctccgcacaccacgcactcgatgtgttgctgctgctgctgcttgtcgctacccgggccgccagggccgccctggccaccggccgccgtctgggctggcgtgctggctgggcccccttggccgggcgtctgtggcgtgtgcggggcgccgggcggcgggccgggcacgggcggcgcctgcgaggcctggctgccctgtgagccgggcacctcgtcctgggggtcgcgccacgtgctgactaccattgccatatctatgggggctgcgtccggacttcctgctcccctggctgcgggcggcggcggggcggcggcggctccccgggtctcgggctccggcgcgccgccttttgtgtgtgcgagggtgcaagagggcgcgggagggcgccccgggtggctcgggggctggttggttgaggttggttagtttttccttttttgtttttgcttttgcaaagttttgtcgatggcttgtctggcccggtgtgtttgttttgtttgtttctctcggctcagctttgttggtttcggggggctttccgccgggaggggaggggaaggggacaggagagcgagtgggagcagaacgtggagaaagagggaggggagggagagctgaagtcgattgtctggcttcaagacagaagtaggaggcaaaaaaaaaaatctctccaaagatctcgctcgctctcactctctccctccctctctcgttcactctcgctcttagagctggtgtgcagccgaggagttggcggaggaggaggaggaggaggaggaggaagaggaggtggtggtgaaggaggaggtagaggaggaggagaggcgactgtccgggggccaagtccagggcagcccacagtcagccattcaggaaagccatcgaaatcaggaggactaggagatcggaggcgccgggtgcgggcgcgcccagggagccaggcaggccggggcggaggccggcggcccgcggagtggccggagcgctgcccgggtccgggggaatcagcatgaaagtggtccgcgtcgggcgctgcgcggcgtcgtcctggcgctgggccgccgccgccgccgcctgccccgggcgtccggcgcgcgcctcgctctctccggccgccgccgcccgcagtcgctgggtggaggccgctcgccgttccctgcgggccgcccgggccgccgctgccgccggagccgccgccgaagccgccgggtcgggcccggagccgctgcgtctagcgccgccgccgccgctgaagtcgctgctgccgctgctgccgccgccggagccgctgctgctgctgctgccgccgccgcctcacacacatagggaaagagtcaactcgccggcggcgggggagaaatgataaaagagagagaggagggcagatcaccacctagaagcacatccttcgtgcgcagaggggggagaaaaagacggagagaaagaatgaaagaggggaaaaaaggcagtacggcacccggagaaaggaggcaactcggggagaggaggaggagaagaagaaaacacacacgcgcgcacgcacacacacaccgcggagagaaaagaacagagaatcaaagtgatcaaatatgctaaaaaggggggcgcgggagggaatgcgatttataggcgccggggctggcagaagtggcttctccgcgatcagctcactgagctctctatatagtgaactttgacacgactgctgcaacttagcgcacgttgccatggcgacggcgcgccttataaggcagcagccggggttggcctggccaggcgcgcgcgcgccgcc

SEQ ID NO: 1242248 - DNA, 4001 bp, Homo sapiens
ttatatctctagcaacatccatatccagcccaagttggcatacactttgggttgtttgaaaattgccttaagtgtttgcttgggcaggggaagcaagaggccagagtcttcaacctcctgcagacattctgaagagttatgacggtccctttcctcctgttgccccatcctgacacatcttttcgcctctcctggcagtctgcattattccagtaagaatatgattttgaaaattgctgccctcaggttggatttgcctggagctccaactcctattgagttagcaggcaaacttttccctgcagagacaatgtcagggctgctccactgcccagggcatctcctggaggcccagccagggcgctagagaaaaccgagggcttgaggagattccctggggcccagcaggcccggggggcctgggctcaggaaagggagcaggagagggcatcccaatctggatactgcaggtgggggaaacaggcagcagaggctgccctatggcccatgtggggaatctatctgaagcatccttcctgcaatccagccttcctctcctctccccaggacaggcctggtagtgcccagcagctataaaaagttcccactttaagttgcactcaacagtttggcctttcaaggagcagactgggtttgccctggggactcccaagttctctgggccccagctctgggctaggagcccgtgggcacgagaagacagggctccttcctacctgaggtgaacaggactatggccttgaggcagctgtactcggctgagtcaacgtgcagcgccttgagcttctccacttgctcttggaagatccgtatgtggtccataaaggcgaccacccggtcggcggacatgggcgaagcatgcaggccggcggcggccaggagcggggcgacgtggaggggcatggagcactgcgccgcattcaacacaaacagctcgctccaggtgaggcgaagcagggccacctggtccgtgatctgcaggtcggggaagaaggggatgttccgggcccactcgacggcgctgaagagcatcctcgcggccagttcgcaaatgttctcgatacccatgatgttgttgggctgcatgcattggctgccgaagcgcgacgtgggatagggctccgcgcgcaacagcagggaaatatatccggacaggtacgagtggcagttgaggggatccccgttggtcagcgcgaactgcccgtgggtcggctgggtcggcggcatcctgcccctctgcaccgctgcggggaggaaaggagacactccacagttaatgaccagcctcagtccccaggttccccggcggggtctgccccagcccgacccccacctgacccaggccctgagcagcgcaagaaccaggcaggcctgccacagagctggagtcgccaggctcttggcaccattcctttcaaaccaccacccaggcgagctctgagggccagaggggcacacttgcctccgaggcccgctcggggctggtccgccgaggacccagaattggccaccttgcctcggggtccccggcgctgtgggcgggatgtagcattctgagggcatctttcttctttactgctaaacagctgatatttcttattgattggaggagagggagcgggaggggcgagtctggggggagggtgaggcgcttttgcaaaaggcacgagggtccaccccagacggcctgtggccactccggaacgactctcccacaaaccccgaagccccagccccagcccggcggggaacccccccagtgagagacaagcagagagcggaggtctggcgtctgtctaatcagtgtgctcggagaaagagacggagggagagggcggagagagagaggccggctaaagagagaggaagccgggagaggcagggagcaggcggccggcactagcggagcctgggcagggcctgtaagggccggggaaagccggcgaggctcgggcccaggctgttatctgactccggaccgggagagtcgctctcgcagaaacacaaagaaaccccggcgttggctcgccccaacccggagcccgcgccccgcgccgagcgcgccattggcaaagcacggctcgcggcgctcggcgaattttatatcacaaagacccaactcgcgcagagcgaaagcagccgcccagggcccctcgcccaccctttcctacttcctatcgcgctctcttcgtttcaaaaagtgaaaggaaaaaagaaagcagaggtatttttttttttagcaggatgttaatccacggagggtcacatgagcgctgcccgggcggcagcgttaatacggcgaagtgcataaaattgccatttgtaatttgaacctcctgtacaaaagtacaatctcaggtttttttttttttttttttgagagggtgggggctggggaaaggggtgagggggagggacatgttgaacatgcaggaaaaacaagggcagagagagagaagtaaactaggctttaaaacaacaacaacaaacaccccatcccttgcagaaaggcagactccagtgaactcacaatcaatgcaaaggaaatggaaacagcccaaagagagagtaaagaaggaaatcagtcggccaaagcatgcggatttggggtctgggttccaatgcagaactcgcttctagtataaaacccttttccgctgcaatacgaagagaagagcttggggcttcttgtccttacccagagcaggctagccaaacgtacccaggaccccgggacccaggacgagggaaggagaaatgagaggccgataccttcccgtctcatgcccactttgaggcactttttgaggcggcagtactggcactggttgcgatggtgctggtcgatgggacagttccggttggcgcggcacgtgtagctcaggttcctccgcacgctgcgcttgaagaagctcttgcagccctcgcacgtgaactggccgtagtgcttgccgctcgacttgtctccgcacaccacgcactcgatgtgttgctgctgctgctgcttgtcgctacccgggccgccagggccgccctggccaccggccgccgtctgggctggcgtgctggctgggcccccttggccgggcgtctgtggcgtgtgcggggcgccgggcggcgggccgggcacgggcggcgcctgcgaggcctggctgccctgtgagccgggcacctcgtcctgggggtcgcgccacgtgctgactaccattgccatatctatgggggctgcgtccggacttcctgctcccctggctgcgggcggcggcggggcggcggcggctccccgggtctcgggctccggcgcgccgccttttgtgtgtgcgagggtgcaagagggcgcgggagggcgccccgggtggctcgggggctggttggttgaggttggttagtttttccttttttgtttttgcttttgcaaagttttgtcgatggcttgtctggcccggtgtgtttgttttgtttgtttctctcggctcagctttgttggtttcggggggctttccgccgggaggggaggggaaggggacaggagagcgagtgggagcagaacgtggagaaagagggaggggagggagagctgaagtcgattgtctggcttcaagacagaagtaggaggcaaaaaaaaaaatctctccaaagatctcgctcgctctcactctctccctccctctctcgttcactctcgctcttagagctggtgtgcagccgaggagttggcggaggaggaggaggaggaggaggaggaagaggaggtggtggtgaaggaggaggtagaggaggaggagaggcgactgtccgggggccaagtccagggcagcccacagtcagccattcaggaaagccatcgaaatcaggaggactaggagatcggaggcgccgggtgcgggcgcgcccagggagccaggcaggccggggcggaggccggcggcccgcggagtggccggagcgctgcccgggtccgggggaatcagcatgaaagt

SEQ ID NO: 1242249 - DNA, 4001 bp, Homo sapiens
aacaagggcagagagagagaagtaaactaggctttaaaacaacaacaacaaacaccccatcccttgcagaaaggcagactccagtgaactcacaatcaatgcaaaggaaatggaaacagcccaaagagagagtaaagaaggaaatcagtcggccaaagcatgcggatttggggtctgggttccaatgcagaactcgcttctagtataaaacccttttccgctgcaatacgaagagaagagcttggggcttcttgtccttacccagagcaggctagccaaacgtacccaggaccccgggacccaggacgagggaaggagaaatgagaggccgataccttcccgtctcatgcccactttgaggcactttttgaggcggcagtactggcactggttgcgatggtgctggtcgatgggacagttccggttggcgcggcacgtgtagctcaggttcctccgcacgctgcgcttgaagaagctcttgcagccctcgcacgtgaactggccgtagtgcttgccgctcgacttgtctccgcacaccacgcactcgatgtgttgctgctgctgctgcttgtcgctacccgggccgccagggccgccctggccaccggccgccgtctgggctggcgtgctggctgggcccccttggccgggcgtctgtggcgtgtgcggggcgccgggcggcgggccgggcacgggcggcgcctgcgaggcctggctgccctgtgagccgggcacctcgtcctgggggtcgcgccacgtgctgactaccattgccatatctatgggggctgcgtccggacttcctgctcccctggctgcgggcggcggcggggcggcggcggctccccgggtctcgggctccggcgcgccgccttttgtgtgtgcgagggtgcaagagggcgcgggagggcgccccgggtggctcgggggctggttggttgaggttggttagtttttccttttttgtttttgcttttgcaaagttttgtcgatggcttgtctggcccggtgtgtttgttttgtttgtttctctcggctcagctttgttggtttcggggggctttccgccgggaggggaggggaaggggacaggagagcgagtgggagcagaacgtggagaaagagggaggggagggagagctgaagtcgattgtctggcttcaagacagaagtaggaggcaaaaaaaaaaatctctccaaagatctcgctcgctctcactctctccctccctctctcgttcactctcgctcttagagctggtgtgcagccgaggagttggcggaggaggaggaggaggaggaggaggaagaggaggtggtggtgaaggaggaggtagaggaggaggagaggcgactgtccgggggccaagtccagggcagcccacagtcagccattcaggaaagccatcgaaatcaggaggactaggagatcggaggcgccgggtgcgggcgcgcccagggagccaggcaggccggggcggaggccggcggcccgcggagtggccggagcgctgcccgggtccgggggaatcagcatgaaagtggtccgcgtcgggcgctgcgcggcgtcgtcctggcgctgggccgccgccgccgccgcctgccccgggcgtccggcgcgcgcctcgctctctccggccgccgccgcccgcagtcgctgggtggaggccgctcgccgttccctgcgggccgcccgggccgccgctgccgccggagccgccgccgaagccgccgggtcgggcccggagccgctgcgtctagcgccgccgccgccgctgaagtcgctgctgccgctgctgccgccgccggagccgctgctgctgctgctgccgccgccgcctcacacacatagggaaagagtcaactcgccggcggcgggggagaaatgataaaagagagagaggagggcagatcaccacctagaagcacatccttcgtgcgcagaggggggagaaaaagacggagagaaagaatgaaagaggggaaaaaaggcagtacggcacccggagaaaggaggcaactcggggagaggaggaggagaagaagaaaacacacacgcgcgcacgcacacacacaccgcggagagaaaagaacagagaatcaaagtgatcaaatatgctaaaaaggggggcgcgggagggaatgcgatttataggcgccggggctggcagaagtggcttctccgcgatcagctcactgagctctctatatagtgaactttgacacgactgctgcaacttagcgcacgttgccatggcgacggcgcgccttataaggcagcagccggggttggcctggccaggcgcgcgcgcgccgccccctcgccgtcattggccggactgcggcggccccgccatggcggccgcgggcgcagcccggtcctagcgcgagcggcgtcgccggcgcggcgcggggcacgcgggggaccgggggttgggggggcggggacggggtggccgcgccgccgccgccgccgccgccgagagggggatgggcccgtgctggccctgcgagcgctgcctctgctctccccacatcccgcacccgaggtttccgccccggcggggagactagcgcagcgcgcacacacaacgtctcttaaaggctccgcgagaggctttggatggaatcggggagtttgcctctcgcaacttggcgatgtcacgaattccgccgctcgcgcaccacccgggactcctggcgcatcttagtacccacaatgccaaagaaaagttccctggtttctttgcagagggatagggagtgagggtgggaaggtgccacgaactgagcttgtaggcattttccaaacgaaagagttggccagatccgggtgatggcaaacccttctcttaattaactctgatcacttgttcggtttggtgacatatatatatgacatatattcttttcagaggataaaggccgttctgtttctgtttattccttgtagggttaacatttcacaggtatgtggcctgacattttaattgcccaaataaagcatctcggatgctgagaagcagaaatagacttcatctgattgtcatgatgcaattagaatcaattttcctcaactttaccctctctcgctggttttagctaactctccagccaacatcctgccacacacccagtcatggtgagaggggaaagacctctgcccactgatggacaggaggaggcagccgcccagcctcccctgtgcacaccctctgtacacacatgtaagcgcacatgtatcagatgcacatttgtcaatgtacacagacaaagacttcaccgactatgcttctaggtcatagaacagttgagtacggacttcattgttcctcaagttccttttaagcattcatatagtcattaaaacgcacccagagattctgccccaaatgggaaataatactagtacaggtcacaagaaccaaacccaagccatattctacctcaagaagtcactgcaaaaagaacaacttcatagcctattgccattctgctccatgtgctaaaataattgagacagttgtgtctttgaattccagggtgtctggttttaaacatcaaacatgtagaattgctctcagaacacactatattccaacgcagtaaacttgttgtttatgaccagttagtgaattatcattattccacatttatacaagaaaattgtgtctcctttgtacacactttgcaccaagaaaaaacctcatgccggtaaaccaaccaggtttgtgaacaattaaaatattttacacaaaagacgctgagctccaggaaagaaatgaacacatatgaagagtaaattgatgaccacagaaaacatccttggtagctgaaaaaaaaattgacagggtaaagatattttaaaaataaaccatacatataattgacatgcatagatcacattttacattcaattctctttacacacataggcagaatatgaggtaaggactaaagatctgggcagataggggctggtttttaggaaaggaaaaatc

SEQ ID NO: 1242250 - DNA, 4001 bp, Homo sapiens
ttgctatgagtcagatatctccacaatcagaatttcaaattttaaaacttttgttctactttagaattgagaaaatcctgtttcagcatcacattatagccctaagagtataaaaatgtaaagacgaaatcagaactacagagaactggtgaaaaagaaagtaaaatcaaccaaaatgaatgcttttagatttttttcttttttacacaatgccatgcttcttcgtaatcaaacaactttcaacaagattataaaatttttcaggaataatttggctaaaaaataaaattaacattacatcagcatcaaaggcgtcatcatatatggttttccactgagggtggaatgtaactttatcacagctaagattagtgtccttgttttaattggattatagtcagacatatctcaacacttggcatttattttatcaataaagaaaactcatctaacctgaatcattatttctgaatctacttttattctgacttctatttccttattatttgagctgatttcagatataggacaagctagaatttatcaggttataaaaccaataaaacacatatatctaaaataaaatagctttatgtcacaaaggaaggtctctcaaaaccaaatatttcatatttgaaatattaatttcatattcacatctcttccaatgatgttggaagggaataatacagccttgtgttaatatacatttttgattgttgttctattgctatggacacatattgacaaaaacatataaatatataagaaattacctgttggcatcttaatttgtaaatagtttcattcttggtcaagagagtagggttgaaaaacagtacctaaaacggtttaaaaagtaataattcagggaaaatagtcttcttttaagggcattataaaatgtcaaatattctaatagcaatattcttaaatgttgaaaataaaataataaagacatttatatactagggacaaattttagttacagcatttttagatacctattgcatttcagtaaaaaatatgaacaaaactaaaagatcaataacgtacttaatataaatcattgcctaaataatgtaatttaatcttaaatatctctctgcagaaaagtctaataaggctttttttcgtaaacattgttaacatagtagagtactacatggaattttacatgaacgatgagacagtaagtaaaactgaatgaactgaacctttaaaacttttataaaagcacttttaagtttaccatagattgcacattacatttaccaacctatgcaaacctttcttctaaaaaatgtccagggctgataggtgcggcaaaccaccatggcacacatgttataaacacactatgtaacaaacctgcacgtcctgcacatctatcccggaacttaaaattaaatttaaaaaagaaaaaaaatgttaaccccacacacacacaaaaatgtctggcatctggcaaagcaatgtagctaataagacattcttacatatgaagtttcctgctataacagaaacaaaagaattcaaacatatatttgaagaggtgaagcatttatacttacattatgattacaagctcccagttctgttctataaagaacacttctgacctaaacagaaagactctaacagaaatctcaatctactaacacagttgtaataccaaggtcttctctcaaagccaacagctctttcttagacaagcagagaggcagagaaagcgagcaagcaatcgagagaaacacacacgagcgagaacaggcaggaaggagaacattaaatctatttgatttttaaaaagcactgactcatactgtttcttttttccaaacaaacaggacttaccctcaataaaaacttacattcacacaaaaaataaattttgttggacatgcagtgtttcaaaagtttttgaataccgcagacaacagcagctgtgacttgcattttataacatgtcaaaaatctgatttatatggctgcagtgtgcagtgtgggcgaggtcacgccagaccaaggtgtgcacagaggtcaggcactggccacgggagccaccccttcaatttacgtgttcagagttgcaaatggagcagaattttatttagaaaaggagttgaactaagctgcacttccaaattactgtccacgttttaaaggtaaaaaccaaaccacattccttagactccttacttatctttgcttgtctgaataattcaagacgtagtgtaagtttgggagaaaagaaattttaatgtggagctaatagataagtgtttcacaaattaaaaaaacatttttttaaatttatgttttatgaggtttgtgttaccttacaagccagataaaatttatataaataatgacctgaagaacttataaagctaaaagaaggtaatagctataataaaacttgtaacaccaagttcaatttgaaatgaataaaatcactgaacttgactaataccaatgacagtgtaatgcctgaatgctatggcaaagttgttaaatatacagtgaggaaagttaagttttaaaaatcataaacaattttaaaatattgactaaaactgtaattttgtttaaatgaatatagagttcttcatcatataattatctaaaatatgccaaacatttagatggttatcttttctaaaacgacaattcagacattattacttgactgatgtaaagcccaaactaataagtttgttttgttgttttaagaaaatattaaaataaactcaaaatcaaatactctaaaaacaatctgttcattaggagaatggtgtgaacccgggaggcggagcttgcagtgagctgagattgcaccactgcactccagcctgggcaacagagtgagactccgtctcaaaaaaaaaaaaatgttcattattacatttttaaaattatactttaagttctgggatacatgtgcagaatatgcaggtttgttacataggtatacaagtgccatgctggtttcctgcacccaccaacctgtcatttacattaggtatttctcctaatgttatccctcccttagccccccaccccgacaggccctagtgtgtgatgttctcctccctgtgtccatgtattctcattgttcaatttccacctatgagaacatgcggtgtttggttttctgttcttgtgttagtttgctgagaatgatggtttccagcttcatccatggccctgcaaaggacatgagctcatcctttcttatggctgcatagtattccacggtatatatgtgccacattttctttatccagtctatcattgaggggaatttgggttggttccaagtctttgctattgtgaacagtgccgcaataaacatatgtgtgcatgtgtctttatagtagcatgatttataatcctttgggtatatacccagtaattggattgctgggtcaaatggtatttctagttctagatccttggggaatcaccacactgtcttccacaatggttgaactaatttacactcccaccaatagtgtaaaagcattcttatttcttcacatcctctccagcactgttgtttcctgactttttaatgatcgccattctaactggcatgagatggtatctcattgtgctttttgatttgcatttctctaatgaccagtgatgatgagctttttttcatacgtttgttggccacataaatgtcttattttgaagactgtctgttcatatccttcactcactttttgatggggttgttggtttttttcttgtaaatttgtttaagttccttgtagattctggatattagccctttctcagatgaatagattgcaaaaattttctcccattctgtaggttgcctgtttactctgacgagagtttcttttgctgtgcagaagctctttggtttaattagatcccatttgtcagttttggcttttgttgccattgcttttggtgttttagtcacgaagtctttgcccatatctgtgtcctgaatggtattgcct

SEQ ID NO: 1242251 - DNA, 4001 bp, Homo sapiens
cagaccttggccaggacctcagcacaaacccttctcagctgcctacccattgctgagggtccccaagggctggaagccttgggggaaaagaggtgagaattatcctctgagcaattccagtatggtccacacccttctccagggtggtaggttaggaaggggtcacctggccgaggtcaacgaaagaaaagaggagcagactctccagtccccagccctcgatctgtcctctcctttgcgtctgctgccatccccaccaaagaaaaatagcaaggagaaaagagcaggccaccactggtctccctcggagggggcagaaccaagcaaaagccagccagagttgaatgttccaaatgaaccgatccgcacgatcacacaagaaacccctctcctcaaaacacacgccctctcctctccctgcgccatcctgactcggaatagttccgagcagttatcaaagcccaaactgggaagggatctgtaggcgcccagatgcagatgagggtggcaaaggggtgtctcggaaatgcccaaaatggggctggagagggcgggctgcaggaggggaagggaagaggtaggcgtccatgacggcctccacacgtccaaagtctccccgcgagcagccagctcgcaacttgtttacttgtcagcatgttttgctgtttccaaatggaaatagttaaacacctcggctggatcgcgagcagtccctatctgtcaccttccctgccggctaagcgctgccgccgctgccaccgccgctgccgcctctgccaaagaatcgaacctcgtctactttattccacttgagcgtggccaaactgttgctatttagtggggagcaaaaaaaaacaatttgcaccatcgaaacgagccagcaactggttgggaggcgggcggtagctgggccccgcgtgccctcggcggccggggtcctctccggggagaggcacacacacgcatagccggatcgcgcctcgccagggccggagtcacctggaatgcgcagccggagagcatctcccgagccagagcgagcctgacgcgcgcccagcgggcggcgggcagcggcgagctggggcgggcggagggccggctcccggccgcgggtgggcaggagggagacgcagagcgcgggggaggcaggctggggagcggccgcctgacttacatggaagtgatattccttgagatgtccgtgatgttgatactggcgttcccattgctgttccctgaatcctgcccttccaggagggggaagaggttcccatcgtccggccgccggcaattgatctcagtcttgctgcagacacaatttgcagggcaagccagcacggagcccacatagtccagccagacgcttcccagcaagaaaatccgccagaaactacacttggctgggcaaagagagacatccatctccgatcgctgcttctaaaaaagaggaggaggagaggagaggggggtggggtggggggagtggggagagcagggggggaaggaaacaaagacggcgagggaggggggaagggggagggggggcctctgcctttgaaacgccgagcgatcagatgcaaaatccttcagcgtctgaaaccatcgcggacgccgccgccgccgccgccgccgccgggtgggagccgcgaggagcgcctagtggcgcggtctgccgggcatggtggccggctcggcgatcgctgactcgccgggtccgggggctctggaagcgaggcgcgctctccgactccgagactttgcagggttgcaacagacggtggggaggcaaaaaaaaaaaaggaaaaggaaaaaatggtgctaaagtcaccaagtcccacctactgggcagaattaaaacggacacaccacgcacctgcaaaacacacacactcactctcacacatacacacacccggagcccgaggaaaggaagagaaggaagatgcagtaggagctgcagcagccgccgcgaatggctcgccgcgcggctgcagaaatgtacaagtgctccgagccttacgaaacgcacgggttatcggagcgtcttcctcggctccctccctcccttcctccctccctcctcccctccctcgtcgcggcctcctccccccgccccccgcccgggctgggagcggcaggagagcggaatctccccctccctcccctccccacacccgtctctctccccgcctgtcctctccctcctccccacccacccacccacccactcgccggctcgcggctgtagccggcaccgccacccgcagcctcgcggcagcccgcccgctccacgcctcgcagcgcggcgcccgctagccgcagcccgggggaaaccgagaccgaagggaaaaagttgcatttgagattgcgagggtcggggctggggagggagagttggcgagctggctgcacgacacggaaaggcgctctcctttccactttttggccctcgcgctacccggttttgctgcaatccggaccgcggtaggaagtgaaatgaacgtggcggaggtgattggggagtgctcccaagccttgggtggggggcgctcccaagcctgggtgggtggggggcgcaggctcacggacggcgacggggggtgccggagcgcacagacaccccagagaagcacccagagccggggaccgggaccgcagacgcgcagtccttggtctgaatgacactcatttccgtaatctagagtctggggctctggtcttggctgggaggggactgcgggacatggcacgctaggtgccccccgtgcccgctgcgctttcttggaggtgggttttgcattcggccttgagcaggcatggatcggggaaggaagaaacaggggtcgaaagggctgcgctggagagccgaggtggccccgggcgagctgtgcgtgcaagagaaatggccgggggaaattgagatgcaaggggcatattttggcaagcgccacgccagcaccgtcagaggccggcttctcgggctcagctctcgggtgagctgagctggctgccgggtgagggggcgggcgggctgctttctccggattcgggggcgcagaacctcctccttccctcccacacaagcaccccttcctggtagggacgcaaagcaggtgcagctttcgacgagagctcagatctcatccgggaaagaagtgtgtgtggggggggccccgcttttgcgctggtagggatttttttcttaataaaacataaagatgccaagtgtgagctgtttgctgaaaaaaaaaaaaacgagcattcgctgtgggaaaggagaagaaagggttaggggagtccgagcaggcagacacactacagcattcacacgcagaagaaagcagggttctccttcccgagcttggaggagggcaggcgaggaagcaaaatacattgaattcaattcaactgcatccagtatctgaaaggagtctcccccgcccccctgtggattccgatgcaggtcatgcaacttgcaggcaagatgggggaaggggtatgccggtgtcaccgcctgccccaggcgcaaccacaaacaggccggtcgccttcgggtggcactgtcgcttggagtaaaaacttggacgaaaaaaatggaagaaaagaacatgcctatacaaggcagttttcccgacttcccgtcacgttccaccttcccttggccccagggagatttttacccccgtcgccattatggccttgtctccagactggcattttgccctcccaccagcaggcggggacagagtgtgaagacctccttggactctcaaaccacttgctactggccctaggccaatcctggctgtccttaggccactgggaatttccctgtcacttcaagtgccattctgggattggctttagaatatctgagagtcaggaaactgaggtgtagtcagatcctaacacttggcctctcttgggaggtggcaggtggcagcagagaaacacagcctctctcagaccactcctgggcagggaacgccaagtggattcag

SEQ ID NO: 1242252 - DNA, 4001 bp, Homo sapiens
taaaggagaaagaaggtgatctgaggctagagggtcaaaatgagcaatgggacaaagatagataaaagtgccaagtgttcagggatgcagccttggataaaagattctagctaggcagcaaaaaagcctaaggaatttaggctgagatattaaggctttgtttacgaagtatagaggagccactaaccactacagcccagaaatatccccaaggaaaaccctttggtcattcagccccaacaggcacttaggccctgattattttgtttaaacaatttaggtcgggtggggtggctcacgcctgtaatcccagtactttgggggctgaggcgggcggatcaggaagtcaggagttcgagaccagcctgaccaacatggtgaaaccccatctctactaaaaatacaaaaattagccaggcgtggtgacacgcgcctgtaatcccagctactcaggaggctgaggcaggagaatcgcttgaacccaggaggcggaggttgcggtgagccgagatggcgccactgcactccagcctgggcgacagagcaagactccgtctcaaagaaaaaacaaacaaacaaacaaataaaaaaaaaattgtgacgattgatttaagcatttactcactgtcagtatcacagcctgcaggagaaacctccagagtatatagcagtattatgtgggaagtctcaactattaacaaaatatataaaaccgctatcctacattaaatccccaaatcttcttctaacatcttgggttttttgtttgtttttgttttgtttgagactgagtctctctctgtcaccgaagttggagtgcagtggtgcgatcttggctcactgccacctcggcttcccaggttcaagcgattcttctgcctcagcctcccaagtagctgggatcacaggcaaaaagcttggatcacaggcgtgtgccaccacgcccggctaattttttaagggccaggctggtctcgaactcctgacctcaggtgatccgcctgcctcgacctcccaaagtgctgggattacaggcgtgagccacagcgccgggccaactctccaaacatcttgtagcctcggagtcaaagaccttactggttttgatagagaccatcaacccaacagtcatcaataaaaatttacccaaggaggtgctcccctaaaagtcgattttttttttctgacaggtccatcaataaagtatcaagagattatcggcaatattacaaatcactggagtctgtttggggttttccagaagctgagccaattatttacttaattgtctaacgattaacgacaccccttgtgctttctgggcctgagtttcgtaatcgacgccctgagaggtatacagtaatttcaaaacaaaacaaaacaaaaaacaataaaccatccctcggaatagagcttatcatgtgagcacccagacaagccagcttcaaaatgaggtgaaaactacagttcctcttccgtttatcagagttctaactgggactaccgtgaaccacatctactgcccgaggggcagggagagctgcctcagtcccgggcttccctctcggtcccttcgcaccgcatctccccgaggccgctattcccgccgcgcccgcccagggacccgcaccgccagcgccgtaccctcaggttggcccggagacccagactcttggctaagttctgcaggtcactgtacttgagggagtccagctcctctagagaggggatgatcatcgcgattcgaaatcccggcgatactcggaagatggatcaccaaacttcgtcagcgcggttcaaatccctggcgccactcttaactttgactaggcagaaatttatagacagtttaaatgaagaatgccgcgcttccattggttgaaaatgcctcaaaggcggggtttctaaccctgaccaatagaaaggctgatttcccgtcccaacagaggcgcgcttttttcacacttcacgaatacgcaggcgccaaagggcctgtaacgcctgttcaggtaacgagtgcgcggactcggactccagtgcttggattgcccatgatgtccaatgaggacgcaggagctgtgcttggggcggggcctggcgtgtattcgaaaggaaggcgccggctgcgggaagatggcggctcagccgctgcggcatcgctcacgttgtgcaacgccgccccggggggacttttgtggtggcactgagagggcgattgaccaagcttcttttacgacctccatggagtgggatacgcaggtggtgaaggggtcctcgccgctcggccccgcagggctgggggctgaggagccagccgccggcccgcagctgccgtcttggctgcagcctgagaggtgcgctgtgttccagtgcgcacagtgtcacgcagtgctcgccgactcggtgcacctcgcctgggacctgtcgcggtccctcggggccgtggtcttctccagtgagtgcagtgaagcgttcgggaaaggcagaggctagcccgagagggtgttcccgctttctccaccgggtggcggagaaccacctggggaagaaaacgggatgaaaagttggaagcaaataactccttggcctggggatggggcagggaatcggggagtctcctgatatttacggccaggatgagtctgtctagaggagagattttccatttcaaggcccgcagagtatgggttctgacccgtgtttgtcttcctaggagttacaaataacgtcgttttggaagcgcccttcctagttggcattgaaggttcactcaaaggcaggtacgtattgataattacattggtctctagtccctgactttatgagactgaggatcgtggaactgacatgtacgaggagaaaacagtttgggatgctgcttttacctgtttgactcttatatgaacttgatgtattaatgaaatgaaaaagttgtatttgtgtattggttttaggatcttcctgagggccacttctcccaggtggcttgtacaagtgaagtgaggctaagaaagatgtatctagtagtggacaaaagaaaaaaataaccttttggtttacagtgagaataacatactataaactacaatccttttagatattagaactttttgatacagggtcttgctctcgcccaggctggagtgcactggtgcgctcatagctcactacagcccctaccttcctggctcaagctatcctcccaacctcaccctccggagtagctgggactacaggcacacagcaccactcccggctaatttttaaattttttgtagaggccttagtatgttgcccacgcttgatattagaacttttaagtttgcgattatggttagtttgtaataagctatgccagggctaattcttcagtaaccccagaaactggagaaaaacacaactagaatgttatgtacttgaatactgcctggtaaactttgcgacctgcctgtactatgatttacaagtgacaataaagtagtcagtgaatttggtattgcaaggctcctcaattttgagttttggctttaacattgagacaattcatttcattctgaccagtttgattcaacgttacggttaaaatataggaattcttagttgctttgtccagtaaccaggaagatttctgcagcttggacaaacttcaaaaacggagttagacccacagctccctttctttttcctgaataaaagacactccctatcgctataggagtccccttcccacccaaaggggacaaagcaagaaggagcaattgcctgcttggaattgggtgtattctggggccagaggcagaaggttcctgaatgtgctcttggagaggaggctaatgaatctagacccgtgctgtcctatactgtaatcactagtcatatgtagctattatatattattaaatctgcattgagatatgctgtgaacacagaatacacactggatttcaaagacttagtacagaaaaattaatcatttacaaatactgattacgggccgggcg

SEQ ID NO: 1242253 - DNA, 4001 bp, Homo sapiens
ttaaaatttcaagagtagaaagtccttctttttgttaaattattttggtttaaactttaaaaataaaatttatctgctaaggttcctggcgactatttcaggccagtaactcccagagcatcctctacagccacagcttcatccaaacgtggatttcccccaaaaggccttccctggggttcatggcatctttcttgcttcctctgagatatcttttctcttttctaaagacctgaaggctaaaatcatcattttcctttctaacaaaattaactacttagatttaaatttttttttttaaacagagtctcgctctgtcacccaggctgtagtgcagtggcgtgatctctgctcactgcaagctccgccttccgggttcacgccattgtcctgcctcaccctcctgagtagctgggactacaggcacccaccaccatgcccggctaattttttgtatttttagtagagacggggtttcactgtgttagccaggatagtctcgatctcctgacctcatgatccgcccgcctcagcctcccaaagtgctgggattactaggcgtgagccaccgtgcccggcctttaaaaaatttttaacaggtaataaatacattagcaaggttcaaaaatcaaactgcgtaataaaatacatagcaataagtctgcctcccaacccttacccctttctcctgcaactaagttctctatcccagaggaaaccagtatcatctgtttcttgtgaatacttgcagagattttttatgcaactacaagtaaatacaaaccatattcttttttttttttttttttttttgagacaggatctcgctctgtcgcccaggctggagtgcagtggcgtgatcttggctcactgcaacctccgcctcctgggttcaagtgattctcctgcctcagcctcccgagtagctgggactacaggtgcccgccaccacgccccgctaatttttgtatttttgggggtttcaccatattggccaggctggtctcgaactcctgaccttgtgatccacccgtctcagcctcccaaagtgctgggattacaggcgtgagccaccgcgcccagccacaaaccatatttttttttctttaagacggacccaggctggagtgcagtggtgctatctcagctcgctgcaacctctgcctccccggctcaaatgattctcctgcctcagcctctgaagtagctgggactacaggcgcccaccaccacgcccggctaatttttctgtatttttagtagagacggggtttcgccagattggccaggctggtctcgaacccttgacctgtgatctgcctgcctcagcctcccagtgttgggattacaggcgtgagccaccgcgccccgccaaaccatattcttaaaaaaaaaaaaaaaaaagtgcaggtttttctggttacacagttaatatatattccaatgcttttgtcattgtaaataatggcgtaacgatgatctttgtaatgatattttggttctcattttcatttctttaaacgagagtcttataaggagaacttctatattcttttaaaaattgtaaaaactcctagaaggtgcactttattacgttattattagctactcaccaccataagaaagagcgctgaatttgcggtagggacctaactttaaatcttggttcgaccgctgaaacatgcttcaccagtttcataaaataactttacgctctttcgctttacggaatattgatactcaacatgcattctttaccgccaacgctttgaaatggagcaggggaactggatgtaaaagaggggagggaagaaaacctcttctttcttccctagggtaaaggggctctgaatcctggagcccttgtttcttcaggcattgaaaactcactgctcctgaaatgggtgtgtatcttgagacaaagacaggcttctatacgtcaatattctatccacatccatccctacccccctctaacgccgtgtacctagcacacagtagggacactccacgtgttttagcctgcaaagttgcaagtagggccccaagccaagccctgctctcgtgcgcccccttctggctagctgaaaacaaggcaaaaattgactacattttccggagtgccaggagagagagacttccggttatgcaggaaggaaattgacgaacacgtgacgcggtcgggcggaccactgcagactgagcggtggaccgaattgggaccgctggcttataagcgatcatgtttctccagtattacctcaacgagcagggagatcgagtctatacgctgaaggtgaggagagaaaacagggtgtaaataggcatggcgagaaatgtagatgggaggagtgggtgaggtcatacgtggagttacctagctgggtgcggggaaccagaaagtccagaaccgaggtggggaagaaccgggaccgcgcgactcattttttaattaaaagaaaaaattctggcggggcgcagtggctcccgcctgtaatcctagcactttgggaggccgaggcgggtggattgccttagctcaggagttcgcgaccattctgggcaacactgtgaaactccgtttctactaaaatacaaaaaattagccgggcatggcggtgtgcgcctgttatcccagctactcgggaggctgagacaggagaatcgcttaaacccgggaggcagaggttgcagtgagccgggatagcgccattgcactcacttttcctttttttttttttttttttttttaaagacagggactcgctttgttgcctaggctgtagtgcggtggtgcggtctcggctcactgcaacctccgcctcctgggctcaaacaatccttctgcctcagcctcccgagtagttgggactacaggcgtgcgccaccatacccggctaatttttggttttggggttttttgtttggttggttggttttgtttgtttgtttgttgtagagacgaggtttcgccatattgcccaggctggtctcaaaccatcctcccgcctcgacctcccaaagtgccaggattacaggcgtgagccaccgcgctcggcctttttaaattttatatttctctatttatttgtacaactttttgagttgaccattgcatcttctattttcatgtttgccctttttcgcgctggccccaccccatttcatcactcctgtactgacatacattctgtgttcctggagcagaaatttgacccgatgggacaacagacctgctcagcccatcctgctcggttctccccagatgacaaatactctcgacaccgaatcaccatcaagaaacgcttcaaggtgctcatgacccagcaaccgcgccctgtcctctgagggtcccttaaactgatgtcttttctgccacctgttacccctcggagactccgtaaccaaactcttcggactgtgagccctgatgcctttttgccagccatactctttggcatccagtctctcgtggcgattgattatgcttgtgtgaggcaatcatggtggcatcacccataaagggaacacatttgacttttttttctcatattttaaattactacaagattattaaagataaaatgatttgaaaaactcttattttgtgagttgttggaggaaaggattggcagtatttttttaaagggagggagatgataaaggagagtaccccagagagttgcaacaataccacttggaagaaaaacttcagtcctgctgttgcaagagtggtcatgtgctgttcatgataggagggtattggggaagaaagattaagactttcacagctgtcagcattcactgaaaaatacctctgttgtcacttaacgtaatttcttgtcccttgaaataagattttgattaaaaatggaagagtacttgtaaaagtaataggcatattacagacagaggtcagtgaattgaaagtcagaagaccagtatttgctttttgtataactttgagaaagttacttaacctgtttagtctgatttttctc

SEQ ID NO: 1242254 - DNA, 4001 bp, Homo sapiens
atcaggacactctaggccaatgagaccaatctttgaaggtaaggcccaagtgactgatttctcaaatgtgaagccagggtaagaaacactgaaatacaagaaaagctgaaaacccagttggaatatttaaggctggtgctgttaacaagtgggaaaggaaagttgagagactatttcagtaagaagagtgcccaagtttgagaggaatcctgagtggcagttagagggctctatgcaaagaaaagcaataaagaaggcaatgcatttgagaggaactagtctaattctgaatagaacatggcccaatttaaggaagatttacagggaatggatctgcttgcaaaataatgaggcccaagtgagaggcagaggccataaggccaaatctggggacaaaaggtctggtgtggggaactaatgagcttcagacacggtttggacaggacagcaacaagtttggggaaaaaatgaggaagagaattaggtccaaattgtaaatgaaagccattctgatgtataaggagcaactaggattaaaaattccggggaattaggaaattgtggaacagtttcagagaacagaggcagaaatatgggatatattaaaatttgagggagagataggtgagaagggttgtcttggagaaagagaggcatgtagagaaaggaaaattgaggaactatctgcagggggaaggatataccatgcaagtttggaaaaccagggtgctcggtctgagaaagatgtgcagcctttctctaattaatgggggaagactagggtcgggttttgagggaggaaattgcaaagatctagtgtccagaatatagagcttggtttgaaggcactggaggtacagggggaaggttcactggaagcgagatggctgggtcctgtgatctaatgatccaaagacgggattcagttaagaggggaaggagaaggatgagttccagctgagaaaagatgtttagagggtaagaatgtttccaagagtgttgggggtataccattggggcaacaggatggagcacaagaatcaaacctggtgtttgataaataaaaggaatggcgctgggagactgggaaaatggggcctaactgggagaggggtgtggagaggggaaggtgggggaaagatgaagctgaagtatgggaccaggaggaagaggctggacatctgtgtaaggactgctaggcctgaagagaatggggggagggtgatgagtgggggtaaactgagaactgaaggatggaggttgactttgcggggggcagtgatatgagaagagtctgggtggggggtgcagttttcatcagggagggaattcaaagggaagggtgaagtgacttataaggggagtaagaaagatttgaggaagacaggaaacaatttggggaatctggatgccggggaaagcccagtttggggaatggggcacaattcggtggggctgaaagaaaaaaggggacttgcttggaaggttgggttccggcttttgggggctttaggggaggagaaggcccggatgagggggatgggcccggctgaagagggggctaaaggacagaagaaggcccagttgcagggctgaggaccggactagggtggctgaagtggtgaacggacctggctgggggcggatggccccgctgcggggggcgggggccggctaggggtacgtgagaggccctctggagcagatgagggaggatgggggcggggagcctgggccgggccgttacctgtcctgggtgtttatcatcctcggcggctctgctcagggtgggaggaggcggcgcagggagtggatagatggatgagtgggtgggtgtggggtcacgcgcgcggggtcgatctctgcgggctaagtccctgtcaggccgcgggccgagcgcctccttttgcctcagcgagcgcctgcctccaactgaccctccccggccgccaccgccgccgccgccgccgccgccccgcccccgagtgcctcatctgcatagccccaccccagcgccgcgcggtgtcctgggaaactggggcccacaacaaagggcaaagcaccgccccgcctccgcgcaggcgcaccacggaccgatcgtgggggtagggctagggggtccgaacgaagggcaggctgtgcaggaggccatgaccaaggcggtgggtctgcccgcagctgcggcagcgcggcccagaagatgcgttgtgtttccggtagttttctgtgaggattgactcaacctggtcctcatccctattccttgttggcgtggggccgaacagggctgtgccatttgggaggatattaaaacaaaatcagaaatcttaagagaactacacacatattagcaccattcctagtctgagtccaggcccacagatctgttatctcagctcataatgcagatcaataacctcagctgtcagggtagatcaacaatctcagcatctcgcacacatctcatgtcaatcgtcaaggctgctccaagcactggcttaggtcatctgaagccagaactctgtagatcatgagcacagtcacaacaagacagtcgtggaaagcgtcgtcactaacttgttcacggtcacttcagatcacaatcagtgcaagttacttcaatcgatcatgcaaggttactagttcagtcacctccattcattatccctactggtccttatgacagattagtgcctgaaggccacagtcaccggtgcgcagacccctcagatcacagtccttgtaggttacaatcacagacacttcaacacaatcatcaaaagccccgactctgttcacagtcaacccagattgcaatcaagagaggtcacattatctcagatcacagtgggtcactctgtcacctcagattacatccattcagttattcaacaaataattattttatttatttacttatttttgagatggagtctctctctgtggcccaggctggagtgcagtggcacaatctcagctcactgcaacctccacctcccgggttcaagcgattctcctgcctcagcctcctgagtagctgggattacagacatgtaccaccatgcccggctaatttttgtatttttagtagagacgaggtttcaccatgttgcccaagctggtcttgaactcctgacttcaggtgatccacctgcctcggcctccaaaagtactgggattacaggcatgagccaccgcacccggccaacaaataattattgaatagctacttactgtatgctccaggcatgtgctagagtccaagaatacgccataatcaaccaggcaaggttcctgccttggatgtcacaatccggtcaaggggagagacacaggtcatcacaataccaggtaagtaagtgctcaatctgaggaatgccacagagaaagtaatttagggaattagggacagctttgcagaaagagtgataactcagagaaagggtgacactccagatcggcggtcactatgactttcagttcacaaacatctcacattggagtcatctcaggatatggttactctccttcacaaacagcatgcttttgggttttggatgatggggatggaggcacagaaggaaggctggagctaccaagctaaggctttttcaacacaaattaaagtggtaaatgataccgaaactgcccggattatcactagatattcaggcaaggctggtctcatactctggttcactttaagatcctccactttgtccctcagctatccctacctactcctccaggttcaagtcaggtatgttcttacattagtacttagcaaaattggacatttaaacccagccctgatctaccccatcgcatagtcccagagacctgggcaatcctcctggaccctcagagggagctggaatgtctcacttctgccagcccattcctggccaagtaaccctttaacctgaaggacagtttttgacccatgaatcaacaaatattgagaactcactatgtcaataatagcgaccatttattgagca

SEQ ID NO: 1242255 - DNA, 4001 bp, Homo sapiens
tgacagaaccccaaatggaaactgcggaaacccaacaaccagcgagtgagctggtagagccagcggccccaaggagctgagggagctccggcttgtggagtctcttctcacatttccagcatatggagaatgccacactgggtcagcccctgccccagatcctgccccctggcctccaggctctgggctttcctcccctctgtggtagcctttatctccattgcaagccatctttccactactaacagttaaaagcctcccctttctctctactctcccaagaaacctcatcctcacctgtggacaggtggccgcccaactctcttctgcagctcaaaccactgtgtccatctacctctttgtgtccctagacataaaggtacccaaaactcccagagtgctgaagccacacctggcctttcccaggggcccactgatcccaccatccatcacccatcaccaactgggaatcccccctgcagctcaccagtgcttccctgccccggcctggcaaccacactcagtgggaaggccttggcagtggctttcttcaactccccagctgctcccaaccccccagccacagtgatctttccaaaatgcatatggcctcaaactcaaaatatttccttgctgcctgccactccagcatagaaacggggacccaggtgacacaggtgtcatgccgctgggtttccagggacagccaggacctccccattcctggtattcctgatatcctcagatctcagctgctccaggggctggaggttgcgttcttctcataaaacaagaacagtataggcatttgcttttcatcagtgtaatgaaactttagggacttatgatcctaaatcacattacaccaatgtgaactgcactcaaattgttgtaaactaaatttgcagaacaagcagtttttgtgcaattctttgcagtctactcagctctttcatctctgtgttcaggttcaatcctcattagttcttctatgagagatagttatccccagatgcgttcaatgctcagctccttgccctggcaggccccgtcccagggtcctggatggcagatgccatgcccgccccgcgaagctcaggctcaccaagcaagcaaaccgcagctggtttaggtagacagcagctgcccacaactgctaacagcctcgggtttcttttcctcagaatcactcaccctaaatctacacattgtagactgtcacattggtctaagtagtgctcctcaaagtgcactgcacattagagtcacctggggagcttcaccgccgggccccaggctctgattcgcccaatgggaagggagcaccgggcacttgtcctgagcccctggcccctgcctggttctgcaaacccagagcgtccacataccaggcttcctgtgcttaacattgtgtccttgaaaagagctagctgcactaatgcccattgatttcactgtgtgtgaccacagtaaagagaagcagctttgagggatttagtgttttcactccagtgcattccattctaaggaaacgcctgaccacggctcatggctaggaggccccgcagtgccagatgctgccctggagttcaagtggaacatttgctgtctgaacctttccaaactccccccacccatgacctcatggcccaccagggggcgactttttcctgggtcgcctggcagagagccggagggggtgctcagggggcagctgctgcaggcccaggcggactcagccgcgctaggtcggctccgtcgcacccgtctgtgcacactaacctttaggggaacttgccttgcttcctaagccgcgactcagccggggctgtgtaaaccctccctgcctgttcccaggctagtctggctcctcgcctccttcctcccgaccgcggagcacgtgcactttacctgcgcacttgcagatctttctccaggagtgagtttaaggtccgcacctccgctctggatggtgagcggagcacagccttcgaagtaagaactcagagggagctcggcgctcccgcagcgggtcccccacccaggcacgcccccggcccggccccgcccacagcactccccactcggccccgcccacagtgcggccacgcccgtagcacgcccctcccggccacgcccacaaagctgcccacatggccccgcccacagctcgcccgctccgcacccccggcccctcagctccccagcccccggcggcgcgggctgagagcagctccgtctaaggccacgccgccccggcgtccccgacagcgctctccgcggggatagtttccagctttacctctaaagaggcggcccaggactgcggacaggcttttccctatgaacaagaacggggaaatgctcagtgaacattctgttcccttcagagctctcccagcgggcactgagaggccctccagctaggacgccaaggttacacttgccgacagcccctcctgcagcacagacacacacacgagatacacagacacacacagatacacagacacacacagatacacacagacacacacacagatacagagatagacacgatatacacagacacagatacacagatacacatacacagagacacacacagagacacagcaatacacagacacacagatacaggacacagatacacagatgacacacaaggacacatgcagatacacagacacacatacacagatacacacagacacatgcacagatacacagagacacacacacaggcacagagatacacacagatacacagatatacacacagacacagatacacagacacacacaaatatatacagatactcagacacagatacacagacacaggtacagacacacagatacagatacagagatacatacagatacagagatacagagacacacacagatacacacacggacacacacagagatacacagacacagatatacacaggcacacagatacagacacacagatacacacatgcacagatacacacagatacagagatctacacacagagatacacagacacacagatacgcagacacagagatacacagatacatagacacatacagacacacacacagatacatgcacagacacacacgcagatacacatatacagatatacaaacacagatatacgcacagacacacacagatacacacacagatacagacacacacacagatacacgcacaaacacatggagacaacacagctacagacacacacacagctgcagtggccaggccctgcacaggaattggcaggaagtaagaggctccatccacagtgtaacagcagagctgaaagagatctcatgccttataacagagcacattgcacagccacagggtgggccaggggttgccctggtagcagggaccgaggatgtcctcggcatggcaggctccaggacactgaagttcccagccagggccctgacagcaggagagcccgagatctctgagaccacattcactgtcgcatgtgcagacccctcagttcagaccgccgtgtgcgttaggtgtggatatggctggcaagcagcctgcatggtgacccccatccttgtgggatggcggctccagggagcctgtgaccaccgatgcaccagttcccgtcccagaaatactgtctcctcctcgctcatcactgcacctgctcccctcccagtgcctcagggacactgttacagggcgggaaggggctggggcacagagcccgggggaggctccctgagtgggcagaaggctcttggtgtgcacgcagatctgtcgaaatgcgggctttgaaacgccagcaggacagctgcggccaagcgtgtggctctctgtgccttgcaggtcacagttgtttttgtgtaactgctgaatgtatggggaaggagcaaccctaccccagctccagggatagaccctgagtggccacagtaatggaggaaacccaacttccatgccagggactggctcgggtgagccaaatcta

SEQ ID NO: 1242256 - DNA, 4001 bp, Homo sapiens
ctccctcccacttcagattctgtggctcctgggtgtttggggacccttgatttcctcatctgtaaaatgggacttttaacacatgacctggtattttcaagaacttgctcagaggaacagtaaaataacagctgcccagcagcttgggcagccacccacccaatcaggggttggggccaacggggagtaatagccctgtggctgctgtgggcattcagcaaaggcccagccaggccaggggcttaccttgctgaggtgggtattctccccagggaaaggcctgacaggcaccccagatctcagacccccgggtgcacgccaccacaccctgcccagcagcataggtcatctgtggcctctgcttctgcccttccagtgggttctaggccacctgaggagctctgggggccaccacttccccactggcctcctagctgttcctgcctggccacaatggcaagtgaccctagcagagcatggcgaccggagctgaagggccccagccaaaggccagaaaaaggagactctgctgtgccagctggacagggccaggatcccctataggctcccttgggagaggcggctaggggatgcccatggagttgccccaccctcaatccccgctggcttcctctggacccagggggccccttgagtgtctcagattcccagtggctacagagaatggctccatgtctctcccctcaacctccaacaacagctccaaccccagccggatgactggggtggcaacgctcacgcttctctgagtgccggctatgcagggtataagctggtgccttgaacatggagatgtcatgatctatgtagcccgtgcaggatggccggaggtacttggcgggccccggacctgtaaggatggacaggacagccctcagcctgggcccaccaggtcagaggcaggggaagccccagtacagcgcaccatgggaacattgggggtatttgttcttgctgctatcgcactgccacgagcccagcatccatccagctgcttcgtttgggggaaggcagtatttccagataaaatgcagtttcccttggacagacaatgcataataagaagctaatagttacagttaattgagaacttattctgctccaggttctccactaggcatccgacgtggattatttccgttaagcctctgaacaatgctgtaaggtaaatgctcttgtttttcccattttacagaatattgaggcttagaaatatctacccacatatcacaaactagtagtgtgaagattctaagaccatcatccagtagaacccaaaccttcaatccctgcactaaactactcccacttagagcactagtcagtcattaccaacatagtaagaattagcgtctgctgtcccttgagagtaaaattgaagggaagtgaggaaagctaaagctaggacaaaggctcctagtctttttccaaagcgggcctcactgcaagtcccatgctcccctcctcccccacccacttggacaatcccagcagccaacactgcctgtgagggtcagcttggaggctcaggtcttctgtaaggcttcaaggaagttggaaggggctttgcaggaggcaggctggaaggagtcctggagagaggggagggggcccaagcccagggtggggatggctctcacctttgatcttggccatgatgacaggggtctgcttgacctcctgccttgagggcaatggctccttttctgggtgctgtgcaaagtacacagagctcctggtccccttgggcagtttcatggctggggctgggcagggagcagcagcagctacagcagggtctaaacagcagtcaaggggctagagtatccctgcctgagacccccccatcccccaccccagacacggaggaagctgggaaggaagacagttctccagcttgagcagctaaggctgtctggggcacagtcagcacaggccccagcaggctggagctggagatgacgtcacggcagagcttggactgtgaaactcgtagtgtttatttcccctggttgccatggcgcctgaactgcggcgtggaaattctatgctgggagcttagttatggaaccctgactatcccactgtcccccatcaccaaccaggccaagtggcctgggggtccccaggaccctgggtcagggaagggaaatggagagatggtgttacgtatcagctagcgcttcactcccagtgggtgccctaaggttggggaaaggaatggaaagggttggtgggtcacgggtgaagggtttgtgcagcacacacagccccctgggggctctctaccccctgcctctcccacctacctcccaggctctggacatgccctctcttctgtcaagtctatttttcccctggcaaaatatcaagtcaattatcactaaggtgtgactgtctgatagctcctccccagaatcctatcccagggtgtggtatctttagagatccatgtctagctcaatggatacaaaaaggagtgggaagcaaataaaggaggacagaggggtggtgctgagccttcaaggggctgcttcctgtgcctgtgaccaagagcactcccttggcaggggagcagttggagttggagggcggtatgagaggacacatagaaggggagggaaggcagccagccccatctgacggatggatgagccccaggcctgaaaacatgctgggaacctcttcattcctaagaacccaggaggcttttgggggcctggggcctgtcacctccactgttcgtaacagactagggatttgacctgaaccgggtcagcggtgtccatctcaggaaccagatgactgctggctttagacaggggtgtctgtcaccaccccagtacacagttaagaaaactgaggcccggaaaggaacaaggacttgcccaaagtctcctactacatcaaaatagcagagatggaaccaggacacaaaacccagggctctccttggatcatagtctctgattgaatagaaaccaagccatgctctgaacgcattccagtcagcaggcacagcgagggctcagagcagcaggtaggacaggcatgcagggtgtccagaagcccctgagggaccacaggcctcagaacagaggacaggggcccagtccccccagcagcagaccctgtgtgcccccatatgcccatggggcaagtaaacctctgatttctgggtaagggagggctgagccaggctggggggtgacccagcctcactggcctcaggccagggccaatgctatgtcctcagccccatccgcgtcagcttttcctgtaggaagctgcgagccctgatggtatcccagtgctgagaggggccggatctggggctgggacccccaccttcctggtgagcgggcagtctccaagtatttcaggcccggggagcctcctgccttcctccctcactgcttctgccccatcatcctggtgcacagctcttcaggaaactaggccaccccgcaccccagcaggtcacaagccactccaatttgttccaaatgcttcctttcctccagctctgatggagacccagctcacccctggaggtggccctcggccctgtccaaagctggctgctccgacattcacatccctcatgcctcagagtccacagtgccgtgggtctctggctgccttggtccccagactgtgccctccccatcaaatgccccattcctctggggcactggcatccaggtgtgtcccccttcagctcctcagggctgccctgggtccctactcataaacctagcagccgtggctcgaggccacctccaccccaccccaactcctgccatgaccctgatagctcaggcctccccagggaccaccaccaatgccctggcctccccgttcccagacctcctcatgtgcaaacacctccactccactccctcacaggccggtcccccactgcaatcctgggcttctcaccacctcccacagcactgacagccagtctctctgggagg

SEQ ID NO: 1242257 - DNA, 4001 bp, Homo sapiens
ctcgatttcctgaccttgtgatccgcccgcctcggcctcccaaagtgctgtgattacaggtgtgagccaccacgcccggcccgtaatcagtatttgtaaatgattaatttttctgtactaagtctttgaaatccagtgtgtattctgtgttcacagcatatctcaatgcagatttaataatatataatagctacatatgactagtgattacagtataggacagcacgggtctagattcattagcctcctctccaagagcacattcaggaaccttctgcctctggccccagaatacacccaattccaagcaggcaattgctccttcttgctttgtcccctttgggtgggaaggggactcctatagcgatagggagtgtcttttattcaggaaaaagaaagggagctgtgggtctaactccgtttttgaagtttgtccaagctgcagaaatcttcctggttactggacaaagcaactaagaattcctatattttaaccgtaacgttgaatcaaactggtcagaatgaaatgaattgtctcaatgttaaagccaaaactcaaaattgaggagccttgcaataccaaattcactgactactttattgtcacttgtaaatcatagtacaggcaggtcgcaaagtttaccaggcagtattcaagtacataacattctagttgtgtttttctccagtttctggggttactgaagaattagccctggcatagcttattacaaactaaccataatcgcaaacttaaaagttctaatatcaagcgtgggcaacatactaaggcctctacaaaaaatttaaaaattagccgggagtggtgctgtgtgcctgtagtcccagctactccggagggtgaggttgggaggatagcttgagccaggaaggtaggggctgtagtgagctatgagcgcaccagtgcactccagcctgggcgagagcaagaccctgtatcaaaaagttctaatatctaaaaggattgtagtttatagtatgttattctcactgtaaaccaaaaggttatttttttcttttgtccactactagatacatctttcttagcctcacttcacttgtacaagccacctgggagaagtggccctcaggaagatcctaaaaccaatacacaaatacaactttttcatttcattaatacatcaagttcatataagagtcaaacaggtaaaagcagcatcccaaactgttttctcctcgtacatgtcagttccacgatcctcagtctcataaagtcagggactagagaccaatgtaattatcaatacgtacctgcctttgagtgaaccttcaatgccaactaggaagggcgcttccaaaacgacgttatttgtaactcctaggaagacaaacacgggtcagaacccatactctgcgggccttgaaatggaaaatctctcctctagacagactcatcctggccgtaaatatcaggagactccccgattccctgccccatccccaggccaaggagttatttgcttccaacttttcatcccgttttcttccccaggtggttctccgccacccggtggagaaagcgggaacaccctctcgggctagcctctgcctttcccgaacgcttcactgcactcactggagaagaccacggccccgagggaccgcgacaggtcccaggcgaggtgcaccgagtcggcgagcactgcgtgacactgtgcgcactggaacacagcgcacctctcaggctgcagccaagacggcagctgcgggccggcggctggctcctcagcccccagccctgcggggccgagcggcgaggaccccttcaccacctgcgtatcccactccatggaggtcgtaaaagaagcttggtcaatcgccctctcagtgccaccacaaaagtccccccggggcggcgttgcacaacgtgagcgatgccgcagcggctgagccgccatcttcccgcagccggcgccttcctttcgaatacacgccaggccccgccccaagcacagctcctgcgtcctcattggacatcatgggcaatccaagcactggagtccgagtccgcgcactcgttacctgaacaggcgttacaggccctttggcgcctgcgtattcgtgaagtgtgaaaaaagcgcgcctctgttgggacgggaaatcagcctttctattggtcagggttagaaaccccgcctttgaggcattttcaaccaatggaagcgcggcattcttcatttaaactgtctataaatttctgcctagtcaaagttaagagtggcgccagggatttgaaccgcgctgacgaagtttggtgatccatcttccgagtatcgccgggatttcgaatcgcgatgatcatcccctctctagaggagctggactccctcaagtacagtgacctgcagaacttagccaagagtctgggtctccgggccaacctgagggtacggcgctggcggtgcgggtccctgggcgggcgcggcgggaatagcggcctcggggagatgcggtgcgaagggaccgagagggaagcccgggactgaggcagctctccctgcccctcgggcagtagatgtggttcacggtagtcccagttagaactctgataaacggaagaggaactgtagttttcacctcattttgaagctggcttgtctgggtgctcacatgataagctctattccgagggatggtttattgttttttgttttgttttgttttgaaattactgtatacctctcagggcgtcgattacgaaactcaggcccagaaagcacaaggggtgtcgttaatcgttagacaattaagtaaataattggctcagcttctggaaaaccccaaacagactccagtgatttgtaatattgccgataatctcttgatactttattgatggacctgtcagaaaaaaaaaatcgacttttaggggagcacctccttgggtaaatttttattgatgactgttgggttgatggtctctatcaaaaccagtaaggtctttgactccgaggctacaagatgtttggagagttggcccggcgctgtggctcacgcctgtaatcccagcactttgggaggtcgaggcaggcggatcacctgaggtcaggagttcgagaccagcctggcccttaaaaaattagccgggcgtggtggcacacgcctgtgatccaagctttttgcctgtgatcccagctacttgggaggctgaggcagaagaatcgcttgaacctgggaagccgaggtggcagtgagccaagatcgcaccactgcactccaacttcggtgacagagagagactcagtctcaaacaaaacaaaaacaaacaaaaaacccaagatgttagaagaagatttggggatttaatgtaggatagcggttttatatattttgttaatagttgagacttcccacataatactgctatatactctggaggtttctcctgcaggctgtgatactgacagtgagtaaatgcttaaatcaatcgtcacaattttttttttatttgtttgtttgtttgttttttctttgagacggagtcttgctctgtcgcccaggctggagtgcagtggcgccatctcggctcaccgcaacctccgcctcctgggttcaagcgattctcctgcctcagcctcctgagtagctgggattacaggcgcgtgtcaccacgcctggctaatttttgtatttttagtagagatggggtttcaccatgttggtcaggctggtctcgaactcctgacttcctgatccgcccgcctcagcccccaaagtactgggattacaggcgtgagccaccccacccgacctaaattgtttaaacaaaataatcagggcctaagtgcctgttggggctgaatgaccaaagggttttccttggggatatttctgggctgtagtggttagtggctcctctatacttcgtaaacaaagccttaatatctcagcctaaattccttaggcttttttgctgcctagctagaatcttttatccaaggctgcatccctgaacactt

SEQ ID NO: 1242258 - DNA, 4001 bp, Homo sapiens
gcgaagaggaataataaaacaaaatgcaaagtcctcagggagtcggcagcggagtcggtcccaggacatggctattgctttgcagctctcactgggaccttgggacggtcagcctccctctcctttccacagccaattccatgcgcagagagcgtcctaacccttacaactcgtctgtgctacacacccaccgcccaatggctctgaaactttttgcccatactcttagattgaggtcaccccagccagcgccaaaagaatgagcgcgggagggggtcacagcagccagttcggccaaacatcgacgctgctccggcacgctccagcccagcgcctgggatgtgtcagaggtacctgcgaggaacatttgcgtgcgattccacgcacgcgttgcatccctcttcccaaacccggatcgctgaactgagaggtggcgcagagtgtctcaccaggtgcggggatttctctccgcctcaggccgtacgagcttccctcgctgtccctgagcgcaaatgagcctcttcagtcgccgaggcccggccgcttagctctcggagccttccacagcccaacaccctgagccctggagtaggcaatttgctcccacagccctgtgctggcccttccaggcacagggagtcccccttctaggggtaggggcgggcgggatgaagcgcacccagccctctctcctacccttcctcctttggtcccttcggctttcgtgtaccttatctcccgcgcgcccagctccttggccggctcacctgctaagcggagcgcggacatgcgctggaactccggctcctgcagccacttccacatcctccggaaggtctcccggccggatttgagtttgctccagggtttggggttgcgcagcaggtccgagagggtcccctgggagcggcagagcaccctctgcgcgaagatggcctgtgggatgctgtagcgcttgagctcggtggtgatacgctgcgccacctctttggtattgatctcttccatctgccctgaattacttccattgctgacctgcgcgccggtcaccgaagggttgggctcccgggctgtgcccaggagttgcccgtggccctgggcgttcaggtgggcgtggggatggtgcggaggaaggccgttgatgggcaccatgccggccgaggtgggcgtgaggtgctgctccccgtggcggccgagcatggccgggtggtgggcttcgaagccgttgggggtgagcatcttgtcggtgggcatggcggcccccgggtgggcatagtgggggagcccttgctgggagttgtggatgctgcccagaccggagctggagaggggcgagaggctctggcccatgccggccacgtccttgtggtagggggtatagaggttattcatggaggccagcccgcgctcatcccgcatgagcgtgaagctaccgctcacgttgcccgccaggcgctggtggtggtgcgggtggtggtggtgatggtggtggtggtgatggtgggggaacttgtccgagactgtggagatgggaggcagcggctgcagaggggtcaaggtggtgtaggtggtgggcatgctcatacctgggggagtctcgcaggccatggtcatggtgggatgcagggggccggccaggctgtgctcaggggcccggtggtggtggtggtaatctccgccgccgctgccgccgtccagcagggacgccatgcccatggagcgcgggtgcgcggggggcaggtggctgccgcggtgcgccacggagctgcgcgcgtgggggctgccgcccagcaggtcggcaggggcgggcaccggctcatggctcaccccgtgcagctcgccgatcgcttccatggtcagctgcgcgttcatcgtgatccgggcgagcaggcggcggacacaacatcgatgtggccaggcagaggcggcgaggggcgcacggagtccggtcttcacatcggctgctggcgactgttgccttccttcctctcactgtggggctctgtctctctctctctctctctccgtgtgtgtgtgtccgtgtgtgcgtgtgcgtgtgtgtgtgtgtgtgtgtctcgccttccctcttaccccccaccttcccctctgcgtcctcggcttttttttttttaatattaatttccaaagaggatccgcgccgttgggagagcgcagtgccccagcccgcccgcctcggccacctctcgcccctctctttcttaaaattctgaggtctccggctcccctgccgcggcccgcgcgcctgccgcgtctgctgcctgcccgccccgctggccagcttgagccatggctctgttactgttacagactctgtggccgcggttcggtagccgccgccgccgccgccgcagcggcccgccctcacgcccgccaggcgcagcgcgcatgcgcgaggcccgcccccgccccctaggtcgcggcgcgccaggcccttggcgtcccggtacaaatgaaggagggggcccagcgccttccctgcggcgctggatggccagggagctgcgggcacgtgcgaaagattggcgcagagcgcgacctggggccgccgctgcaatcccaggagactcgcgcctggctcgctcgcctcccttgcttgagtgggctctgtcctcccagcccggggacgctcgtgtcgggcttctagcggctggagtgctgtgcttggagacatcgcccctctctctccagttgctgcttcccggtgcagcttgcccggggagctggggactgtgtcatcaccccttcggctctagcccactaagctttatttcccggggggctgctgggagtgcgctttcccacccttgaattcacggcctattgggggatgggggttggggtggggtggggtgcagattgcttaaagggctgggtccgtttggcggccgttgacccggcacccttcgtcctcccagatacatacttgcccaccctttctcatccatgccctggggagaggagtaatcagtgccaagaatcccagttcgggccatacctcactgtcccccgccgcctggctccttctcccgctcagctcataattaaggctgtgcgtccgcttcgccgatgactcggcctgtggaggggggcgagggagagcggagggagtgccctggagggtacccatgttaacttccgggtgctggtggggccgtggaggctcgggccgtccctgcggttactcccaaggccctcctgctaaagcacccggaggcggttgctttccagaagtactgacgcagacagggtggacgccggcgcgcgggtctccgcttggcccctagggacgcccttttcccggcgtccccgagagacgcctccagatttgaaaatcaattcagcttcgggagtaatttcgcccttcccacagtcacgctccaatctggaatcgaacctggtctttgggcctggtggggacgtgtgcggaggcccccagtttgagacgtacacccggccgccacatgccgcggctttctttcatttacaaaagaaagaaaaaaaatccgcaacaaaaggcagagccgtgtccgcttaggtgctttcatccctcagagaaaggacagatgtgcccattgtccagcccgtggcagttatggccgggtcagcgccgagcctcagccccaggcaagcggtggttacaatgagaatagcctctcagagccggggtatctggactcagatatggaataaagtgtgtgtagcctgtgctgggccagactcagactgtaggtttgcttgctggggcaccgaactgcagcccacccgtggtgtttccactgcaaatgctcccaagcccttagagaggccaaggctgtggtagtggtggtagttgggtttccaaggcaaaagtttgggctggccaaccctttgggaaaagttcccaccggcccaggcatgagtaggcctatctctttgcccaggtccctgctaccaccagggcaacatcctaatccaggtaggtcaagttcagtggatacagt

SEQ ID NO: 1242259 - DNA, 4001 bp, Homo sapiens
gatggaagagtggaatatgaacatcaaatcaaaaacaaaattgatctgaaagtgaaagggcactgacctagcaatcagagtcatggtttctggtgcctggctctctttgatggtttccagctatgtgcctttgggcaaactagtcactgctcaattcttggattttagtacgtgtaatttgaggggattggaacagatggtgttggtaatccactctaactttaaatttgaatattctaaatataggactaacaattttgtagatggccaaagaagcctgataaggtggcaaaaatatgtagagactggagcaatagaaagcaaacactttaggaacaaaaagaattaaaatcaagagagctagatactaaacaggccaggcgcggtggctcatgcctataatcccagcactttgggaggccgaggcaggtggatcactagaggtcaggggttccagaccagcctggccaacatggtgaaactccatctctactaaaaatacaaaaattagccaggggttgtgatgggcgcctgtaatcccagccctcaggaggctgaggcaggagaattactcgaacccttgaaccggagaggcagaggttgcagtgagctgaaatcatgccattgcactctagcctgggtgacagagcgagactccaactcaaataagtaactaactaactaaataaataaataaataggagttaggtggtaaacagattgaatgtgtagtttgtctatcaatagaataatctgtccagtagaaaaaataaaagacatagtattgttatttgttcaattacatggcactcacctagaacaaggtctttcaaagtggtaggttacaaaagacattaagatttaatatttagcactttgatgcacactgtgccaaaggataacatcacttctaatttaatggtgaaattgttaccatgatttcataaattttcaggcatatagtatggcctgagtcttcagtatttctctgaaattgcagtttcttttatgcaatcagcatgaggagtaatccatagttacacatcttgacagccaagccatttacaaaatctttgtaaaatgcgcaagacgactgcacagtctcctcattgccactttcatgtctttgttcctgaatgtgtagataactggattcagaaaaggagtaataaatgcatcaaaaatagcaagatatttatccaggtgtgatgtgggagaaggccatgtgtagaaaaacatcagtggcccaaagaacaagatgaccacagtgacatgagctgacagggtagagagggccttggctagaccaccagaagaatgtttccaaacagtgaacagaatgaagatgtaggaaattaccagcaagacaaaggagcccacagaaatgagtccactattgacagtgaccatgaactccagttcttgggtgttggtacaggcaagtctgaggagccgagggagatcacagtaaaaactgtcaaagatattaggaccacaaaaaggtaaatctaccacaaaaactaattggaccaatgagtggataaggccaatgatagaggaagtggctaaaaagtatagacacattcttgggctcatgatggtcaggtagtggagaggtttacatatggccatgtatctgtcaaaggccatggctatgagcagcaccatctcagtgcccccaagagcatggctaaagaagatctgagtaatacatccccgaaaggagatggccttgtgcttcttgaaaatatcacaaatcatcttaggggctgtaattgagcaaaatgccatatcaatgattgagaggttagccaggaggaaatacatgggggagtgcagatgagcatccatggttacagtgaatacaatgacaaggtttcccatcatgctcgcaaagtagaacaacaaagagaaaacaaaaagtagaagctgaatctcccgtgagttggtgagtcccatgaatacaaattctgataccacagagtgattcattccattcattgcctcagactccaagatcagttttcatgttacttacctgaaggaagaaagaaaatgagaaagaattacctaggcaagtattcatgttcaagaaagaaagcctccagccatgaaaataactatcatattaacatcttacacagccaaataaccctcatcacatgcaccctggacttccacttagaggggtcagctggctgctatttggcattatggttttcaaaactactactactaaattaattccatccttagacctagctctcctctgcttttgtgttacatgaatatttcctatttgatccttcccaggatgttctatttgggtgagatataaggtcatctttaaatacttttcactatgatttcttatcaatggatatgatttcagccagtcacatgagccacctaacaattactcatgcacagcatacagctttcaaagtctctattctattatttatattgcttgattagactttagaagtttcccttccttttttaaatttcaaaatttcttttattctattctccagttcacaaaatctaattctcaaaatcccagccaaattctcgcttatgtgtgaaatcttcccaatgtgccccagactctgtattctcatcgcaccattagcatttattttactctgcttctcacagttatataaatgtccatttctccaattaaaatgtagactcttgggtatagaagccgtaactgatccacaacggtagctcccaccatcatcacaatcaccacttgtgaccaacacaatcagtcacataataagtgtttcacacttgttgaatgaaggcgtaaattaatgagactgaagaatgacactggagtcaagagagtacctcataattcagtaaggtttatattaatagtatattaacagcatgccagtcaggaattatcacagtatccctatttcaatcctgtacttatttaaccactcaaagaaacatttgcataagatgtcataaaaataaatatggggtcttattattcattttaaatagtcaataaaaggcttctaatatggttcaaaatggaagaaaccacttcattttataaatgattttcaatctcaatttttatataaaatatgtaatgagctgaaacaaataatctcctctaatgtagataatacacccctagaggataccataagataaaaaccatgtcacataaaggcagtctctcttttttatcaaaatacatttggagcgaataaaagggacagaaataaaatatggaccgaaaagaaccagacagtgtctgtatctgcactctggaagaagatgatgattgagtaatggagattaagtccagaaaataaactaaagaatggtggccaggtcccagcatggggaggtgtgacaatattatgattctttaaggatgaagaacaactgcccgaaataaaccattagagtttcattgttcaatgaagtgttcctgatttagtccaacatttatgttttataaataattcataaagaaagaaatataggaagcaatctactcagcctcacaaaggtaattggtgggaaaatttatactgggaccaagaactttttactcccattcaaagttctttacagtaaatacttgttacattagtttactattgctgttgtaacaagctactacaaatctagtggcttaccacacacacacacacacacacacgttatattcttactgttctaaagtaaagaagcctaagatgagttttcagagctaaaatcaataaaatgagttttcagagctaaaatcaaggtgtcaacagagctgcattcctcctggagcttctagaaaagaatccgtttcttgccttttccagcttctagaggatgcctccatcccttgcttggctcatgacattctgcctcttaaaagttcatcactccaacctcaacttctgtcatcgcatctcctctgactcttcctcttataaggacccttgtaattcattgggaagttccagata

SEQ ID NO: 1242260 - DNA, 4001 bp, Homo sapiens
caaatatacacacttccactcacaagtacagtatcccaaatgagcatctgttaagattgggatgtgtcatatttcacaagaatgttgggaaaaagtaaagtttgaaacttttggctttgttaatatataggattttaatagtatctaatgtttattcatgcttaatatgtctcgaagtgggctatttgatttatatctattttgtcattttccttcataataaccatgcataataggtataatctcctgtttataaatgtagaaactaaagctcatgaaagctacgtaatgtgcccaaaatcatgattaataagagtcagtagagttgaatccagctctttgttttttactttaaagcctgtgcttttaaacattaaccatggaaaatgacatagatggatccaagtaatatactttgtgccaacatgatgagagcctggatccctctaaattctttctactgcttatgagcagttataccacagatgtctaggacctagaaggcacatttcacattggcaaacttactcttccactcactcctgataatgccctcatggattctgggttgttatagtggtgggaggtgaagtataaacttataatgggaggcgtttgtttttcaacctcttaaaagttgacatatatctccttaccactaagcatatattttttaaattaagatgtgacagttctttttttatgtttttcacaaaatggaccaaataaatttttttttaaatttataagctaggctatattttctctcctttcttctactaaacttaggatcacacaggaaggaacaggtgtacacaaatactaatatatttatgcctttcttcattctaagaattagcaaaagaatattttgaaagcataataactttgtatctgtattccaaaatataacacacaagttgttgaaagataaattgaggcaatgtatgtggaagttcctagacaattactaaattatatgggaatggagggcacaattttcatgagctttactaaataacttaccaacttcactatattttgtgtcattatctgagattaatctcacagttatataagatctaaaactttacactagaatgtgcatcccattttctcagccgtcttattgccgtcttcatgtctttgttcctcagtgtgtatataattgggttcaagagaggggtgatcacagaataaaatacagcaaggaatttatctaatgacttgatggggaatggccaggcataaataaagacacatggtccaaagaacaaaagaactactgtaatgtgagcagtcaaagtggacagagctttggacgacttatctaaagggcaatgctggatggtcattaggatgatagtgtatgagatgattagaagaacaaaagaacacacagtgagcacaccactgttagcaatgaccataatatctagcctgtaggtatctgtacaggcaagtttgattaccctaggaaggtcacaataaaaactatcgacctcattgggaccacagaagggtaagtgcacggcaaaggccaactggctcaccgaatggagaaagccaattccccatgcgacagccataatgccgacacatgcgttgccacacataattgtagtgtagtgtaggggtttgcatattgctatatatctgtcaaagcccatggctatgaggatcaccatctcactcccaccaaagaagtgaaggagaaatatctgaacaaggcagcccttgaaagagatgactttgcgctggctgaaaaagtcagtaatcatcttgggggctgtgactgaagacagagacagatcaatgagtgagaggttggctagcaggaagtacatgggagagtgaaggtgggagtcagataccactgttatgacaataagaaggtttccaaacacgattcctccatagaatacaaaaaacaacataaataggaaggtctggagttcctgagaatcagagagacccagaaaaatgaattcagtcaccatagagttattcgtttcactcgttgattcattccaggaaatagcctctgcagttaccttgaagaagagaaggagaaggaagtcagaattattatattcaaattcaaagcctcattttatatcattctgctcactcttacagtgactttctataatctattacttaaagacattcagaattcaacaagatcataattttgtctcgcactacttccctggctatgccttataattcagttatctcagcttctcagtgtctccattaatgttaggtttattcctaatataaaataccattatttatgcttgtctctctgccagattaagtctatgccataactctatgtttatctcctttttctttgaactacaaaacagtttgtagcacgcatgttatttggtgatattaaagttcttaagagaaaaaaataggccaaaatgaaatgaaagataaaaaatagaaaaaaagaaaaaatagtatcacaaatataatacttaaaaattaacagaggataaaagaatagggaattcaaaagtgaagtgagaaaaagtgaggaaaatgcaataaagtttaaatgagagaaagtgtgaaggactttcataggagataaaactggtaagagattttggaatgctttctaaagcatttctgttttattatagagacaagaactactgaaaaattttgaatgattgtttaatttagctctggactcaatgtgaattggaagggagggagcttggaattggaagggagggagctgataataattataacaagcactagtataacaatactttacatagagatcccttttaggagcagaaataaatacagaaaaaggtaaaggataatgatgactgtctagacacaaggaggtattgttggggcatctttgtaagttgctatctgccaggtgagagactgaacactgacttctgggcatgagttgagagccatttcaattgtgtatggaggagagaaaataagtactgtttcaagaagttttgcagtgaagagaagtaacaaataaaaggtgtcctgaaagtgaggcatagccatattaacaatctttggattaggtataagagttaatgggcaagtaagatgtaaaagggagaagtggaaattgatcactaacattccacgggagacatgaaggtatagagtttacacttgccatcttttttggaggaatactgttatttgatttttgctgttttttaaagaacagtaattcatagtgcttggaaattctacttttctctttactactctgaatcccatttcttagtcctacacactcaagcagcacattactgtttttaaagtcctataaaaatttagtgatcttaaatatttttaagaataaagagaagtctaatagtggaataaatcatgaacattcacttcagttctcttctgcttagcacggtaataaatataatcatactaatcattgacagtacaaatgataggatttttattgtgagataatttctgtcctgactggttggttggactgtttcttttgaatcaaagtgtgcaatttagaatagaccttaaatatgcattgacataaaattaattcatttcattgataggcaaggacaatcttgaagttatatcttcacatgaaatatgccaaggatgaggttgacccgagggttctcatctgtagcaaaagactttctatcatggctgttagtaagaattcaggaatgctattctttagcaaaaggaatttcttgctaacgtagttaagacatctctctcctgaatttgtgctgctgaggggatccttcaccaccataattctttcaaagctcatttctgacttttcaaaaattattcaaaaaaatttagaagaattgtatttattctaagttgaacattaagtttaggcttattaaaggagttcttcagaatcttacacactcattgtagcaaccatgaagagccagccactgttgacaggtaaaatctttcatgccatagattat

SEQ ID NO: 1242261 - DNA, 4001 bp, Homo sapiens
ggggggggttggggggtggttgaaaatggctaattttgaagttcagtctgattacgtggcacctagcacaaatgactctgttctggtttgcctgctgtattagttcattctacactgctataaagaaatacccatgacttggtaatttataacggaaagagatttaattgactcacagttctgcatggctggagaggcctcaggaaacttataaacacggtagaaggcaaagaggagcaggcatcttcttcataaggcggcgggaaggagtgagtgcaagcaggggaaatgccagtagcttataaaaccatcagatctcgtgagactcactcactatcacgagaacaacggggggaaaccatgttgttcccataacccaatcacctcccctcaggttcttcccttgacacatgagtattataattcaagatgagatttgggtggggacacagagccaaactatatcacctggttggctggggcctaatacaggaggctagcccaaaacagtagctcccacaaaatttatttaacacaatttaatacttagttaattctttataccaaaattcctctttaaaaaaaaaagtgtagtttctctttatggactttgaaaaaagataaacaaataaatagctaacagataatgagctgaaaaaataaaaaaaaaacttagctacatagtaagacaaatcagtaagtctagtaaaaattaacctttatctttaaagcaagataatctaccttaaatggaaaaaatagaaaatgggcaataaaccacacaccgacattcaaaatggattgtttaacatttagagtaattctatttgacattatatataggtaataatgttggtgaaataaagtagccacactgtttaatctttaaatctcctatataagcaagagattgataccacaattcaatttgggaagaaaaaaaagacaacacaatacatactagtagaaagtgatattctggttaaatttaacatagcttacttaacacatatctgtctgaaattctagtataatttgcctttttgtatattctcaatatatttaaaagattttactgtaattcacaaactgagagcatcgtcttctcattgccaccatcatctctttatttctaaaagtatagatgactggattcaaaacgggagtgataactgcatcaaagatggcaaggaatttatcaagatgtgatgtgggaaatggaaaaatatagaaaaagattaatggcccaaagaccaaaaccaccacaatgacatgagctgacagcatagagaaagccttgaatataccacctgaagattttttctgaacagtcaccaaaataaagatgtaagagattatgagaattaaaaaagaagccagagaaataaatccactattggcagtaaccatgaatcccaatgtgtaggtctctatgcaagccagtttgataaatcgaggaagatcacaaaagaaactatctaattcattagggccacagaacagcaggtctacaacaaaagccaactgaatcactgagtgaataatacctataatccaggaaatgactaaaaacaaaatgcacctttgtgggttcatgatggtcaggtagtggagaggcttacatatggccacatatcggtcaaaagccatggctatgagcagcaccatctcagttcccccaactgcatggataaagaagatctgaactacacagcccccaaaagagatggtcttgtgcttcctgaaaaggtcataaatcatcttgggagctgtggaggaacaaaataccaaattgatgatggaaaggttggccagcaggaagtacatgggggactgtaaacgagggtcagaggtcacagttagcacaatgaggagatttcccatcaggcttgacacatagaacactgagaaaaagaggaagaggaggagctggatcttccgcgagtcagagagtcccaggaacacaaactcagagaccacagagtgattggcttcatccattgcctctgtcggctgtgacaactctcatgctaactgaaagaggagagtaaggagaaactttgatttaggacaaaaagcattgatgttggcaaaatcatgagcaattcatatgttgtcagaaaactagacaagggctaatatatgcctttagagacaatttcagtcacaaagcaactcatattcctctattgtaaattttgtcaccagaaaatacgttgcacagaataagaactcctttacttacttgaatggatacctttgttttatacacacacacagacacacacacacacttcagctcatgtcttcactccacattcttcactcagcctacatgcctttgtcatcattacatctctctaattcttcccattttcttcagtacccactctgtctaattcctttctccatgaagtcctctttgatacccttacctttatatacactaagtggaaataaatcttgtttatactgtggtaaccaaaccaaaaacctttatactaatagtgttaatagtgttctaagagtgatctaacaaagaacactattgaatttctggtcattgtaaatcatgtttcttcaacatgtcttcaaattatcctttttagacttttgcatgataatagtataaatggcatttacattcataaagggcaactcagcttggaataacttaagttcctttcacactgattatcatcagcaaccttcctactgaagcaatttatttaagtgaatgattaaattctaaattgctccctagaagctgaaagttactctatcaatgtctccaatttccacttactcctaaaactgttttaatttttacacaagacttttgttttatctttaaaataacactttatttttatatataaggttagcaaagatttatattagattattcctagtgttgctaaaaatttggaaaacaggtttgtccactcattgttggtactactgccttccagccagtctttcatgttctatctctatttaaaacttaaggtctttatgtaccacactttgtattagtccccactgaacacttttttaagcagggcagaatagttgtttaaatctgatcttttccatgaagacagaattaagctctccacttagctcactcttacaaaaggaaaaaagattatcagtggtgataagcaactcaatcccagtgtgcctttgcagtgttctgaagctcatgattgtgtttaacacagagcacagacctctcccacactcctactattaagcctagaatgtaacaaaaaaagatactccagagatcatctactgatcaactcactctgtcctctgctcaggttgctcagccctgtgctgcccaacagaaatgggaaatgaattaaagtcatgtgagcttatcaccaatccaaatgaggatgataattctaaggttttttaaatgtagatcattgtttgaagtcactccgataaagatgggtagaaagggctcaggacaccacttaaaatatgaaaaagagggacaggaatggacactggagttgcatgctccccaaattactgttcctactgccatcaacaatacagcaagccttatagaagtctgttgttatgacctgaatgaaactttgctaacgattgtaaaattctttcattttagggttaagaaaaccaaggtacaaagagggtaaatgactcggctaaagctccagaacaagttggtggcaaatccagaatatgtttgacttttggtttcctctgtacaggttatttccactacatcatgtttcttcttttgtgatgatctttgtgtgctgtctgtggcccaggaaaccgtaacataccaaaactagtttgtttagcattgtctaaaattcctcacattttacttgcactggactcaaattttccactccgactttattctctgcctggagacccacacgcaacacgtctgtgcaaatgtcactggaataacctttccaatattgaacatgaaatcatgacttgactct

SEQ ID NO: 1242262 - DNA, 4001 bp, Homo sapiens
ggaaagaactctgaattaagcactaacaaaaacagcactctaccaatttaagtttaacatgagaggcagaattagcaattatggaaaacatacaaaagtggcaaaggagatgatagtttagaaaaaaattacacggctagatgtctaccaatcccagtcaacctagaagctttctccccaaggctgctttcactctgaaggatgtaagtagggactggctacaaaaattgctagttgcctggaggcttcatctggaatgacatgaatctcatgtatcagccaaattatactctgctttgaattcataaaaattgttttcataatgtgataaaattttgagttctgtctccaaactgttgaatagacaccacctgaaatataaactgaaatacctttataaggtatttcagtttataagttgatggaaaatcctcattttccatcaactctggaaataagaggagataaaggacaaataatctgtttttccagacccagcaagatgttgaccagataccattccactgagccaacactgaaacatgacaaaaatatttatttgctaacttgaagctagctgcatccatatgcttgccatttacttcatatttgtaatggacacgtctccatgtcttatttatttttctcaacatgttcccgtcaaagccagagcctctgcagagtactcaataaacaattagttaaaatgtactttagcagattattatatctcaaattctaataatgatctgttgggaatttcagggtaggtgtgagtaaatttattttcatcttaatgcctctattttttcaatataaagaggaatgaatagagaaaaattatagtaaaattttaataacacaaatgaaaggaggaagtcaatgcagcattattactgcaaatacttcctgctttaggacaatgatcctcaggggaactataaaatgtataatttatctttcacttctctttacacaaaatatatttggtgaccaacttcctcatggctgcctttacttccttgtttctcaatgtgtaaataatgggattatgtaaagggaatattaaagtattgaacacagacaccactttatctagggaaaacgagtcaaatgggcgagcataaatgtagatggatggcccaaacattagcaccacaatggtaatgtgggaatagcaggtggacacggccctgttggtattctcacctgagcctgaaagtttcttgagcaaggccagaaggaaggcataggacattaacagagcaatcaaacacaccacagagatcagaccactactacagatcatcactaactcctctgggaaggtgttggcacaggcaatccggacaacctgtgtgatgtcacagaagtaactgtctaactcattgggcccacagaaaggaagtcgaacaatgagagccacctgtatgatagaatgaatgaagccccccctccaggagagagccaccaggatacagcagagacgttgattcatgatggtagcatagtggaggggtcggcagatagcagtgtagaggtcaaaggccatcactgtgagcaagaacatctctgaagccccagcaaagtgtaagaagaagagctgtgcaatgcattcatcaaaagaaattatcttcctctccacaaagaagtctatgagcatttcaggggctgtaatggaagagtaccaaatatcaaggaaggccagattagccaacaggaaatacataggagaggtcagatgagggtctagactgatggtgcaaatgataaggatatttcctggtaggatgaacaaatagaaggatagaaatataacaaataggactagttggacctctggagtctgggataggccagtgagaacaaattctgtcaccttggtgtaatttgcagtttccatttcttcaatttactcttttcataatatagctatgaaaattaagaaactataattagtagacatagcatttacctagagttatatcactgctttcaaaattgtcatacgttccctgtcactaacagattacacgaggatacatttggttgcccattttatatctgataaaccaagagggagagagtatgtgatgaagttataaattggaaacattaaaactatatgaagtgtggcatatatttgaaactcaaatctcagcttgttaatgttaaaaacttactttttctgaaatttggcaatgcactacttcttcccccaaacatctacattagtaagcaatatgtgaagctacttctgagtgtagccaaattttagactggcaatcagagatgtggcctcttttttctatatctttttttttgttgggaaatcttgccaacctggaaacttaggcttgcattctaatagcacacacacagatctagcagtactttagttgtgatacagaaaagagatcccaaggcttcataagtagtgaagggacatatttttccataactataaccaaaaactgtacagcttaatccttggtaacaggtaaccagccacaacatacagctatgcaaggccttatataaaaaattcttctagctgtgaccagattcatcaatacctgatactacattgagtataaaatttgctcaccacagcaggaacgtaagtaggtgtactgatctgagaaatgagtatgcttgctacccaatttgattctgagctgatctgctctgctgtttcaaggtgacaatgggaataatattatttttaaaattttgcttactgccctgtattgaatctgacaccactaagtagcacaaaacttgtcaaataaaaatgaaataacagttcacattaccaaatatgcttttctttaagtaaggttaaaaactgccacaccaaagtaagttttgttgtaaccaacagcaaatacaagagagttgtttcttttctgttgatgtgatattttatgatattgcctctcctattacttaaaaaaattaaatatggaaaggaatttttaaaaagttaaggttctgtaaaaccaaatagacgtggctgtgtccaaacacttatgggcactatgtatactactgagaaaagaaattaaatgcgccatttttggaacctactgactcaatttatacataattttaacaaacatagataaatgactttcaatatcttatagaagcattgtattttgaaaaagggatggcttactacaagcagacacacacacataaaaccagtgttttccaggaatctggtagcaagcagaagaaaggtaaaaatactcagaaattgaatagtgtgggactatttagaaaagggatcaatttccccttgcccataaattgcccagtgtggacctcagtgagttaatgaagcatatttaataagattgaaaaatttaaaatttggtttaggaagattttaatcaaaagaaagataataaggttatccagaatgaaatatttcctaacattccaagaaacaatgatcttattgtacttacctggaggaggcagctcatagccctcataactaataacacaacattgtgttattagttatgagggctatgagctagttatatactaactcatttacattcactgataagtcaactatgaggttccaacaatcaaataaatttctaacaaaagcatctgaaatattatgattactcagctcatttacatattttgctattatgctatgtagtttttgaccagatggaagcgattatttgttcctaagtaaataattgtccctttattattgaaaggagatgaatattttaaagcagtaaataccattacaagatcatatgcttttttattattatggggacatgatgcaatgattctgagtgtcgtcacacaaatcaccccttcttcctctgctctactccatacccattccaccaaaacagaagtagaaaatggcactaatctagaaagaatttaggtgaatgagtgttgatgtcttgaaaagacagacatacatcaggtattatggaatagaaagggtgatttta

SEQ ID NO: 1242263 - DNA, 4001 bp, Homo sapiens
gggaaagaactctgaattaagcactaacaaaaacagcactctaccaatttaagtttaacatgagaggcagaattagcaattatggaaaacatacaaaagtggcaaaggagatgatagtttagaaaaaaattacacggctagatgtctaccaatcccagtcaacctagaagctttctccccaaggctgctttcactctgaaggatgtaagtagggactggctacaaaaattgctagttgcctggaggcttcatctggaatgacatgaatctcatgtatcagccaaattatactctgctttgaattcataaaaattgttttcataatgtgataaaattttgagttctgtctccaaactgttgaatagacaccacctgaaatataaactgaaatacctttataaggtatttcagtttataagttgatggaaaatcctcattttccatcaactctggaaataagaggagataaaggacaaataatctgtttttccagacccagcaagatgttgaccagataccattccactgagccaacactgaaacatgacaacaatatttatttgctaacttgaagctagctgcatccatatgcttgccatttacttcatatttgtaatagacacgtctcatgtcttatttatttttctcaacatgttcccgtcaaagccagagcctctgcagagtactcaataaacaattagttaaaatgtactttagcagattattatatctcaaattctaataatgatctgttgggaatttcagggtaggtgtgagtaaatttattttcatcttaatgcctctattttttcaatataaagaggaatgaatagagaaaaattatagtaaaattttaataacacaaatgaaaggaggaagtcaatgcagcattattactgcaaatacttcctgctttaggacaatgatcctcaggggaactataaaatgtataatttatctttcacttctctttacacaaaatatatttggtgaccaacttcctcatggctgcctttacttccttgtttctcaatgtgtaaataatgggattacgtaaagggaatattaaagtattgaacacagacaccactttatctagggaaaacgagtcaaatgggcgagcataaatgtagatggatggcccaaacattagcaccacaatggtaatgtgggaatagcaggtggacatggccctgttggtattctcacctgagcctgaaagtttcttgaacaaggccagaaggaaggcataggacattaacagagcaatcaaacacaccacagagatcagaccactactacagatcatcactaactcctctgggaaggtgttggcacaggcaatccggacaacctgtgtgatgtcacagaagtaactgtctaactcattgggcccacagaaaggaagtcgaacaatgagagccacctgtatgatagaatgaatgaagccccccctccaggagagagccaccaggatacagcagagacgttgattcatgatggtagcatagtggaggggtcggcagatagcagtgtagaggtcaaaggccatcactgtgagcaagaacatctccgaagccccagcaaagtgtaagaagaagagctgtgcaatgcatccatcaaaagaaattatcttcctctccacaaagaagtctatgagcatttcaggggctgtaatggaagagtaccaaatatcaaggaaggccagattagccaacaggaaatacataggagaggtcagatgagggtctagactgatggtgcaaatgataaggatatttcctggtaggatgaacaaatagaaggatagaaatataacaaataggactagttggacctctggagtctgggataggccagtgagaacaaattctgtcaccttggtgtaatttgcagtttccatttcttcaatttactcttttcataatatagctatgaaaattaagaaactataattagtagacatagcatttacctagagttatatcactgctttcaaaattgtcatacgttccctgtcactaacagattacacgaggatacatttggttgcccattttatatctgataaaccaagagggagagagtatgtgatgaagttacaaattggaaacattaaaactatatgaagtgtggcatatatttgaaactcaaatctcagcttgttaatgttaaaaacttactttttctgaaatttggcaatgcactacttcttcccccaaacatctacattagtaagcaatatgtgaagctacttctgagtgtagccaaattttagactggcaatcagagatgtggcctcttttttctatatctttttttttgttgggaaatcttgccaacttggaaacttaggcttgcattctaatagcacacacacagatctagcagtactttagttgtgatacagaaaagagatcccaaggcttcataagtagtgaagggacatatttttccgtaactgtaaccaaaacctgtacagcttaatccttggtaacaggtaaccagccacaacatacagctatgcaaggccctatataaaaaattcttctagctgtgaccagattcatcaatacctgatactacattgagtataaaatttgctcaccacagcaggaacgtaagtaggtgtactgatctgagaaatgagtatgcttgctacccaatttgattctgagctgatctgctctgctgtttcaaggtgacaatgggaataatattatttttaaaattttgcttactgccctgtattgaatctgacaccactaatagcacaaaacttgtcaaataaaaatgaaataacagttcacattaccaaatatgcttttctttaagtaaggttaaaaactgccacaccaaagtaagttttgttgtaaccaacagcaaatacaagagagttgtttcttttctgttgatgtgatattttatgatattgcctctcctattacttaaaaaaattaaatatgaaaaggaatttttaaaaagttaaggttctgtaaaaccaaatagacgtggctgtgtccaaacacttatgggcactatgtatactactgagaaaagaaattaaatgcgccatttttggaacctactgactcaatttacacataattttaacaaacatagataaatgactttcaatatcttatagaagcattgtattttgaaaaagggatggcttactacaagcagacacacacacataaaaccagtgttttccaggaatctggtagcaagcggaagaaaggtaaaaatactcagaaattgaatagtgtgggactatttagaaaagggatcaatttccccttgtccataaattgcccagtgtggacctcagtgagttaatgaagcatatttaataagattgaaaaatttaaaatttggtttaggaagattttaatcaaaagaaagataataaggttatccagaatgaaatatttcctaacattccaagaaacaatgatcttattgtacttacctggaggaggcagctcatagccctcataactaataacacaacattgtgttattagttatgagggctatgagctagttatatactaactcatttacattcactgataagtcaactatgaggttccaacaatcaaataaatttctaacaaaagcatctgaaatattatgattactcagctcatttacatattttgctataatgctatgtagtttttgaccagatggaagcgattatttgttcctaagtaaataattgtccctttattattgaaaggagatgaatattttaaagcagtaaataccattacaagatcatatgcttttttattattatggggacatgatgcaatgattctgagtgtcatcacacaaatcaccccttcttcctctgctctactccatacccattccaccaaaacagaagtagaaaatggcactaatctagaaagaatttatgtgaatgagtgttgatgtcttgaaaagacagacatacatcaggtattatggaatagaaagggtgattttac

SEQ ID NO: 1242264 - DNA, 4001 bp, Homo sapiens
gagtgcttctccctctgtatggggaagctcttctcttccttcttgcctaataaactttctgttccttaacccactccgtgtgtgagtctgtgtcattaatcggcacagcacaagacaacgaactgcaggtatttccccagacaacgaagctgcttcactatgttgaaaataactggagtgatttatgtaatctgtaatacaatctgaagtactaaatatctaataatgtctaataatcatcgtgaagctctgaagaaaaaataagtgaaataatttcatgacattttaccatgaaacaaattggcttcctttcttatctcgccaccaaattttgggggggaaatatatatttatttatatattgattaaatatataaaaatatatatttataaatatataaaaatatatatttataaatatataaaaatatattacttattttatatatatgtaaatatacatatatataaaatatatataaaaacattaaaatatatataattttaatatatttatatatataaaatactatagtctttttcataacatacttgcaacatacatttggtttttgatattttacagtttattaatctctgcctaaaatcttgctgatgttgctctaaccagtagaggaaagcattgtagatgaactgctcctttgcttaaaacattaaaatgggttcttaccacaattaaaatatgaaaaaattcttacctcagaccgaaagacccttgcagtcacataaaacttaacccttaaatttctcacacttactcattatacttcaaccactctggggtttcctttatattctttaaatataataagtttattctctcattatgcataactctcctccattgcctacaatggtacctggcaaatgggaggtactcagtgaaaaacaggacttgttaaatgaatgatatgaattccagccagaattcctccttctcagtttcttattataaaatccacttgacagactacatgtcgactcaataacctcttcatggaagttttcacttcctggttgcgaagggtataaatcataggattcatcaatggaaagatcactgtgtgaaagagagaaaccatcttgtcagctggtaaggccctgaaagggcacatgtagatgaagatagcaggtccaaacataagaagtataataatgacacgagtggtgcacgtggacatggccttgttcttcccttcagaagctgccctacgaacatggcagaggatgactgcataggaagccagaagccccagaaagcacaggagtgtcatcaggccactgttgaagaccattagaagctccaccacaaacatgtcggtgcaagccagcttgatgacctgtcggacatcacagaagaagttgtccagctggtttgggccacaaaaaggcaagcggaggatgaggaccacctggataatggagtggacaaaacccccaagccacagagccaacatcattgcatagcaggctctagggttcatgacagttgaacagtgcagaggccggcagatggcgatgtagcggtcaaaggccatcacaacaaggagtaatccctcccctcctccaaggaagtgcaagaaaaagagctgagtgatgcagcctctgtaggagattacctttttctcagagaggaagtccaccaacatcctgggagccacaatgaaggagtaggatgcatccaggaaggccaagttgcccagaaataaatagaggggggctgtgagcccagggtctgaccttatggtgaaaataatgagaaaatttccagggaggatgataaggtagaaaattaagatcagcacaaagaccaagagctgaatatcttgagactgagtcagaccaaggaggataaattctgtcactactgtgttgtttgctatcttcatttcttctgcctgtagaatatcaataaaagagtttattttcaggtgttacatctagattatagttcttgaactaaacacaaggtatgccacatttatattattctatctatctcaacaacctaagaaatcacttctactgtttatgcttcctcatttcatgatagccaacaccctggtcctgaagccacactctttcttctgtttcagtcctgtgcttctgtttaagtgttcactcatgtgagacttggatgttactgctctgaatttgttcctgatttgtatgaggcatatgaaaatttttctgactgagaaaaaacttaaccccagttattgaggacttcatgttttgctttgaatggaagatgagctgggattgacagcaaagaagaatgacagaacttttcaaggggacagaaatgttccgtttttaattataatggttatatgtatctatttttgtcaaaatttattgagtattgaactatacagcaattagtacaatttattttatataaatgctaccttaggaatgtttatctaaaaacttttataaaggcaactgtacttaccagaaataattcccttttctctatagaacatcaaccaaatgaactggtctaaataaaaagctctcagtcactctggagaaaacaagatctgaggcttctctgtacagtggcttccaaattgagactgtgctcatgcttggggatgtgcatgataatttattggtatgaaagcaataataggagaatttctacacttacattattgtatcctattgtttgaagttttatttttgaacattttacatttatatagaatcatgatgtaattggatatgaaatgcataaagaagatacgtatgtttttggtgcatgttcaaaaaatggtttgtggttgaaataaaaaaatttaaaagctaaagatcttgagctagaacaaaatactacaatgtgatacagaaaaatatttcatatgcttctgttacacagcacatttgttttaaaataatgtggactatgaagcgtagagggaaagaggttcattaactaactgaatgaggagtcggtgtgtaagaagagagggaaacaaaaacaataaagtcccgaattaagaaatcaaagaaaatatttataatggcacatctatttaaaacatcaaaagatatgcttttcaaaatatatctaatcctaatatattaattaatagcagaggttttcaggtatggtcagaattgggaattatgaaagaagtacctaggccaggcactgtggcccacacctgtaatcccaccctttttggaggccaaagcaggtggatcacttgaggccaagagttcgagaccagcctggcaaaaccctgactctactaaaaatataaaaattagctgggcgtggtggcaggagcctgtagtcccagctacttcagaggctgaagcatgagagtcgcttgaacctgggaggtggaggttgcagtgagtccatattgtaccactgcactccagcctgggtgacagagcaagactctgtctcaaacagaaaaaagtatcttacatcacatgtatgtacatcacacagacacaaataaatacacgcaaacacacgtatcctaaccaaaacagaagcataaaattttacatatgatacccttcttcttttctttttttttttttttggcacttggccatttattgaccttaatatttatcagtctttctgtgcatataaaacctgctaatagaaaagtcgggaatccctctctgcttactcttaagttgtgtacatcttgcatgttattatgcagttggttatttcatactctttcaaaaattgaggatgtatttgggtcatagaagaaactttcaagtatctctgagattgggagtttcaggttcttgcactgtaccttgcattttattccctgttatccacttctgttctcctactgactctgtaacatctggaaccctctaccatcaaatatctttgattcactgtgttccctttgtgtgcttccctctaagctcttttgttatatggatagtgctcacatcatgctcattatggatccagaaaccaaatatatata

SEQ ID NO: 1242265 - DNA, 4001 bp, Homo sapiens
aactgccaaaaatggaaaacaactgaaatgcccctggacagatgagtggagaaattctggagtacctgcagaatggaatactactcagcaacaaaaaggaaccggctactgacacatgacttgatgagtctcaaaatgatctccctgcatgaaaaggagccagtttcagaagattaggctctgtaggacatttatctgacattcttgcaaagagacaaaactagtgatagaaaacagagcactgactgccagtggttggggtaggggagggtctgattataaaagacatcaggacagagaatctggaggggatgaagtgcttctgtgtcctgaatgtggtagtaataacacaaatccatacatgtgttaaagttcatagaactagacacaaaaaactcaatttttctgtatcttaatgtgaaaaatataagtaaaaaaaataaagaaaagagatgacaactcttgcttcctataaggctgtctagacattaatactgatgttagtactaattacaataatggccaccacaagcatggtcttctatacttttttgagcatctgctacatgctgcttctttaccacacattttatatcacaacttctaatattcacagtcaccttgtaaggtgggttaagctcaacatagaagaaatctcagggtaagggaagtaaaataatttgtcctatatctcatagttgataagtggctgaatctgaactcaaactcggatttcactgccgaccttattccaagcctgcttctccactctgctgcccacttaatgaaaataatggaaactgacagggagacattatataatataaatagcaggaagggagaatcatattttgatttccatagattgcaaaaactctcagcatattttattctaaacttggagttggtttgaaattctaataggttggggaaaatttaaaaactatgcttttgccattgccattttttgataatcctccagtaggtggttcttaattttcaatatgattgaatagttctctccacttctgcaaatgtacaataattcttattttccctaagtgacttaaagaatcattgtgacttacaattcttgaccaagtatttactaactccacaaattgcagtttatacatttgaagtaaagagtaaacattacaaagttctctcctctcacacagctgactgtcctgagaagttgtaactggtccctcccacctttacataccactgccgccatcagaaaaaaaaaagaaaggtaaatccattttagagacatagaaactacactttcattttagttcactatggttatggctgaatacatatctgaaaacatcatacatacggaggatgcaatttctcatgcagcaaatggtatctacgtgaaaagctggaggatgaaggctgtcttcttgcttgtgaattactcccagtggctttcctggatagtaggtgctttttccaccaaaaaccctggcctagagtattttcgtctccgctaacacagagatatgaaactaaggcctaccacaaaagtattttcttgaatgttttataatttctgctccattgaacatattttcttaaatataataattagtgataaaattttgacttaatatcggtaagatgtaacacaaagcaaagcccacttagtgctcaagtaccactgtcatcaggtattggaaatcttcttatttggaaggtggttatgcccagaatggtggtgtggggaacaaggaggtgggcttaccttccagcaggtctctggccagaccaggttctgcccccgtggaccgaacaaagtctgacaggactgcgtccatatcaagagtcataggatcatgtagaagtgctgcccaacactcagccgaggtggggtttggaagcacactagaaaccatccatctgcaggaaagaagagaaagggcattttaccacgtgatggaaatggagctgcaagtgacaactacatgcagagacctgagcgagagaaccctcgagggtggagccatttccacctgctgtcatattttttagaattggtttggtccaactgcctgattcttcatgcaagacattatattatagaatgctaactaaaatttcatccctgtgtacatgccatgtgagagaaggggtattatgagccaaatgtttgtgttccctcccaaaattcatatgttgatatctaatctccaaggtgatggagaaagacagtgccatctatgaagcaggaaatgggcccttactagacaccaaatctgctggttccctgatcttagacttcccagcctttagtactgtgtggaatacatttctgttgttcataagcctcccaagctattgtattttgacatagcagcccagatagactaaggcaaggggtcatcactatctccagcactcctgaacttacattttattaattccaataactgatgaggaaaaaagactattttaaaatttcaaacacctaagtatacctagaaaaattcagttggagttgctagatttctaatcctcttccgaattgtatagacttgtaatacttccacaatgtgatgaatgttacccactctattccaattatgcctttatcagtgtgccatcctaccccctcagctctcaccccttacttggctattaggaaagactaatagccaaggttaatccacagttgacggaaataccacacttgctgaagatggctactgaactatctaccatccctctaagagctgccatcaatccaacaacattcttaagaatgtcagatttcccaggcagcatgatcccagccagagaaatagaatggatgtacagcagcttgacccaggctgactgtagcagctgactgctggggaaaagcaactgtgacattacaagtgagagtaacttacactagtgaatggtgctggggccccagtgggtgctcaatctttgccggtggagtgcaaatgcatccttgtgtttgtgtagataagaggtctgcaagttatagaccatgggccacatgtggtctgccacccatttttgtaaatgaagttttatgggaacacagccatacccactcatttgcatagcgtctgtggctgcttttgcacctggctgagttgagtagttaaaacagagacccttaaggtccacaaaattgaaaagatgtacttcctggaactttatggaaaaagcttgcagaccccattacaggcaatggaaaattttatgctaggaagtatgtaattaattttacatattgtggggtgagtttgaatcccatgctattgatgactgtcctctgttctttctttcacagtaacccactgggatgggtgctgcttggtggagtaggtcctgtgtcagtggcccatgctttagagccaggcacatagcctgatttgaccctggccctgcccctgtccagctgtgacatgggcttcacctctctgagccctcctgattttctgtaggaatgcaggaaatgagctcacctaacgtgcaagaccctgaggactgagggtctcaggcagggaggtctgtaccctcagagacattcactgtgaccaccccgtcttgcacacagctcctattgggtacaatttttagttgatgcggccagaaaagaagaaaattatttgacctgatgtatatggtaccaattaggaaattgatttcttccttctctccatgcactggggcctcggccgggagagtctcttctttcgtcactgccacctgggggacagatcagagaacaagagcatgtgatctccttactctcagactgaggccgaaggcttggctttttgtcacaggaggctggatcttggccttggccaattgcctgaggcatgtactctgtcttcctgggccctacaggtccccgcttaccagctgaccagcaactcccatgcccgggcctggccaggggctgtctcagctttcctcgttttagcaagcacatctatttcagtgaggattacttgcacagcacagag

SEQ ID NO: 1242266 - DNA, 4001 bp, Homo sapiens
ttttatgagcaggcttgagggagtactaaggttctgagaccaagcagtgcttattaagagaccacttacttcttctccaggagagtcagttatctggtttggttctatccacttattaaataaaaaatagcctaaaattagcatatagtttagaaatgtaagtcttttcaaaggatgcttattaacttttggtaataattgctattaaaaaggaatttaggccagacacggtggctcacacctgtaatcctagcactttgggaggccgaggcgggcggatcacaaggtcaggagttcgagatcagcctggccaacgtagtgaaaccgcatctctactaaaaatacaaaaatgagccaggcatggtggcgcacgcctgtaatcccagctactcaggaggctgaagcaggagaatcacttgaacctgggaggcagaggttgcagtgagccgagatcatgccactgcactccagcctgggcaacagagcgagactccgtctcaaaaaataaataaataaagaaaaaggaatttaaggctaacaccaattagttagaaaattattctcatgaaatgcttcttttcacatatctaaacagggaagcttccatactatagctgtagtctggaagatacagctagattcagaatgatgtcctgaagtctgaatagttttgaatcttatttttagtaagcagttcctttttcctgcactagctgctctgctgatactctaatgaaaactggctgaaactactggaaccatggcatttggattaaaaaactaaggctgccaaagcagagatagcacccaagagaaacagaaaattattgggacaggcagagaccctgacattcatcaatacttactcagaaatattttggctaagtttccagaaggacccatcccagaagacctgtaggtgttccttgaacaatagtaaatgtgctaaatctgctataccaaacaggtctacctgaaatcacaaaaagcaccatcagctaaaataattctctgcctctaccatggcagcttatttcggtaggaagttgaaaggtattacagtgcttaactaagtttattttatgacatacattttagtagactgttcctcacccttacagtaaagggagaagctctccaaagaagtgatcaatagagccaattctaggaattatccttaagaacaaaagatgaaatatttggactatcacattcaaatttgtagacctactgagtttgcatgaactccagctgtgatctaaatggggtccacatgattagttcaggtttgtgctacatattcaatcagcaaatgtcttatgtctaaagctgagttagaaggaatttctgcatataatgccaccatacaaaagactttacatttgtgctaatgttctttttatatacattacttcatttactcctcataacaattctgataaacacatagcagagactgttatccctattttacagagaagatcacagaaaatgacttataaaagattacatgggtggtaggcagtaggagtggccctggcactcggttacagagttagtcatgtgtttgcacatgtatgtgtatattcttcaatgctgtaacacaaaaatgttacattttacttgacttggtgatatttgaaaactaggtcatctattctaggagtcggtatcagtaaacagtagcttttatagcttatctagataataaagagattaagaaaccctctccatatttgctcaggcttgttttacacttacctggtagggagaagaacagttagccaggatcttttgtccttccaggatctgtacagtccgaaagccgctgagggtaaaaacatccagctgcaccctaaggtcaacactgtaggaaaagtccactatcttcaaagcttgattgttcttgttacaatcatagggatcgtggattctgagcccagatttaagagaaggagataataaaaataggccatgaaagaagctgcatagctggtctttaaaaaaaaaaggtaccttgggtacatcttagctatgccaacaactccctccagtggttaattttgaaaatgcacctgtaagacagagcagtggcagtgtccacccaatgcggaaggaatgtcaccactttggtgacacaaagtatatttcaatcacggtgcatggccaccattaaacatttatcaagcttccatattatataaagtaagtatggaagcagagcacaggcttcttccctgtactgtacacattaacacatacaattgcaatgatttatacactgacaggaattatgatggaggaaattaaaattttataggtgtcatagcctttcttgtttactattccagataggctttccaagtattgtttagattcttccttccagagtttaatggaaaacaatgcaagtctgttttataaagtcctatctgtattgtaaaatttcttgtaaaacaccatattttatcttactcttacttgtaattccagttatttactaaaaaaatctttataatactaattaattatcaattaattttgttttccttgggtttatctatcctatgcaataatgctattctccaaggggacataggaactgtttataaatgaaaagagtgggttttcatgtgttccttttgtctgtttttctcaattaattccctcaaactcctgatattggtgcaatattcctaaatacagtctttaactactccaattacatacctccacggcacagaatgatctatgtattttactttaaaattgataattgctctcatttttccttggcacaagagccaaccttttttggccaccataaaactatactataattaaaaaaaaaaaaaaatatatatatatatatatatatatagtatatatatagttatagggatcgtggattctgatatatataaaatatacatatgtattttatatatatatgtaaagtgtgtgcatgtgtgtgttttgtttggtttcttagacaaggtctacactcttgtcactgaggctggagtacagtggtgcgatctcagctcagtgcagtctctgcctcctaggttcaagcgatcctcccatctcagcctcccgagtagctgggactactggtgtgtgccaccatgcctggctaatttcttaattttttgtagagatgaggtctcattatattgcccagactggtcttgaactcctaggctcaagtgatcctctgccttggtctcccaaagtgctgggattacagatgtgagtcaccatgcccagtgtaattgtaaaatatttatataactttggaggcatagggaaaaaatgtctcatagattaataaaaagaagcatgcatgaaggtgtcctagccctctaatcagctactcactcactgttactttgggtaggacattccatttttttggatctcattttcctcacaaaaaatatgcagaaactaaagtaagcaactaaactaagcaatttcaaaaggttctttctggcttttattttatttttgtagagacagggtcttgctatgttgaccaggctggtcttgaactcctggcctcaagagatcctcctgcctctgcctcccaaagtgctgggattgcagatgtgaaccactgcatccagccctttctggcttttgttgttgttttgttttgagatggagtctcgctctgtcacccaggctggagtgcagtggcatgatcttggctcactgcaagctctgcctcccgggttcacgccattctcctgcctcagcctcctgagtagctgggactacaggcacctgccaccacggctggctatcttgttgtatttttagtagagacagggtttcactgtgttagccaggatggtcttgatctcctgacctcgtgatccgcccgcctcggcctcccaaaatgctgggattacaggcgtgagctactgcgcccggcctctggctttttttttgagacagaattttgctcttgttgcccagactggagtacaatggtg

SEQ ID NO: 1242267 - DNA, 4001 bp, Homo sapiens
cacagaggtctgagtccttagcatagggtcctcaatgcctagctaggaccctatgctaagcattggaacctctggcattggaaccctatgctaagcagaaggaacctctggcatccctaatcacaagattgcctttttttctacagctcttaactttccagacctctatttcacctccttaacactcacaactttacactcacaacaccattgtgagttgggctgaacctgctttcctgggcccattttaaagacagcagggagctggagagagaaggaggaggcaagaaaagaaaggtatgcttataaagtgcccaccacatggatagactgtgctaggtgctttttattagtacatctaatggctaattgtagctactgcgagctctgttttacagatgaagaaactgaggctcagagagaagtaattgtccaagacagtaagtgtggagctgggattcaaagtcagatctctccgactccaaactccaggctcatccacaatgcccagtgcccagagaagtcaagtgacctgctctggatcacacagctatgcagaacagagatgggactggaagctcaagccagaggctccctctatcccaggcaacagttgaggttccagggtcacccatgaacacatgaacatgtgtgatgtgcagggggcgctgctgtttctgatgcccaagccagatcctcttccaggaatggccccttccctgggtcaccacgaggtccagagaccctgaattagggtctctcactactcgccctccaaggacccctacctttactttattcctattgctttgctctaataccctctgacaatagcttgccaaacagccagactgccctcaaagctctccaggatgggagaacttggagtggcttagcccttcccaacatagcagctggaggctgatgaggcagttactccccacaaccgcctaatgaggaggaaggcattcgcattcccattttacagatgaggccatttataagtttgtagagaagtgaagcaacttgtctaaggagtcaaaggcaaagtctggatagattcaaaccccactctcttcggttccaaatgtgtcttcggccactgtcctatatactatggaggagaattcatggcactgcaggctgaacctcaccttgcatggaaccaggcgttttcttatccaatgcggcaacctatgccacaccggccaccaaaaacgagcatggacacagacctgagcccctctgcccccttcacccagaaaaacaagtcagaaaagcccccaaaaaaccaccagaatggggcaagatacagaaaacgcaacctacaccctgggagctcttcatggcttagcctccagtgctcccagcagcacctacactccagatcggatgccacctgagcaggtctggagatctggggaatgagcggtgggctgggatgtgtggagcggcagcttcacctgtaactcctgcgggagtctcccacggctgcctcccaccctgccctgcacagccactgggcctgccaccacccttcctgtttgggaacctcttccccggcatgaattccctgcactctgccgcggtgacaccctcacccaggacaggcatcagacctgaagatgggcccgggggcagggcgggccatttgaggtcttgacgtctaccagcctaccgtggggccatggggcaaagtggtgtaagtgacttaacatgcacccactaaggatcgagagacggcacctggaagggaccacctccgctgcctagcagtaccaggaaggagccagcccaggagggccacctgcctgcccactgtccctccctgcctgctcttcaaaatgggtgcagaaggctctagggccgggggccgctcgctcactcaccttccggcgccttccgcctcttcctcgcgactcctcacccgcactgggcctctctcttaggcgctgaggagagggaagacctgggaccttgctgggccagtcctccgcaggcctgcgcggaaacagatcagaaatgcattatggcaaatgtagcaagtgttcccgcgggtgttgcgactggctgacgtccaggcgctgggaaccgctccgcgcccgcctcccgactgaactcctggctcaggtgcaagaggcggcaggctccttgcggggcttacggggagaaggggacgttgggcgcagcaccgcttccggggcggcccctctccagccacactccgacccggcgcggccacccggccccagctcgcaggccccactgctgcgccctctcggggacgcgaatgccccgcgccgggcgggcgcccgcggagggaggtcccgctccagggacgcggagctccagatgcctgcgcccaaggcccctcgcctggcgccggctggtcccgaacttcggggcatgggcacccaggaagggggctgcgcgtgttgggaggcccgtcctctcgccgcgaacctccggggcagccggggaacccacctgcggagcgggaagcccaggaacgctcgaagaggtcgtgggagccgggcccgccctccgcgggagggacctcggcgcgggaacgccgaggaggggccgcgcttacacgttggtgcagcgccggcttcacctgaccgcgattttgatttcagggtgtggcctcaggtaggacgcggcggcgaacccagagcgcgggagaagttgccaagtgtcgctggggccttggccaggagcccctctgcccgaggggcgccgtgctgctcaactctttctctccacctgcttggccccagttcccgcccgcccttcgcctccgggccctggcctggccacagccgcggggacctgcctgcggctccacggcccagtggccgcctcgcggagacccgacctggagaatcagctgagcgccggctgtgtgtaatcacctcgttcactggcatcgcagatgcacgctccagagccgcgggccgactctcccggacctgagcgggccgcgtgtgcccacccacacatcctggagagcccacgcgggagtcggaaaacctgtcaccttggatgatctgtcccatgtggacagggccccaagactgtgctggggtagccccttgcgcaggcaggaaagcgggatttaagggattccagttcccttgtcagcccttgcgcagtcctgagtcctgaggactttctagcctgagagtcctagggcaggagacccgcacccccagagcggctagggcctgtttcggagcccctccgcctgtgattttgtcccagagtcggcatcctctgcttgtcctcagcagtccctgcctaagatcagaatggccattccaaggggctcactcctggctgcccctgtgccatgtttcttttggggtacagggtgttttctatactgggggaagggacaggaatcactcatctcttccccagataaagaagtgagaagacctttgctctccttgtcttgggcccccagagaaaggctgtgttctggctgagtgctgaggaagttctggcttggaaactcagtacatgtggactccaaatggctgccgtcaagtggtggctgggtgactgccagtgtcacagagcggggaccaaggacagtgcagggattttaaaaatcattgttgggcacctcagacttcaatgattaactgaggtcactatggccacttatttttgttcactgattctttagacgcatcaatctactcacggctcaatcttttgcattataggctgtattggtttcacacaatttactctaaggcgcccacctaatagagctcaggcaacccgtgggaacctgacagtcccaaacaggtctgtaccctgtgtggctgcaccacaagcccaatgccctcggctttcctagggaaagcatggtgccaggtgcagatgctggccctctgtgctgtgggacagtggtgtgggagccagccagctaaccataccctgctgccatccccaacatccccaacacatatttatatttagtttctgtt

SEQ ID NO: 1242268 - DNA, 4001 bp, Homo sapiens
tgccaggtcaaacccagccaaagggtgtgacttggagcctgggacccagcagtgctccctaaatatttgtggaatgaatacacaagggaaatgtcccagaggtggtaaagtgagaggggccttggataggggtgtcccggtggcactggcttggcccagctggggcaggaagagtagaaacaagcacctctccctctagctagggagccagagaccagctgggattggactgtttcacaatcaatctggaaagaaggtggcaggccgggtggggagtggagccccttgacccaggaacccacagctgtggagttagcctccctgtcccaggtgggaggcagcctggacaccttggcacccccgtccctagcccaggaatccggagcacgcagcggcagtggggaccttaccgtggctgctccttctgggcagcggggtcctgcgttctccactgcaggctggtgcttgtctctagcccaggaagcggcactcccttcaggcaaaatagaaaaaaaaaaaaaaaaaaaaaggaaaagaaaacctcagtgcttttctcacccagcctcttctcttgaaggctcctggttggtattgtcctgccactgtgggcacacagcctccctccctctggcagcttactcactggtgcccgcaaagctgccagctgtgtgggggagaagggacctcccccctcctcctgacacacactggggcatgccctgtggggaccaggggcttgagggtggcacccgctgggtcctgatcatggggaagccgtaccctggccagcacccttctcactgaatgtgtccctgtgagctcagcagagacgcacatgggtgctgactggccctgcataagagagtgacatggttcttggtaggaagctgtttccttggtacccaggcctgccagaatgaaggggcagctgatgggctgtccagccccccagtgatgggctctcaccctggccagcccctccggacggcttcctacctgggcatcttgctgtgtctctgtcctgtgcacccagacagggcctgggcctgccggggctggcagctgctcctcaccctgctcaggccgtgtgtctggcgtcccctctccctgacgcccatctcagggcctgcgcccacccagcatcagttaggataaactcctgtcaagcccccagccagctctctgctggacccagctgctgtccccagcagggggacggcacacacactggcttacacactctcgcactcacacacacgtgggtccacacccaacacagagccacctacctgcccaggccagcctaagccaatccagcctcgctctccaaatgccactccgaccccagaagccactcctttaccgaaacatccccgtgggagatgagttcagagccagcccgggaggactccagtcagctcggacaagactgcccttctgtcccaacacctccagaggacacacacaggcagcctgaccaccatatctgctattgcactctgcctgctgccacagccccccgggcacttctggcccccacagcgtcttccatatctttagggggtggcagcagactcacagcaagtcccatcttcctggagcccaaggtagggaggggagagctagaaggggcgggactcaggtgcagctccaagtttccagctcccaaaataatcagatgcaaaggagaagcaagaacagctcgaggcgggcggtgactcagtgctagtgggccggcttagtcacctggatggctgctggcggctcctggcacatcaggacgggagcagcgccctcccccacctgcctggaccgtggctgtctccagagtgtggccgccgagccccgcgcccagggctgcctggcaggcgaggccgctccaccccgctcccgcccatcagggcccagcggccccggctgcggcgcgcccctcctccaccgcgcgccccggctcactttgggatttctccattaaatcctcaggcatcgacctgctcgtttggggcgccgagctgctccaacgttgcttggcaattttgatatcgtcgggggttgccatggggaggaaggtgatgtcattgacacaaaaaacccactgaatttacaaatcagctggggctggagctatttataaaaacacgtttttatctgcctttctttgctgaaggggaggaggaggaagggctgcctgccgggctcagggtgagcctccctgctgtccttcctacccttgccctagagaagccagacctccttggctcacccccacccccaccccccagaacttggagctgcgcattcagatctggcaggtgctggtctcagctggttttgcttcgaaggctgagagtggcacatgggatgtaaggcagggtgggtgctggcttcctgggctggcagggaccagaaaccagttactcaaccgggtccctttatttcattgcccctggtcagaaacagaggcatttgctggtgaggcagcttgagctccttgatgtgcccccctgccagctccccggagcgccaggtggagcccagccttccacagtgccctccccatccctagcctcagtgtctcctccactggcttcttttcttctcctagtgtccaatcgtgggctgcccaagctccaggcttggtcccctgctcatctctccccacactcagccaccactccatcaaaacaccttttttctgtggctttgaccatcacctgggcaaatgcttgcccgaaaacccattttgtgcctgccccacttcaggcgccacctctgatggcccagctcccactgccaggacccactagctattgacagccagagggaagcctgggagttcttgcctcttcccgtcccccagtcccttatatccaaggtggcacttggctctacattttatttttgaaaactttctaactttcttctgtagcgaagccatgtggtgtttggttaaaagtccaggctgtgagtcttcagtcttccgcatctcagctccactgttcatcagttgagtgacctttggcatgttattgaaccaattgaacttcaatttcctcatccataaaatggggatgatttcacctgcctcacagggctgtggaaattaaaggaataaagtttctggcacagagactgctcatcttgatcccaataaacattagtttttatccacccctccactgatggcagattaatcttcccaaatcatgaccctaggcaccttctgtgcaaaggtctcaagctgcatgcgtagacattttgattgaacgcagtgttagatgtcatggcattaaacataagaatttcaatttgtggccaggcacagtggctcacgcctgtaatcccagcactttgagaggctgaggcgggtggaccatgaggtcaagagattgagaccagcctggccaacatggtgaaacctcattccactaaaaatacaaaaattagctgggcgtggtggcacatgcctgtaatcccagctacttgggaggctgaggcaggagaattgcttgaacccgggaggcggaggttgcagtgagccaagattgtgccactgcacttcagcctgcgcgacagagcgagactctgtctcaaaagaaaaaaaaagttcaatttgtggtcaatatgaaacattttccctttaactaggttatcagttccttttggagaggaactctgtatttttcttctttttgtatctcaatgtaattttgtgtgtaaacttataaataatccacttctgctctgtctcactaaggaatgatccaggaaatgcaaactaaaacaaaagggatataccactccctgtcattatacagtgaaaaaaaaatggcaggtgggagagtgaattggtacagtcttcttggagggcaattttacagtcttgaccaaaatttcaaaatgtgtatgtacttgatccagcaaatgcacttctaggaatccaagttaagaaatagttgcacatcggcctgaagatatttgtataagaatattcatggtag

SEQ ID NO: 1242269 - DNA, 4001 bp, Homo sapiens
gcgggctttccttggctggagaccccacccactgcaccctccctgtgtctggcaagtccgggagggcccagagcactcacaaagcatcagtttgtcctcggggcactggagaggccgtgcagtccccacactccccctctcaggtgcacagagcttccatccaaatcagctgctcccagaagggcttgcctctggtgccgacccttccctgaccaggcgctctgtcactagggctcccaggtgccacctccaagcctgggccaggacaaccgccagggaagcctgcctgcagaggggactccttgcttgccccaaaggcctcaaccccagctagatgagctcccgtggggctgagtcccaggcccaccaggcctgggggccacacggctcctaagctcatcctctcctcctgcagcccagttcccaccagaaccagcctcaggaagaccccaggcagaacggcacaaacctcttggtgtacaatgccagggaaaggataactggagaccacaagacgttagccttgcttcccggtggggcccagtgctttataaacccgagctcactgggcccgatgtccccaaagctgaccaggtcatccaccctgcagcaggggtggggagaccaaggcctgtgaggagtgaccgtgcttggccaggcagctccctgaacctgccctgatgctgagtttcagagtcagaatctgtgccaggtcaaacccagccaaagggtgtgacttggagcctgggacccagcagtgctccctaaatatttgtggaatgaatacacaagggaaatgtcccagaggtggtaaagtgagaggggccttggataggggtgtcccggtggcactggcttggcccagctggggcaggaagagtagaaacaagcacctctccctctagctagggagccagagaccagctgggattggactgtttcacaatcaatctggaaagaaggtggcaggccgggtggggagtggagccccttgacccaggaacccacagctgtggagttagcctccctgtcccaggtgggaggcagcctggacaccttggcacccccgtccctagcccaggaatccggagcacgcagcggcagtggggaccttaccgtggctgctccttctgggcagcggggtcctgcgttctccactgcaggctggtgcttgtctctagcccaggaagcggcactcccttcaggcaaaatagaaaaaaaaaaaaaaaaaaaaaggaaaagaaaacctcagtgcttttctcacccagcctcttctcttgaaggctcctggttggtattgtcctgccactgtgggcacacagcctccctccctctggcagcttactcactggtgcccgcaaagctgccagctgtgtgggggagaagggacctcccccctcctcctgacacacactggggcatgccctgtggggaccaggggcttgagggtggcacccgctgggtcctgatcatggggaagccgtaccctggccagcacccttctcactgaatgtgtccctgtgagctcagcagagacgcacatgggtgctgactggccctgcataagagagtgacatggttcttggtaggaagctgtttccttggtacccaggcctgccagaatgaaggggcagctgatgggctgtccagccccccagtgatgggctctcaccctggccagcccctccggacggcttcctacctgggcatcttgctgtgtctctgtcctgtgcacccagacagggcctgggcctgccggggctggcagctgctcctcaccctgctcaggccgtgtgtctggcgtcccctctccctgacgcccatctcagggcctgcgcccacccagcatcagttaggataaactcctgtcaagcccccagccagctctctgctggacccagctgctgtccccagcagggggacggcacacacactggcttacacactctcgcactcacacacacgtgggtccacacccaacacagagccacctacctgcccaggccagcctaagccaatccagcctcgctctccaaatgccactccgaccccagaagccactcctttaccgaaacatccccgtgggagatgagttcagagccagcccgggaggactccagtcagctcggacaagactgcccttctgtcccaacacctccagaggacacacacaggcagcctgaccaccatatctgctattgcactctgcctgctgccacagccccccgggcacttctggcccccacagcgtcttccatatctttagggggtggcagcagactcacagcaagtcccatcttcctggagcccaaggtagggaggggagagctagaaggggcgggactcaggtgcagctccaagtttccagctcccaaaataatcagatgcaaaggagaagcaagaacagctcgaggcgggcggtgactcagtgctagtgggccggcttagtcacctggatggctgctggcggctcctggcacatcaggacgggagcagcgccctcccccacctgcctggaccgtggctgtctccagagtgtggccgccgagccccgcgcccagggctgcctggcaggcgaggccgctccaccccgctcccgcccatcagggcccagcggccccggctgcggcgcgcccctcctccaccgcgcgccccggctcactttgggatttctccattaaatcctcaggcatcgacctgctcgtttggggcgccgagctgctccaacgttgcttggcaattttgatatcgtcgggggttgccatggggaggaaggtgatgtcattgacacaaaaaacccactgaatttacaaatcagctggggctggagctatttataaaaacacgtttttatctgcctttctttgctgaaggggaggaggaggaagggctgcctgccgggctcagggtgagcctccctgctgtccttcctacccttgccctagagaagccagacctccttggctcacccccacccccaccccccagaacttggagctgcgcattcagatctggcaggtgctggtctcagctggttttgcttcgaaggctgagagtggcacatgggatgtaaggcagggtgggtgctggcttcctgggctggcagggaccagaaaccagttactcaaccgggtccctttatttcattgcccctggtcagaaacagaggcatttgctggtgaggcagcttgagctccttgatgtgcccccctgccagctccccggagcgccaggtggagcccagccttccacagtgccctccccatccctagcctcagtgtctcctccactggcttcttttcttctcctagtgtccaatcgtgggctgcccaagctccaggcttggtcccctgctcatctctccccacactcagccaccactccatcaaaacaccttttttctgtggctttgaccatcacctgggcaaatgcttgcccgaaaacccattttgtgcctgccccacttcaggcgccacctctgatggcccagctcccactgccaggacccactagctattgacagccagagggaagcctgggagttcttgcctcttcccgtcccccagtcccttatatccaaggtggcacttggctctacattttatttttgaaaactttctaactttcttctgtagcgaagccatgtggtgtttggttaaaagtccaggctgtgagtcttcagtcttccgcatctcagctccactgttcatcagttgagtgacctttggcatgttattgaaccaattgaacttcaatttcctcatccataaaatggggatgatttcacctgcctcacagggctgtggaaattaaaggaataaagtttctggcacagagactgctcatcttgatcccaataaacattagtttttatccacccctccactgatggcagattaatcttcccaaatcatgaccctaggcaccttctgtgcaaaggtctcaagctgcatgcgtagacattttgattgaacgcagtgttagatgtcatggcattaaac

SEQ ID NO: 1242270 - DNA, 4001 bp, Homo sapiens
aaatgcattatttaaaaccttatggccgggcacggtggctcatgcctgtaatcccagaaccttgggaggccaaggcaggtggatcacctgtggtcaggagctccagatcagcctagccaacatggcaaaaccccggctctactgaaaatacaaaaactagccgggtgtggtggagcacgcctataattccagctattctggagactgaggcttgagaatcacttgaacccaggaggcagaggttgcagtgagccaaggtcacaccattgcactgcaacctggcaacagagggagactctgtttcaaaaaaataaaaaaataaaaaaccctatgaataatgagaataacagttcatctaaatcagcccccaagaacgtgcagcccaagctcagaaggtgtaaatagtaagccctccgccttccccgaggcttcactgcccaggaccacctctgaggctccaggctggccttgagctcctgacccaaggactgccccgagcccaaggggaaggaagcggcatgagactggcaagtgcatgacagtggaggggctggaggggaagattcttactacagttgtccctaaacccaggtagtccctgcccccagagctccaactgccattgcttgtcatgggaaatgattcactttgcccagggagaaaaagcagggcctctatatgaaaagtgagaagaaaggaaataacttctgtagtttagacacctctcccaaactcgtgtccctgggtatgtgaggtggaaagtgccagtcaaggtgaaacacacttggagataggtccttgcatttcttggcacaggaatgtcacccagggctggctgtggtaagaaggtaaggctgggtaagaaggtggaaaagtggtcacctctgcagtgtgagtcaggggccagcccctgtgacttgagactggagatttccccattcgagacccattcccttgggtcttcaaggatgctggaaaacgcgaagacatgctgatgctttggggagaggggaggtgctgtggggattcactggaattattagagcaaacttttcttttcttttattattcagacaaagaccccgatcttcctccctgaacaaagtgaattcatttcctcaataattggcaaccattgatgctgcaggggacacatgagagcagaaggggcggagtggaagggcagagaacgcagttgcagtcgtgtgaaggcccaccataaacagtctgtggggaaaggagctctgggcaaggactcctaagacgtggttcaaatctgacttgagctgtcccctgggaagcccaagggattctgcacaagctgcacacccttcagtctcctcatcccaggctgagagaatagagacgaccactcctgcactgctcctccagagtggtccgtaagatcacatttaatagagtgcccggcaccagcaggcgcccagacagcgatactgaaggcacaatcagacacagcccaggcacatgaaacccttcagctcccccaaagcaggagtcgtctaaccccctagagacccggtgcagcctctgttcttctcatacctgcaggacactggaacaaagccatatatcatagaacaagacccacctttatcaggagagctgttttccctttgaaagtcaaatctgaggccttgggacaatgcggggtgttcccagcacaccaggcccggtggaggaggcccagccagaggctccctctcctccccagcacactgcccagccagcctgcaagagcacggctggaattcacctcctcagactcctcctctgttcttttcaggcctttaaggtaatcctgagggtgtgaagcaaagactttatcatccatgggggggaatggtccagatacctaaaggcaaaaatgatgcatccagaagaaaggccaggtaggaatccaaggcccagagatgttgggtggctgctcaggaccacacagcgagctgatcgcgggtccagaggccatggtcttgttaagctacacccagaagtaatgttccagcaactgggcatctggaactgcctctaggacaaaggtaagattaaaccaaaccagactaggagggacaggagggagaagggcagctgggccagccactttcccttcctgcttggttaagcccacgcttaagccaaagttttcatcctcctgcacacaatttcctttttttttttccacttacaatttgtaaaaaatgattagtcaggttctagagaggacgtgtaccaaagacatcgaagaaatgaacaattggcatcctctatttcagaaacggaagccctcctctcagaactccctgctccctatcactccctttcagcaagccaggattccaggcaggaggcattagtgagccctgatctgggagaacagttgttccctgggcgcttggggaggcggctgtgaaggaacttcagtccctcacagaaaggcaaggtccctgagtccacccactccccaccctgcccatccagcttgcagcccccccaggactccccagctggcagagagggggcaacattcacagatccccaccctcactgttggcaggaactccattgcctcctgtccctttccttcttaggcggctcacctgctcacctgtcacccccccaccccagggtgaccagtcgccatccactggccaccctgaagggctgacactcaacctcctctcgggaacacctggctctgtagagtgccggaaatggggcctccctggtggacttccttttctcttccttcccctttcctaccttttctagacatactgtctgctcgagctcttccttttttcaagaaatcttctctgccaaccacagcccatctaggttccctttatttatttatttatttatttggttgttgttgccgctgtttttgagacagagtctcactctgttgcccaggctggagtgcagtggtgcaatcacagctcactgcagcttcagctccctgggcccaagtgatccttccacctcagcccccttgagtagctggaactacaggcacacaccaccatgcccagctaatttttaaaattttgtaaaaatgggggtctcactatgttgcccaggctggtctcaaacgcttcagctcaggggatcctccctccttggcctctgaaagtgtttggattttacgggcatgagacactgtgcctggctgggttcccttattctctgcattggcaatggggactatagggcatatcagggagtcgtgacagggtctttactggggaggtaaaacacatacaacaaaggtttaagatccatgccacctgacccagttcagggttcgtgagaactaggcaagcacttgctgaatatgagatgacttccccacaaattccactctcaaaaaggtaaataactgtgtaagcaacgatacaagagaaatcccaaggtagcatgaggaatcgcccaataggtgcatgtgttcgtgaacttcccatggatttactgatttatagcacataggactgtgacctaggccagcattattagaacaggcaaatccccacccccaaaaaagagtctctgtgatttgaggcagtgtggaacagggcctcaggcttcagtactgcaatgccatcacccaccatccaaccagtattgctcaagtcttcatgctttaaagacttttcggttttccagtttcttttttttatttctcaagtcaaatgcccctggaaagtcagaagcagtcaccaggtatgggcagctgatcctgggggacggggggactggacaggagaaggggggttttcatggggaggaagaaggcaccaagagggctgaggctcacttcagatgggagcgaagttcccccgctgctgtgacaagcagaagagagagaagaggatgacttttgccagggttgaagggcaaagtcagatgattgagctcagccaggaatggggttttgttaatgtggtaaccaaaaggtagcagggtagggggtttactgtatagca

SEQ ID NO: 1242271 - DNA, 4001 bp, Homo sapiens
gaaagaaggaaagaaagagagagagagagagagagagagaaaggaaggaaggaaggaaggaagaaagaaagaaagaaagaaagaaagaaagaaagaaagaaagaaagaaagaaaacgaactaaaggaaggaaggaaggaaggaaggaaagaaggaaagaaagaaagaaagagagagagagagggagggaggaaggaagagaaagaatgaaagaaagaaagaaagaaagaaagaaagaaagaaagaaagaaagagagagagagagggagggaggaaggaagagaaagaatgaaagaaagaaagaaaagaaagaaagaaagaaagaaagaaagaaagaaagaaagaaagaaagaaagaaagaaagaaggaaagaaagaaagaaagagaaagaaagaaaagcatacgggattaaggatgtactcttggtgtaaggggaaaatgttgccccacgtgggtaagggtgccaagggatctcagtggtggggctggacacctttctgatccaacttttcagagtgccctttctgcttgccaagggcagagataaggcagttggaaaagaagctttgctgttgcaggctaatcattccattctcgcagagcaccttccgtgtgccaggtactattgctacggcagggaacaaagcaggtccctgcagggaacaaagcaggtccctgccctcctgcagttctgggagcttagcaaggctctggctggctcttggaggaccttactgactggagtttgtgtctgcttggaggtgccctctcccctgaacctctttcacaggcagaacctaggggggtggggagtggggtaaaagaaacaaacctctgctgagtcaagggcactgcaagaatgcagaagcgaccatgcagctctggaaggatgcggtgggaaacccgccactcagtggtggagaaaagcccaccagtttctccagcaaatggctgagctttgttgggcctccttgtcttctcatctgcccatgtgttaatatctactcgccattggtttgttaggttcaaatgaaatcagggatgtgtccctttttggctgctagctcttctcagatcccctgacctctccccatctcttctctatggctctgcgtgggaaggggcagttgtcacccccgactcccactaagctgagccctcctcccaacctaagcgggaggaagccggttctgctcacggataagagttaccgggctcctgagttcttgttctgctgggccggggtccaccccctctcctgggctcatccgactaggacttgggaagtgctaggggagccaggagatgcccagctgggggctgtggccggggggaggccaatgacagagcagggggaactccctgtagctgggcacccacttcaacagggccgggacgacccccgcaggcagtgggccgcccctcacccacacggtcctgctcagcccaggctcacatctgggctcaggaggcgggaagcacaggtgtaaagaaatcgccaactgtgcagccccaatccaagggttttattaaagtgggggcggcgggaggggggcggtggaggaaggataagcggcgcaaacgccctggagagtgagagaaaaggtgcgagaaggcaacagctcccctcaccgccctcgattgcagcagagagccttctgcacggcggcggccgccccaccttcacaccggccccgcgtgcggtgaaagtggccgagccgcgccgccgccggatcagggccgccccggcacaaactttcccagacccgccctcggagcggccacccaggctcaacgggctccacgggcgcagggcggctggggctgccgcggagggcgggtgcgcgtggaccgggaggtggggaggcggcgcgcggcggggagtcccgccccgggttacctgggttccaagggtctcgggagtccagtggacagggcgcggggacagcacaggcaggccggagaccagacactcctcccgggctgcggcgaccccggactcgcgggccctgcacctggccctgcgggtcgccgcgcctacccatgccggtccccgcccgtcccctcccgcgcggggcggggcggccccgggggaggagccgagggccgtgggcaccaccccctgagccaggcctgcgcctcatcacgtgccaccgaccctgggctctgtgacttccaaagactcgccaccccattccacagcctgaggtgccaccaaagccataagcccaggggagtctctcacaccccattctcctagggcccatgtaccccacgcccacctccaccccaggagccgaaggccggcagggagcctggagagcctccttgatgggagaactgcggagcttgcccctcggaaaagtgcatggggtggagaacagggaaggagaaaaaaacaacaactgggtactcgcagccccaccgcggtgtccgcttcgccggtgggagaggatcctcgccgccctgaatccttgaagtgagttccacccctgtctcttggagtgctcagggtggcgggccctttgccagccctcaccctttccccagggatcctgtcccaggtcacaggctcctagactggaaggcgctgggcctggacctctgccactcagtggacacagctataagagatgaagggacacagaggacaaagaagaaacatttggcttcagggaaccagactctgtgtctcctcccaggtgctgaaggaacaggttgcagctacctggtgcccccaccccgaccctgccagagaaaggttggaacatccacacctgtggaccgaagtcccccaccaggctctttcctcccacccttcagccccaggctctctgagctcctgctcctccctgccttgccttgtttgctgagggcacacacagtggagagagcacaggactgggagtccagagacctgggctctagtctactctgtgactcgggtcaagtctctggccctttgtgggcccaagttgccccatttgcagtgaataggttgcagtcaattatctccggccatttttacggatcctgaaccgtggtcttgggcaccttgctttattaggctttttggtggctgtgcatcttgtaagggtgtgtatgcatgtgcgtgtgtgtgtgcgtgcgacatgcgcttgtcctctcagacccaagttcttaaagggaaagagactggggcctacacagaggcaggcatgtatattccacagaccagagtttgacaagaatgactggacacaagagtggagcccagtcccagctctatgctgaattcagagtagccttggacaagaccctcaccatctacaaaatggagattaataatccctgctttgcctttccaaggctagtcgggggactcagtgagatattagatatgaagctctttgaaggggaatagcacagggatgtgtgcttttgatgtctgggccagtgatgggtttgggggaagaatagggtgtgaagcattctctgggaggcaaaggctggcactggactgattggccaccctgccaaagctgcagcatgcacagcacaggcaggcaccccaccaccagcagccaaggtgagcagagatgcctggtgccccacctggattcctgcctgctgtaggtatctgtgtgtgcaccttgaagaaactaaagagggaagataaagaggctcccaacctaaatggaggtggtcagtggattactgatgaatcgatctgcatatcttggccaaaatcaccctcctctgctcttagggagtttaaagtctaactgaatgattgaacatgaaccctttggagaatgatgtggagccaggagaggggattgtggatggtgagcacacaggatgatcagaggagggggaagggcagggaggggccggggaggggggtacttagaccacatggagatgcatttagagtattgtgttcaacactcctatttcatagtgatgaaatggaggcccagagagggaaagtgacctgcccaaggtcacacagtcacaaga

SEQ ID NO: 1242272 - DNA, 4001 bp, Homo sapiens
gcctcttttttaatactctgtgtaaaactgggaattacttattccctcagtgattgctacaactcaccaatgacaccagctacgtccagagttttctttgagggaaaatccttgactactaatccaacgtcttttttttttttttttttttttttgagagagagacttgctgtgttgcccaggctggagggcagtggtgtgattacagctcattgcagcctcgacctcttggactcaagccatcctcccgcctcagcctcccaagtagctgggactacaggcgtgcatcaccacactcagctaatttaaagaaatcttttttgcctaggctggtctcaaacgatcctcttgccttgccttcccaaagtccttgggattacaggcatgagccactcagcctttttcttctttttctacaatagtctagaaaagttcgcccaataacctggcaccctccaggttttttttttttttttaatggagtttcattcttgttgcccaggctggactgcaatggcgcaatctcggctcaccacaacgtccgcctcccgggttcaagcgattctcctgtctcagcttccagagtagctgggattacaggcatgcgccaccacgcccggctaactttttgtatttttaatagagacgggatttctccatgttggtcaggttggtcttgaactcccaacctcaggtaatctgcccgccttggcctcccaaagtgctgggattacaagcatgagccaccgagcctggcccctccaagtttttaacagtgaagaatgttacttgtgcaagtcagaatctgataccaattaaatggtgacagctttgctggtaaacaagaatatgctcttccatggcaaggaagggagactgccacacttgacaggtcccaaagatacatggagttcagtgtctttaatgaatatcagctattggcgatttcaattttctgctttttattgaatcgattttggtaagttatatttttctaggcaattccaaacatttggattataaggataactgatatcttgaatgctgacccagaggtgaactctgcaaaaaaagtgcctggtgaatcagagaaataacagcttacatatgtactggatgttacagtttataaaagtactgcccatagatcacctcatctgaagaccaatgtctgggcggctttggtgactttttggtgtctaattatttgcaaaaggatggataactttctagctaagcaaaacagctgattcacatcaaccctattcctggccaggctagaaaatctgtggaggactatgcaactattcctcacttcagtcctcggagtcatttgtcattgacaggagagaagcagccaccaagtgccttgggagtgagcgttgacatgagggtgttagcagtgttcttagctcatggaaaccttccccaaggcaaggcaagaccaagctgggaatggaaagtctggcggctgtcatgtttactaatgcggatggaactgcctctacctgtggttccacagggcacttggtccaggacgcagtgggcagcgccaggacaaagcacactcaccagggcttcaaagtccttacagtcgccgcgggcgtaggacgcggggaagggccgcagcaccgagtcgcgcttgtagctctgcagggccgaggcgaagaggctgcaccggaggtcggcggccagcatgtcgcggcccgccgcctccctggcggccgcccagcctgagggctgcatcccaggtcactgcgcgttgccggggtagacgcgctggttaggggcaagggcgagcgtgcgttcagcgcgggggctgggcccgcggacaatgggccgtcaggggccgggttcccaagcctggggtggagctaggcagggggctgagatgacaggggtgagaacgtgccgacaagtgtcctctgccggggtctgggccgcggctcgccgccgaagagagagaccgaggcctggaccgcgggtcggcggggaggttgggcccagggataaaggaactggggctggtgggggggaggggttcccggcctaggggaagggctatgacaatggaatgacaaccgcgggaacgtgctgacacgtgtcctccgcggaggcctggggcgggaagcagcccccgggggacggcgggcagagcccactctccgcgacgggcgaggctgctgcgccgcgcgcgccttcctgccccgcctcccgccgcgccgccgaagtcccgcctctcgccaagctgcccgcggcgccacctgtcttccgcctgcagctcacgtccgcttgccttgcccggcctacctcccctcccgccgccgcgctccgcccggcccagccgagggcccgccccttcgcgccccagccagctccaccgtacgggttgtgcccgcccctcccagaccccgatcacccgcagctacgagagttgccgccgccagtgtgtgccgggcgacgtcgcccacgcccctgccagccatcctcacagcagcagcagccctggtagaaattgatgtgggcaccctctcgacccgcccctgtacttgtctttgtcccagctctgcggactgagcctacctctcttccttggggtattaatgctacctattgtctctcttgaatcttttccctccaaaactgcacagaaggagccatttaacacccagggaaactgaggcttagagtgctgcaatgcttgcccaagatcccacagccagatgggtaaatctaggattcacaccgagatctttggaaaaccaaaagacttttcctctgcttttcagcctccagaattctctgaattgcttaagtctctggcctcaaatgccccaagatcctccttgggagacctctctgacagggagcttgggggagagcagaggggcattgacttaactctgctggagggtaaggactagactcccatcccctctccctactcagaaccttcattagagaaaaccccaaagtgtgacctcatggtcacatgcaaatctaaacacagaccattgtgcttaaaccaacacaccgcacacactcctaccctgcaggatcttctgaggaagaaacttctccttctgcatccaggctgtgctgggccctggactcagaggagaggtggtcccatgccattggattgcatctatgacttcgggaggtagggcgaagactggtcccccagacaccacagagcttcccatcttcttttgccaggtaaaggttgggggctgctcccaggagcccacatcaaatctgtttgctctgaggcctagaaccacaaggcccctagtgcttcaaaagccatgggggttctcataggacccaggaactctaaggtggcttctgaagctcagaccccaggaagggagagcttggagtgggtcaggagaccagggaaccatctctcattccacctcttcttcattgcaggcccttagacaaaagccaccctctgatacctccttggcctcaagaattgtttgttgggtggatatataaaatttgcttatctgaagatatttgtcacatatgatatgagaatcatagtgataatattcacatcacagggtggtgtggaagggcctctgatggccagcattctcatgacttagctcatgcagaatattagaattctttttaattcttgtcaattccatagacacaaagttgaatttcattatagttttaatttgcatttacttgatagtgaaactgaatgttcttatgtttactttattcttctagattttatcagaatttgctaaggtggtctcagaaccacatttcttgtggaggggtttcagccctgcttatataaatttgatataatccacagaccatacaattcacccatttaaagtgtacaatttaatagtttttagtacattcacagatatgtgaaactgtcacaatcaattttagaatatttttatcacctcagaaaggaactctctacacctagtctatcaatgctctacccaccctaccatgtcgcc

SEQ ID NO: 1242273 - DNA, 4001 bp, Homo sapiens
gtagctgggattataggcgcccgccaccatgcccagctaatttttgtatttttagtagagacggggtttcaccaggttggccaggctggtctcgaactcctgacctcaggtgatccacccgcctcggcctcccaaagtgttgggattacagatgtgagccactgtgcctggcaggtctctaatacagttctactgaatgtcaggtttccagattagtgattctctgactggggttggtggacctacagcatcagtatcatctaggaacttgttagaaatgcaaattctcagactcctcctaagacctactgaattagaaactccagaaatggccaggcactgaggctcatgcctgtaatcctagcactttgtgaggcccaggtgggcaggacacctgaggtcaggagttcgagaccagcatggccaacatggtgaaactccttctccactaaaataaaaacattagcaaggcatggtggtgcacgcctgtaatcccagctactcaggaggctgaggcaggagaatcacttgacctacggaggcagaggttgcagtgagccaagactgcgccattgcactccagcctggggggcaacagcaaaactctgtctcaaaaaaaaaaaaaaaaaaagaaaaagaaaaaaagaaattccagaaattggacccagtaatctgtgttttaacacacgctccaagttgttctgatgcataaaatttgagaaccactgttctagttctagatccttgtgtgttctaaggacctgtggttcattccttagataccaacttaagtctggtaactaagccaggatggggacaaaagacaccatgccagagcagagccagcataggagtcttccagctcatagtgttgcctgatccttcagaaacaacatgcaaacggaaagtataactaaagttcttagagatggaatgacccgattactgagatttgtttaaaatactaccctggcacacacataaaaaaaggagggaggataacagatgaaataaatacagcaaatagcaaaatgttgattactggtgaagctatgtgacgtacatgatggttttctggtaatccctacctccctacttttgtgtaaagttgaaaagtttcaaaataaaaagtttaaaaaaaaaatcagaagctactctaatgggctgtcctcaaagtcaagtctaaatgttaacaggaagattaaccaacactccacaattgcctcattactgttcttcaaactcatcaagcatattcccactatagggccttcatcttcccaccatattcccaagcatattcccgccatagagcctttgtccctgctgttcccctttcttggaatgctttccacccagatatccacatggcttgttccttcactcttccagatctctgctcaaaggccaccttgaccatcctatttattaaaacagaaacaactcaacacccacacactagcactctctatctcccttcccagctttatttttttccacttaccatgttctaacatataaaatgtttatcagaatgtaacctctggtggcagaggctttgactgctttcagtctacattcttagtcccttaacacatttcttgaatgagagaataaatgaatgaaccctctgctggatacttaagtcaaatgggagatatatacaataacctgcatgtttctacacatagacaaaaatcacacaaaaaaatgattttaaaaagcaaaacttcaccttcaagagcagctgagatccagaatgtgaagatcttggggtgaggttcgtgagatttgaaaataaacagtcaagtgctgatctggatgatcacagaggaataaagagggaggcactaaatgtccagcctgggttgccctggggtgaggggtaggatgacggcagcgttaggccagaagtgccaacttttcacggtctttgttgctgcagaagtcaagaaaaatttagcctctttccaagggctgttgctgcttggtttctgttgctatcacaaggagaaaaaggtatttcagagggagtttttcttgttcaagcaagagacagttcagagattaccggctttttcaaaccaggctgctttagtgaaagggacttgcttcctctactctcaatgccctttcctctggagagatggaaagtggatttaaaaggtgaagagttggaaaaggaaggtggtgggttatggaattcacaggatcacaaacactttttaaaaaattagccggaaacgtggcctaattcaaagctttcatgttacacacagaatacttagacctacagaggtcgaccaatttgcttaaggttaggagtacagaaggactgggatgtaaagacattggacaggtcctaattacatctaatcttcatgtgatgtggttataattaattgagttgttaatgaagtaagcaagaaagacctatctgatttatctaaatgaggtaaagaatgggccctttcaaaagaagttgggccaaaaatagactatatgatgagtgtccagagaaggtgttaaaactcagcggctaatatagaacgctttatgagtttccacgagaataagtcaaatgtaaatgagcctcaagtctggatcacaaaggtctttccctaggtccatgggcgcttctctaggtgtgacaacttcacgtctagtcaaagcagcttcagagctcaatgtttaaattgtgggttgggctcccggctttgtggtcctggaggaggttactccactccatcccgtgtgctcccttctcaggagtaggccactaaacaaagactactaggaagaatcactgaggggcgactcccgcaggttagcgctatctcgggcaccccgcagggagagaggacacggctgccccgcgaaaacactctctggcacccgtgcttccaggacaggccctgaggcctctcccggggaagcagttacacctgttctccggggctcccctgaagaccccaaaaacacccaacacctgcctccccaggaaagacgctctgggcccgatctatgccgcccggccgccgggcctgagtgaagcctgtccagcctaggaggggccctcagaacctcccggtccaagcctctcacttcgtccacccctgcggagacggggcgagccccgcacccttcccgtggcccggccgcaccgccctgtgcccgtggtggcggccacacaggccagcctggcgagtactcacggcgaccccgggccgcgcgcggccgcagccgacgggacgagcggcccgggacgccccgcgggggcggagcggcaggccaaggggcgggggccgggcctggcgggcgaggtcgcgcaccccacgcctcgtcgttccgtcacgggcgcgctcagccactctgcgcacgctcgcgcggtgacacgatggcacgtggcccgctcctgaccaacagcctgacggcctgctcctgggcgcgcctcagcagccgacgccagccttgagacgcctgcgcggcggtcgctagtcgggaaagggtgcggagtggggggtggcgcctgcgccgtgggtaggggaggcagtggagaaggaagagggactctgggggagtgcggggagccttccaaaggagaatacttgcatttagcgccccgagtggttgggaggaacaagcaggaagggcaacccaggttgcctgtaggccgggagggagtcccctcgccggaggttggggccggcaggtagagactgagggaagtcctgaggccttgctgactgcaggattctctggttcgacaatggaagtcgaacacctcgggcttttaaaaattctggcatttaactcatttgttccccggtagctgcagcgtgatggagagcaccctggccttctagtcaatctgggtctgaagcttgggttcggcacttattgatggtgcagccttaagcgatgactttcactttgtgaatctgatttctcctctttgaggtggagacagtaatatgtgtttcacggagccgttgtggtga

SEQ ID NO: 1242274 - DNA, 4001 bp, Homo sapiens
cacaataagaaatgaacaataaaaatagaacagttataacaatatactgtaataaaagttatgtgaatgtggtctctcttaaaataccttattgtactatacttgcctattttcagactatagttgaccaagggtaactgaaatggcagaaagtgaaaccatggactactgtaccttagtagtaggttgaaggaagttctgaaatcacctcatatctacataggagtccttgtccttctccactagttatgggatccaggggaataaataccaggaatggactactgagacagaggggcccaggatcaggcaaacgtgactcacctttaacgctagtagcagggccaccgcctgtgggcgatgcacagctctgctaggacctggttttaaggcgagaacagcatcagaaatgaagtgggagacaggagaaagagggaaggagagagtccctaactcaagttcaaggcttaaaaagaaagtgttaatccagaacttgtcttagaaaagggtagaaaagagaagaggaatgtttagtgacagcctgtgagccacagacagttcaggacaaccctctcccattcccttctgccatggtacctgggtgttgtggacagcaccaagtacagctggatccccaagatcattctcttcctcctctaggtctgggtccagatctgggtccagatcctcctcgtcctcctcctcttcctcctcctccccttcattctcttcttctttttccaactggcaggcagacaccagctcctcctcagaagccaaggggccacaggtcttacctggcccttggtttaagtgtgggccagaggagaaggtaagatggggctcagctgtgagtcttgtctagagaggctgctactcaatagcacttctgttcataagccatctccagcaccacctttgaacataacgcctcctgttctgtgggtttaactcggcctcccttctcccaaggtgccccgaaccatcccccagtaagtcaaatggaacctgagccaggtgtggtggctcgtgcctgtagtcccagttacttgggaggccaaggcgggaagatcatttgggcccaggagtttgagatcagcctgggcaacacagtgagaccctgtctctaagtaaaaaatttaaaaagcaaacaaaaggaacccggcagataccaaacaccttcactttcacatcccctcttcaattccttcattaagttctagcacagccttttccatctgctctgccccacccaacgccctttctattgcctctttgaacaagttccacctgccctgactcactgcaatttaaccctactgtgtgccatatactttacgtgcatatgttcatttaacagtaatatgaggctgtcctgggttgttgttgataattttactaggttggtgagaaaaataaagcccagaagagtgacctttcagtcacccattatgatataattagcaagtggaagaatttggaataacttccagtgactctggacatccaatcccatatgtgaaacagaccagcaacctctgcatgctggggcattttatataacatcacggcccacttgttgataccttcaaggcaattcatcttggcaggctggtggacttccttcttagccgtgtcctccagtgaaacagcattgccagcctctggaaggtaaacctgagacaagaaagaggccaagaggcaccatcctcagtcagtaaggatgacatggcaccctaaaacagccatggaatcctcccagcaagatggttagagaattcttggccatggtcttgaggagagagaccctggggtctcagactgccataaacacccaccctcccagctcggctctagggagctgtcccacaaagggacagaaatgaggcacaggctagaagcaggaagagaagtacttcccaaccgacatcaccagtcaccgtccgagtgtggtgatgccttgctgccgacacccaccacctgactgttgctgtcctttctgtttaagttattcatagcagcctgggccaggacctgtttgccgctcctggctttaaaagtcccagctcctcccctgctcacccattaaagggctagcatcctccatccattggggcctgatggaaatatgagaacatagtttaatgattaaaaaaacgcttgaatggagaaaagacataaactgcatttttagccatccatggcttttagtacagtttattgggattgatatttgggggcagatagttaaaaagaggatccctgttttccacacccttcattggtagtttgtgaggttgcatttaatttaatccctaggttttgcttcaacaaaattggataggaaagtcctgggtagatcctggggaggatgcctagcaaccacattcctggcgcttcagggcagcgtacttgaagccctcaagtccacctgatgatgcttgcccttcaccgggtcatgtgagcttaagtcagctactcagctctgactgatgagagacccctgtgaatttggaagtcagatcttcatggtaaaaacacttttgcatgagatacacagtcttacatcttcttggctgctctaatggcaaactggtccagaagctcaggagtaaaaacaaatcaacaacaacaaaaacaaaaacatagctgctcctggtaggcaaaacccaacaccctcccaagtctcatctaaccctcaagcaaccctgggttctgtgcccacatcctgtgttcagctgaaacccacatgactttgtagaacttctgaataagaataaaaactaagttaatttccctacatcaaaaatgaaagttaggaccctcttgtcatggtgataagaccatgattcttggtgcctttaaaggaaaatatttgtttcagaagttttactgcaggtcataactatatgggtgggggaacaaatataagtagcttgaaagttactgaaaaacttctcatatatcttgagatagcatcttactctgtcacccaggcttgagtgcagtggcatgatcttggcccactgcagcctccacctcccgggttcaagattctcctgcctcagcctcccgagtagctgggattacaggcggccaccaccatgcccagctaatttttgtatatatatatattttttttcagtagaaacagggtttcgccatgttggccaggcttgtctcaaactcctgacctcaagtaatccacctgccttggcctcccaaagggctgggattacaagcacaagccaccacacccagctgggttctggcctttttggtaatgttattcagctgtttctctcaggaacttcctaataacgtactttagcactattaacaaaaggaccacatggtgaatttcagtgttccagaggtgattcattaggttgttgtagagactagatcttaaggagaaacttgttgcatgaagattttcattctgaagggacttctggtactgactagtaccaaagcaggtggactagggctcagtcttaaagatcacagccctgccctggctgtttggagtttcacttgggacctactgttttttatgaaggtcccctacccttatctgaagtctcatatgtctactgatcccctagatgttctaactttcctgccatcatttcattatgttaagttcaagccaagcctatgttaggcttggggtaaacagtgaataaagcagatgcttcccacagcctgttagagcttcttctagaataagaagtacacacaggtacacaggattgttgggtcagattttaaaaagacattagagtggctcatacctgtaatcccagcactttgggaagctgaggcaggaggatagcttgagcccatgagttcaagacaagcctggacaacatagtgagaccccatctctattaaaaattttttcttaaagaaaaaaaatgacattagaaatatttacatttgctacataaaacactcttttatggggagattttttatccattgtttcaggttcttta

SEQ ID NO: 1242275 - DNA, 4001 bp, Homo sapiens
aagatgtgctagcattctttcagtaaactcgaacctgccttgtgaagattccttcattcgaatggtggaatccacccctccagccacacacctaatagtacatcaacgtggggcttgggatgcagaactaatgtcatttctatcaatcagggacgccaccacaccttgctggcttctgccacggataacgatgaaactacatttaacactgcctggcactaaggtttagagttatgagtcggtgcttccctgtcacttcacttaaccctctgagtgtgtagtttgtagatttgttaactgcactgagaggtcccctggtgtgacctcaaaataacggcctctccaggagccataaacatggatcaaccccaactcaccgcccctcagcccggtagctggttgagagaggaaaaagggacccgccgggaggtcctttgagggtaatgccgcctttgtgcccagggcgtggcctgcttgctcactgacagaagaggggacagccgagggctgcggggctgggagggccccgtgggggccggtgagggtcaggccccggtccaggctctgtggcaacgcagcattagatctttccgacaacccagcggtgtagacattgccactgactgcaaaggagcttgtcaggggagcgacttgccaaaggtcacaccgctcggccatcagaaccgcggcagaagcccccacacaaagcgccctccctccgctcctggagaggttttaaacccaggacccccggccctgcgctgtcccaaggcctctccgacggcggccgggctccagggtgcaggctcccggccatctacccccgggagccgcggacaccgagggagcgcgagtccccgagacgccgggccacgctcatgtcacccaagcagcggccgcggccgccttggcgcgcgcaccgggtccggagctcgcgccgcccgtcgagggcagaggggccgctcccccgcgggggagagccgggtgggcgcccaggacccagcggcggacggcgcgcgacgcctgaggcagcccagactcccccggagcccggcaggtgtccgcgccgccccggcttctgaggccacacttccgagcgcggggttgggcggcactgccgggggacttgcggtcggcgcgccggacctgcgtgggcgcccacgcgggaccccagtcccccccaccccgccgagtgtcccgcgcgcgcccccccgggcgacacccccccccgcagggcgccccggccgcccgccgtccccaagcggtcccggagccttcccacgcgcgcgcggggccggggccgggcggacaggactgcggaggcgcccccctcgcgcgcgccggaggccgccgggaaagttttgggcgcgcggggccggccgcactcacctggcccaagttgaggtacccgtgcgccgccgccacgcggtccgcctcggccgggccgcccagcacttgcaccgcccagtggttggtgtagacggggcgcggcgggggcgcggagcaggcggcaggcagcgccagcagcagcagccagcgccagggacgcggcgcgagcggccggaacccgggcccgccggcgccccccgcgccccccgcgccccccgcgcccgcggcggtgtcggtggcggcggcggcccggggcggcggccggggcccgggcgcaggcggcgcgcgcggaggcatagcggcgacaggctcgcgcggcgcccgagctgcgagtgcgccggggggtggagtgccgccttttaaagccgctccgcgccggggaagcgccgccgccgccgccaccgccgccgccaacaccgccgcgggcgggagccggggaggaggaggcggccgcggcgcgttcccgcccccgggcccgcgctcctgcgaccgggctccggggccgagagccgtccgggaggcccgaaacgccccccaccgggggaacttccccgccgacttctggggctctcgggacgcggtgccgccccagaggcgtcctcggcccgcgagttctgctgggagcggggaggccccggcgtctcaggtgagtccccggttccctagaccggccggacacccgaaggccgcactcacctggcgggggcctcagacgcctggcggcctcgcccgcctccctagacggagggctcgcccgtgtgcggggtcccagggagaagaagctgcggggaagacagtgggtcgcccgggaccaagcctggctgaagggacacattgagcggggcaaaggcatgtggcgcatcagccgggctcacgagcgtgtacccgagaaaccaccgcacggagcccatggcggaggccgcggcccatgctgggaggcaggccgtgcaggtgaacccccaggccgcgcaggtgaacccccaggccgcgcaggtgaacccccaggccgtgcaggtgaacccccaggccgcgcaggtgaacccccaggccgtgcaggtgaacccccaggccgtccgcttagcctcgctgcgatcttgggcaaatgactgtggtggctgagggcaggcgccccacctgcaaaatgcggggaacagtggcatctaccccgtcgggctgatttgaggatgaggtcagcttttgctgtacaataagctgtccgtaaacgttcgtttttatgagcccagggcctgccgtgtggtaggtgttcactagacgatgtacactcttaaaagcacccactgagctgggaccagcagtagaaagtcagctgaatcatcctcacccctgcttcctggagcagcctggtatccagtggataatgatttgaagcaccctggagatggatggaaatgttcacaccataatcaaggaattatgaagggtaaggatcgctgctggatctcttctgtcatccctcccaggacccattggtcctactggcccacttccagaaagcaagccatcaacctgcttaatataggaagtaaaacaaaaaggtcgagaaggccttgaggtgggaaggaagctgcttctctgatggtcagttccaggagcggtctcttgttgagcgtgcaggattcacttggagtctgtggcttggcagctggaggtgagaggctggggcgagaggggatgggctgaggacaggatctgcatagatggtttccgaggtcctttccagcctcgctctcaggagccctttggttttgtaacccacgtgattcatcatttcttcaggtgtgagtcacccctaatggaggtgggagaacaggaggcgtggtgggaggccccatcccaacaggccacatccatgttcacaagggctcctgccaagggcccatcttggaacctggagatcaacgtcccacatggccttcgctttgctacactagatgtaacttcacctccctgcgttcccctggcaagtggggtcagctgcttgggccgtcactccaggcctgcccacactgcagaagacagccaccgtgtgtccctcctacagatggactggatgctcaccagcccctgccagtggagagacatgaggccctcatgcaaactggcagccctagaggagaaccggccatacttgttggacagaaacagtacccagaactctcagtctgcctctgcctgacatggccctggctgcctagccaactggcttgcagaagagggacattggcctgagtcaaggggacggggttggaggcattgcattgtcacctagcagcagtatgtctgggcagcatgtgttacctctcttccccttcccctgctggccggatgtccctcagattcatcctggatctggtgccgttcttcaaatatgtggcctgcttcaagataatgtaactgcacatcagctaaatgattataaagcagctggtgcctcccaagacggagcccccgcaacggcagtgattttgacaggcagagataagggtgtttccataataatgtggtagattaagggattcagcctgctgtactgaggggagactaaaatgcatctgaatttttatttggagagatctgaatgtattttacta

SEQ ID NO: 1242276 - DNA, 4001 bp, Homo sapiens
tacgctttggaattagacaacttgggatcaaatatgggaaactgccacaaactcgttgtgtgactgttggcaagttaacctctctatgcaacttcctaacctgtaaaattagcataatacttcctacttctcaaggctgttataaagattcaaaatctggtatatgtaatgaccttagcacacctctctctatatatacacagatacatacatatatatacacacatacacatacatacatatatatacacatacatatatgtatgtgtatatatatgtatgtatgtgtatatatatatatatatatagtaaatgctccgaaacaccattgctgaacctggggatacatggtttaaaacttgtaaacaaaagaatcctagggaaatcactattgccccatcagctaattagagtatatatattccttgaggtagggtccccaagttctctattttttttttttttgagacggagtcttgctctgtcgcccaggctggaatgcagtggtgcgatctcggctcactgcaacctccgcctccagagtagctgggattacaggcgcccgccaccacgcatggctaatttttgtatttttagtagagacggggtttcaccatcttggccaggctggtcttgaactcctgacctcgtgatccacccgcctccgcctcccaaagtgctgggattacaggcgtgggccaccgcgcccggcctgtattttgtattcttaaaaccacctagggcagtacaagacacaaggaactagacacttactggttttgagagtaagtggacaatgttggagcaggataggggagacctgtcattcgtgcagtgccaccgtgtaatcctatactttgtgtttacaggattttacagtgcacctggaacttttgtgtaccacacatcattaacacaaaattaacatggtggtatgagctgggaaggttagctatcgcttcattttgcgcgtaaaacagaggcttagccctgggaaatggaagtttaaagcctcctgctgctccaggttccaaccaccaccactcctacccccatgagcggccgctgctctcacccgcttcttctcctccacctcctgcacacacttcaccctccagcggtcaatctcctgctcgcgttccactgcccgcgcggcctctgcctcccgctcggcctcgcgttcccgggccctctcgcgaagccgcagccggcggcgccggaccctctccagcctcctccgcgcctcgcccacataggcagcctgggtcaacggctgtagccgctcggccagttccgcgcgcagcggcgcggtctgggagtacagcaggacccaggccgcgccgtcggcttcggcctcgcgcagggcctggctcaggccgcgcagccgccgcaccaggcgcagagcccggagcaatcgcgcgcgcacttcgccaaggctgggcccggcatgcgtgcgctggggcaccggacagcctgcccgccgcggggtcccgaacaccgcctccagccactgccggtcgcgcaggcgttggagggccgcatccccgagcacgtcggccggcggcggcggcgcctcaggccaccgcgggctccagggcggccccgggccgggaggcggtggccgcggccgctcgccggcgtcggtccccgggaagggccgacactggggcggcggaggaggcagcggcggtggtggcaccgggtagaaggcgccagcgccgcctccgccgcgggaggcctccgcggaggctcggggctgcagagccagcggaggctgaaggaagggggcggaggcccccggaaaagggccgggccgctgggggagaggcggcgggaaagccggggagggcagcggcggtggcggacagccgaaaggagcaggaggcggcggctgcgggggcggtgggcctgggcgaccctggccgaagaatggtggcagggccatgttcacgacggagatgctttgagaagtgacaggaatctgagtggctcctcatgagaaccttccgacggaagtgacgtcgttacgacgcgcgacccctgtagactcgtccctccggaaggctcagtgcataagtgggcagtcgttcaaccttctgtcgttcagttcataaataccgttcttattgagcatcctaggtgcagagctacccactccgcatacagtgagactgagagatacagagcttctcttcgtggaactatctgcctagtataacacactaatcaattaatcatggtgagtatcttcgagaagttggagaaggttatcctaagaaactgcggctgcagctgagatctggaagataaatagttaaatagaaaaagagagggaagcacagtgcagatgagaacatgtgcaaaggccctagtaaataggagtgtgaccaactacccattttcttagaaaaatgaattatttttacttttctcctttcaccccacctcctatttagctctttaggaatgcaattatagggtgggtgctgtggctcacgtctgtaatcccagcactttgggaggccgaggcaggcgagatcggcctgtagtcccagccattggggaggctgaggtgggaggatcacctgagccctgggaggtaaagactgcaatgagccacgataacgccactgcactccaccctgggcgacagaatgacacctgtcaaaaaaaaaaatccaattaacctttaccttctctccaccagacactctctacactgtaagcttatctaattatgtgttcgcttattagttccaaggaccgaagcttaaaccagggacctctggaactttcccataccaggggattgcctggggacaactgtcaatttacaacctagctccccgctaccccccaccccccctccgccttcgccccagcctccatggcgccaaccagatcactgatggatacataggagcaagtcccatagacccagcacctccttggtccctccccaccccttgcatgccatccaggtcaaccaagtcccgtgcaccccccactttttttgagacagagtccctctgtcacccaggctggagtgcaatgacgcactctccactcactgcaaccactgcatcccaggttccagttattcttggtgcctcagcctccctagtcagttgctgggattatagacccctgctgccacgcctggctaatttttgtgtttttagtagagagggggtttcacaatgctggctaggctggtcgtaaactccttacatcaggtgatccgtccaccttggcctcccaaagtgctggggttacaggtgtgagccaccacacctggccactttctttctttttttttttttatgagacagagtctccctgtgtcgcccaggctggagtgcagtggcgtgatcttggctcattgtaagctctgcctcctgggttcatgccattcttctgcctcagcctcccgagtagctgggattacaggtgcccaccaccatgcctggctaatttttttgtatttttagtggagatggggtttcaccatgttagccaggatggtctcgatctcctgacctcatgatccgcctgccttggatcatgttgggattacaggcgtgagccaccgtgcccgtggcagtcactttctttttaccattctcttacttgttatttgaatttgcaagctgcagggaactggacctgccttaggttacaggactatgtctagtgggaagcctgatagaatgccagttttggcctgtaatcccagcactttgggaggccgaggcgggtggattgcctgagctcaggagttcaaggccagcctgggcaatatggtgaattcctgtctctactaaaacacaaaaattagccaggtgtggtggtgcgtgcccgtaatcccagctactggggaggctgaggcaggagaattgctttaacccaggacgtggaggttgcagtgagccgagatcacaccactgaactccagtctgggagacagagcgagaccttgtctccaaaaaaaaaaaagaatg

SEQ ID NO: 1242277 - DNA, 4001 bp, Homo sapiens
gctgccccggcaaggcgggagactggcgtcaatcagaaccatccaaagcgggacaagagggcaccgaggccgggtgggggggaccccgcccggcccctgcgggaaagttgcttactggccgggcccgagtttcgcggcggccccagagtgcccggcgccccttaccttcttgccgctgccgtcgcgaagctccgactccaagaggccggcgccgcgggtccggggcaaggcggccgtcttctggccctgcgggaggcgcggcccgccggacgacagcggcggtgccgcggggctaggcgcgtcctcggccaccaggcgctcggaaatgtggatgctcggggcacagcccatgctggcggcggcgccgcggacacgctggcgggtagccgcgatccggtcagcaaacggcccacccggcgcctccgggccgccgcgggcgccgtgtcatcgccgcctgggcgggcggcggcgagcgcggatctcgcgtcaggaaacgcggccgccccttttatcgcggtgcgggcgctgcggcggcggcggctgcggtgggaagggggcgcttaggcgggtggcgtgccgaggccgcccctccgaacatgcccttcctgaggcaggagccgacggccgcctctcacatcgccgggctcgcctcggccgcgcttccggggaaatagggggaggagatttgcgctctccttacccaggagcggctgagtccacgccgcgcgagccacgctgccctcgccgagctgcggcacgacccccgggggaggcgagctcccggccgcgcccggccccgctcccgccgccgccgccgccgcctccccggctccagactccgcctagatgtggacacccacgccgctccgcccgctgggccgccgcctcgcggaaaagcccccccaggccgagtgccggtggggtacaaggctagccttagacgctcccgctggccggggtttaggcgcggggtccgagggaaacccctcggagcggccgggccacgtccgccagggtagggaggggagcagctcggctccagcggggcctggggccgcaccgtcgagaagcgcagaaacggctgcgcgcacccaggagttgctggcggtacggctccggctccggctccgtgatccgggccgggttttgccggcagcgtgccgcgccgagcccccagcggtgacctccagcgggtgctggcgtcaatgcaaagcagctggggcgcccgccacctcctccggacgccgcccgcaactgagcatgcgcggcgacgacaggcggggcgcccgactgggctacccagagaaggaaagagacttgcccagggacacacagccacctccgtcccgaggccaccagaagcccgaccgccaaattcgaattccggctccgtaacttagcggctacttgacctcggtggggtcaccaagtgtgagccctggagctgttacccagaaaagaggccggtggaaagacctcctttgggggtagtgaaagtcaaactggggcgccgcgcgccgggtcccgggtgggtggggcctgggcgtccgcgagaagccgcagcccacgtgcgctccctcgcaggccaaaacctggcgcgccacgcctcggattacacaggcgccggggcggccgcaaagctacagcaccgggcaggctgcaggcgcccgtcctcctctcattttaaccaaagtgctagtcgggcgtccgagaccccaaaggcagagccaggggaaggggcgtacgcattgcaggcctggggcccatgaggaccccggacacgcacacagccactagcttgctgtgtgaactgggccagtcacttaacttcttggtggctggggctcctcccccaccagctggagggcggtgtctctgggcgtccatcacgtatcctgtagcgggctgcctcggacccccgccagtcttcccgccctccctgggctcccggtttgcggagaccctggcgcggtgcagccggctccttcctgtcctctccgaccgtccacacctttcctagcgcggccctggagcgaccctgagaggcagccgctcccgccttggcccggctactgcaaagacccggaggcgtgctgcgggctggattccctgctgtcgcgctgggactgcagcacaggttcaggtgccgggtccccggagcctcgatctctggcccgagcagggtaacccgagagcacgttactggcgaaactgccccgaaccactggcacgtggctctattaccaagtttaagcccattaagcaatattaatatttatgcttctctgccttataaaagtactactggcttggtgaagatgtcttaaaaaacaaaggaaaagatttttaaacatcactctttattccgcctaaatcgtataatttttttctgcctttgctctgcaattttaagaggtcttttttccaggtagaatctggagctcttgtaaataaaggatacttcatggagaaaatgcttggaaccaacagagttcatggaagtttaaagcgcgacctctcctccccgccctgcagagaagtacggccttgacgactcccggcgctgaccttgccgcttctggggctccaagcagctctagtcctctcggccctcccctcctaggcaggacctcggcgtcccgcctcccttgttggtccttgggccatgcactaaatgaaggagttggggactagggctgggggatcagctggcctgaaaagccccgtgtgcaccgccccacaccttgctgactgcccggactgccttgtgctgtcctgagctggtcacttaccctctctgttcccggaaagctgtaactaatttccagttctgcaattttgggaccctagacttagagacctggggctatgaatgatgcagaagcagataggaaaaataggagtcatctgcctgcttctggagtctcagcccactttttcccatacacagaacctcagcctgggacactccaggaagtcacaggcttcctctcagctccaaccacctaacatcaattccaccccacccctcctcccctggctctaacctgcaccttgaggtccctgaacacttctgtaccctgtgacagtggactgaaaatgggtcacactgacagaagtaacccaaacctcactggcgtgtgccacccacaaagtcacccaagactcccaggcccctgcaaagaatcctatccctaccaggtgtctagagggctcatgaacaatcccagtactgctggaaggtaggctgcctccaccacaccagccatgttcagcctcactattccgtggcacaaagtggaacacgcttcaccagctgccccaatccattttgcccgggtatagggacccccagcccgaactgcttgacttccacaagactcagacttgtagctgaatgtctgcttcaattcttactccaggacttgagcatgaggtcaatggggctgggaaaggagataaaccaaaggacctaggcccagcctccctcctacccctgtgactggcacagatttgtgggttataggtcagtccattcccaggagactccttagccctcatggcccccctcacctgttcattaaaggcatgcagatgccgggtccctcacagctttgcctgtctaaaatccaaacctattctgcttccacacctcttctactaaacctgagcctctgtacagccagttctccctcctggcttgatctccgtctccacccaggggtcagccattcaaagactgtgccacctgcacccagttctttgtcttcctttccttgccttcccccattgaaccatgctggaggcagccacaagtgagagagctccacaccctgaggtctgaatcccagctctgccatctattagaccttgagctcctgacttcatctctcccagccactgtcctccactgtaaatctaggactactatctacctcagagagtaaatgggctcactgatgtcaaatgcctagaacaacaactaggcccctgtgccttag

SEQ ID NO: 1242278 - DNA, 4001 bp, Homo sapiens
ccaatacagaagaatggttgaagtaagtacttaaaaactcagggacctaacggcactgcgatagcacaagagcaagctgctgctgcactggggaggcttacaagacacctaggtgaattttaggacacccaatccaccacaaaaaaagcctgtaagacacaaaggcccctcactataaaagggctactttggtaatctgaaattatcacattagtctgcaaaatgttagatttggactgaaaacttgaaagctgttaaagtttccatatgcacctgtgtaacacttttttaaagccaagtaggcttaacacacagcttaacactgatattaagagcaccttgagttagtaagcctaaaccatcagaggtttctttaaagaatctataggagaaggaattcaatttctgataatcagaacaaagttgaattttcacttagggtatgggaatggtggggaaatcaactgttatgcaacactgaaaaagactttcccctttcgtacagaaaaagtatcatgacgactgctagaaatgtaagacagaaagtacatcaaactatatccctcaaacttcggaggttcagcagttctcagcaagcaaggaaaaatcaaacaaattttgcaaattactctttcaaaaactggtcgtgatgagagggatgacagccaacaatctgcagccatgcacgaattttgttgttgttgtcttttactggtttaacaaaacataaaccaacgcatgagttccagctttaaattctgaaatgagagaactggaaagctgctgctgtgtgccttaatgatcacgtttttctttttcctttttaactttcctttagaaaacctcaacaaagactaagcccagaaactttgacaaaacataagccaaggcaacatgcgctggagaagacacgcaatgtaaaaaaacaaaaaaccccagtcacaaaatgtcccagtaagtcggcttaataaaagattaactttgttctgctgaatgcttcaaaaatcgcgtttcacagtattttctaattacatatgctttaaatacagtatgtatgctaataaacgtggacctcaaatacatgtgcaatgaagcaaagctgatgttccagattacattctagcagtcccgaagaaaatggtaacctgcaactgcatgtgcaaagctgacagagggaaaagagtggtgaggccagtcgcccttccctttctaccacaggaaaagaacaaagttcacactgatttaacattgcaggggcgcgccagaatatcctgggggtttccctcaaacacccgctcttggagaggaaattgatgcaagcgcctcagtcaacttcacatcgggccccgccgctccgggagtcggatgtgtccaaaaaaccgacgccgcgacacaggcggcgtcctaatcgcaaccctaggaaatcagggtcgcgggacctgggtcggtccttctctgaacgctgccccggcaaggcgggagactggcgtcaatcagaaccatccaaagcgggacaagagggcaccgaggccgggtgggggggaccccgcccggcccctgcgggaaagttgcttactggccgggcccgagtttcgcggcggccccagagtgcccggcgccccttaccttcttgccgctgccgtcgcgaagctccgactccaagaggccggcgccgcgggtccggggcaaggcggccgtcttctggccctgcgggaggcgcggcccgccggacgacagcggcggtgccgcggggctaggcgcgtcctcggccaccaggcgctcggaaatgtggatgctcggggcacagcccatgctggcggcggcgccgcggacacgctggcgggtagccgcgatccggtcagcaaacggcccacccggcgcctccgggccgccgcgggcgccgtgtcatcgccgcctgggcgggcggcggcgagcgcggatctcgcgtcaggaaacgcggccgccccttttatcgcggtgcgggcgctgcggcggcggcggctgcggtgggaagggggcgcttaggcgggtggcgtgccgaggccgcccctccgaacatgcccttcctgaggcaggagccgacggccgcctctcacatcgccgggctcgcctcggccgcgcttccggggaaatagggggaggagatttgcgctctccttacccaggagcggctgagtccacgccgcgcgagccacgctgccctcgccgagctgcggcacgacccccgggggaggcgagctcccggccgcgcccggccccgctcccgccgccgccgccgccgcctccccggctccagactccgcctagatgtggacacccacgccgctccgcccgctgggccgccgcctcgcggaaaagcccccccaggccgagtgccggtggggtacaaggctagccttagacgctcccgctggccggggtttaggcgcggggtccgagggaaacccctcggagcggccgggccacgtccgccagggtagggaggggagcagctcggctccagcggggcctggggccgcaccgtcgagaagcgcagaaacggctgcgcgcacccaggagttgctggcggtacggctccggctccggctccgtgatccgggccgggttttgccggcagcgtgccgcgccgagcccccagcggtgacctccagcgggtgctggcgtcaatgcaaagcagctggggcgcccgccacctcctccggacgccgcccgcaactgagcatgcgcggcgacgacaggcggggcgcccgactgggctacccagagaaggaaagagacttgcccagggacacacagccacctccgtcccgaggccaccagaagcccgaccgccaaattcgaattccggctccgtaacttagcggctacttgacctcggtggggtcaccaagtgtgagccctggagctgttacccagaaaagaggccggtggaaagacctcctttgggggtagtgaaagtcaaactggggcgccgcgcgccgggtcccgggtgggtggggcctgggcgtccgcgagaagccgcagcccacgtgcgctccctcgcaggccaaaacctggcgcgccacgcctcggattacacaggcgccggggcggccgcaaagctacagcaccgggcaggctgcaggcgcccgtcctcctctcattttaaccaaagtgctagtcgggcgtccgagaccccaaaggcagagccaggggaaggggcgtacgcattgcaggcctggggcccatgaggaccccggacacgcacacagccactagcttgctgtgtgaactgggccagtcacttaacttcttggtggctggggctcctcccccaccagctggagggcggtgtctctgggcgtccatcacgtatcctgtagcgggctgcctcggacccccgccagtcttcccgccctccctgggctcccggtttgcggagaccctggcgcggtgcagccggctccttcctgtcctctccgaccgtccacacctttcctagcgcggccctggagcgaccctgagaggcagccgctcccgccttggcccggctactgcaaagacccggaggcgtgctgcgggctggattccctgctgtcgcgctgggactgcagcacaggttcaggtgccgggtccccggagcctcgatctctggcccgagcagggtaacccgagagcacgttactggcgaaactgccccgaaccactggcacgtggctctattaccaagtttaagcccattaagcaatattaatatttatgcttctctgccttataaaagtactactggcttggtgaagatgtcttaaaaaacaaaggaaaagatttttaaacatcactctttattccgcctaaatcgtataatttttttctgcctttgctctgcaattttaagaggtcttttttccaggtagaatctggagctcttgtaaataaaggatacttcatggagaaaatgcttggaaccaacagagttcatggaagtttaaagcgcgacctctcctccccgccctgcagagaag

SEQ ID NO: 1242279 - DNA, 4001 bp, Homo sapiens
tattctcctgcctcagcttcctgagtagctgggattacaggcatgtgccactatgcccggctaatttcgtatttttagtagagacgggggtttctccatgatggtcagactggtcttgaactcccgacctcaggtgatccgcctgcctcggcctcccaaagtgctgggattacaggcgggagccaccatgcccagccccaaaattccttttttaaactaatattctagtggcccactattctccaacaattcctactttaaattgttgcatgacccctgtagtaaaaagcatcactcagatctgacaaacttagtgacacccccagtttttacaaattattgacaccccctcaaagctaacagcatgattatataattgggaagagttgttcctaagagagaacatgagttccagagatgtataagaactatctatatgtgtaatctgtactgccagttagccccagaaatgccctggacacaaaatctgtccaagctgcaaacaaaatttgccatctctagcacatcattctgattcaggtggtctttactacaggacttttttcgtgtaacccttagcaagttgtttgaggctaagaagggaagacctgagtctgaagcaaataaaagttatacacaacttttactgacatttttgaacacggatagtattaaaccaagggtcactgtgccaggaggggaaaaattaagtactgtaattatatatattgaattatatatagagagctatccccaggataaaggaatcactgtttactctggtaatgatctggaggtttaaaaacacacacacacacaaataaaaaaaaaaaacaaacactcaagttgactgggccagaaatcttatttgctcttccttctccccaacagttttttatttcgagttagttctatctaaggaatttacacccttgatcacttaagtcaccctaaagtggagtatgtaatcaatattggttattttctcattggagtcttttttgacattttaaagaaatgctatttaaaacagacaatatggacagattctgatggaattattcttgttcacgtactcctttcgtttggacagaggtatctgccggtactgagatgtaagtgatcagctgaagggagaaactgtacaccatgtgacggacaaattacctgcctcaagaaagcacttacgaccattctgcagccactcagtgaccttggctagaaaccaatggctgtgcggcgtgaggtaagatgaaaggaaataccctagggatccaggacttctgcatttggtgaaacgtccgcttccactacaaggctttgggatgcctagtctgtagactggaggagcattaatactgactcacgcagaaaagatatagctacatattggactgggggaaggggtggcaaaaccctctgcaaataggaagtgccacaagagcaccgagataaggatgaggccctgcgtgagcgcagccttcgggttttccttgggccgatcagcaccgactcccccgctctcggcgaggcgcctccagctcccgggaatgagaaatgtgcccgccgcagcaggggcccacaggaatgaagggccccggcgctgcgtaggcccaacagttccccgcgctctcgcccccggcccagccccgcctttcttcccccgcctcggcagaatggactcaccagggggcgaagaactcgacgagcatgaggcccgcagagcccgtgtcggagatgcgactctcgaagttgtcgtccgtgagttctagcacgtcggaggcagcggcgaggcgggccgcggcaagaagcagcgccacacccgggaacagcgctaggcggcggaggcgcatggcggcgaggtggggtggggacggccggaagggtcgcggctcggctgggactgcggaggtcgggcgcgcgaccactaacccgctgcttgcgctcgcgcgtctggcccaggcggacctgcagccggaggtcccaacccccaaacccggcttgggccgctgtgtggcagccgctgattggctgcgcgtcgccttcgtcgggcgggcgggaccaactcgttaccgccgagtggccggagcgcggggcggggccgaggcggcgagtgtctgggcgagcgtggctgggcccggtcctgggctgggggcaggggctagggccgggtcccggggtgagccgaaacctgggggtcgggcggggcgggaaatggggcgcagtgaggctgggagccggccctgagctcgtcctgcgtaggggtagccgggctcagggggcgcctgagctggaggtggaagcgtgaagtcaggactgagtgggcgaagagaacctgggctgaggtgaggcccagaagcgagaatggaggagagaaggagctagcccccgaaggagtgttggagtggacacacttgggacgggacccattttcaaaatgtcaggctttggcattttgtccaatttctcttcacttggtttctcttgcgtgggcaggccaagccctcccccaactccacctcattgcccgattctctcaggcccaggtgggacccaggttcttctttgtccagccccgggcccctgcccttgtggctgctccttttttattgagtttcttgttttgttttgttttgttttgtctgagatgccgtcttgctctgtcccccacgctggagtgcagtggcgcgatctccgctcactgcaagctctgcctcccgggttcacgccattctcctgcctcagcttcccgagtagctgggcctacaggcgcccgccaccacgcccggctaattttttgtatttttagtagagaccgggtttcaccgtgttagccaggatggtctctatctcctgacctcgtgatccgctcgcctcggcattccaaagtgctggaattacaggcgtgagccaccacgcccggactttttttttttttttttttttttttaatgagcttttaattggtagtgccgtcacaaagtgaagatgcctggccacttggtcgactgctcaatgtctttaccactcttagccccttttgtttcaaaaaaccctgagtcttagtagaatgtttgttctgcccaactgctcctagttcgtagatgtgggtacattaaggaatcttaagggcaaagagggtggggaggaggggacagaaaacctgtaatccttggtgcagctccaagaatgaaatgacacttgatgcttacattttcttagcagacatggccgcttaccaacaagaagggcagatgcagcttccccgagctgatgccattcgttcacgtctcatcgatactttctctctcatcgagcatttgcaaggcttgagccaagctgtgctgcgacacactatcaggagttacttggtcagcagcctatttcttcactaatttaaatttaagactcctatccacatcctctacatttaagagtggaaaattctggggaggccggtttagttgctggtttaccaaacttgataaatcaagggcttgtaaataaaactaaggagatagaatccacgtctttcacttttaggcctaggatagccactagccgtggatgatacggaacagtttctgtcaaagactcttaaaactttgagagtgaacctgctgcttttgtgggcatggacagtgttggtcataagcaatacatttgctctcactccaaacagaattcttagttgctgtgagaagagaaggaccagcagtaagccattagggggacccattatctgaacagtatccctgcccccaaccctacctggtctattttgtttgtatttatccactaccccttttcaatttttgttgtagatccttcccgccagaagaaacttatgttgggagatcaacaccagctagtgggcgtctctataaagcctcaacgtatagaacagatttcacatgcccagaggctgttgagcaggcttcatgtgcgctgcagtcagaggccacctctttctttgtgggccggatgggtccttgagtgta

SEQ ID NO: 1242280 - DNA, 4001 bp, Homo sapiens
taataggctacaaacattattgtgaaagtttctgtatactatcaactggataaaacgaatagttgaggtatcataatagttcaaagtgatcttatctttttctttcaccaaaacacttctcttccaaccctagaacacagccacacataaattttagcctctaagttgggacaggagatggggggtagtgagggaaaagaaggaacatacattaaaaagccttaaagaaaataatttgacattttttcccacataatgtagtcatgttagagaatccaaaataaagacatgataaaatatttccctttcccccccgacagcaatgaaaaggggatgtttgttttttcacatagtttgtgagttggtcatatccaaaattcactagcaatgctatgacttctacttccattgttcatctctgggctgaggctataaccctcaactttgaagccaagaaaatgtaccatatctgccattacagtttactaaataagtcaccaaagagaagtcccaggcaagtcagaaagtaattagggtcgtcagtgaattgagctatctagaaatgctctgagattacgagagaagccatcatgaagtgagtatccaagattgctcatggaaagttttaccccggtggataattcacgtttttcacttccacactgcagagagcaatatgggttctctgactatacacatcactacatcacttcatttatcgggggaaaaaaaaagacgctgtggctgaacaaaaatcagtaagtaggccccaaaacagaatcctcaaggcaatcccaattcaggtgaaaagctgttcacgtacatcatccaatgacctaaaaatagtcttttatgtaagtctctaagtatttaattcaacgtatgatcttaccacattcaacagaggcagaaaaaaaatcaattaggttttctatagcaaggccaataaagatgaaatcatagttttcctctaactcatcactaccccctcaacgtcagccttccaataactccattccacagctctcaaattcctgaacttggatctttaaaaaacaacgaatcgcaaaaagtaacatttaacaggccagaggcaggcgggggaggagggtctctcccggtgctctcagcaatctttaacgtagccaaaggaggaaaaaacgaaatcaagctcccagacggatggtgcatgcgacgagaggggagggggcagacgcggttcagacggcaagtccccatcgaaggaggaaagaaaagttgcaagaacggatgggtcaaagggcagaaaagaaaaaaactgagcagccgaaccactcacaacccccaaacgaccccgccagcccacacgttcgcgggctccccagccgcggcgcgaagggagcaggcagggagccacccggctccgtcccgacgctgccggcgaggctgcgccgatgctcccgggtgcgggagcgggctgaccgtgtggacccggcaggagccagagaagcccctcctgccccggcctccccgcgtccagctcctccaggcttcactttcccccgcaacctcccagccgcgcccgggggcgtccctcgcggcaggtcccaactttccttcctctggggggcgtcgcgctcccggggccgccgccgagggagggggcaggggcggcagggggcgcgcggcaccggcggggcgcgggggtggccggggagctagagcccgcgccgggcgggacgcaccggccgccagagccccggcggcggcgccacccagaacccgcgccgccacccagaacccgcgccgccccgcccggattcccccgggtcagcgccctcaacccgcggcaaccctggtcccacagacggcgcgtgagtagaagacaaccgagcggacgcggacagccgggccgctgttacctgaggggcgcacacgccgccgcggcgaccaccatcaccgtccgtcccgtccccttcctggtgaccacggccgccgccgccgagcaactgacactgactaacaacaactaactaactactcgccgcggccgagtccaccgcgcgctcccggccgctcgccgcccgcccagcccaccagcctgcccgcctcctctcggccccgcgcgccgcccctccgcgcgcgccctcgcccgctcgccgcgctcctggagccgtgagcacgcgcgcgctcacgggccccggtcgtctcccaggtctccctcagccccagcgggaggagtcaccgccaggcccctcctctctgccttccaacctccagaggacgagacctaaagggtgcctgattggctgcggagggcggggctaagacaaggggcggggctgccgagaccttgggcccgcgtgagggaaaatttgggttcgattaagccgcagaggaaaagaccaggggagtctgggcccatttgggcgtcggggcccgctaggtcagccgtcatcgaatacagaatatgttttcgaggacgctaatatgtagtcatgaccaatttcagttcttctactttctgcgggccttcgcaataaaaaaaaaaaaactacatctcccagaaacctccacgaaaataaggctcaccttgcgtaaccacgtagtccttcgccgcattggggcaaaataatcccttcatttttgtgaaggtaccgtggaaaatatttcatttttcttctcaccggagcaattgtaaatgctatgcggtaagaggagttacctgtggaaaggtggttaagagattaggtaaagaaaaggaaaggacaccaaaataaagtgctgcggaagaatttttgtccagctgtgagacgacgagtgcgtgaagtgaaggcgattgagaggggctgagggaattgtcctctgtggaagggactttcttttggccctaggccccttcctgcccctgtcgtcagcaggtcagtaagcaaggcgagcttgggggtggccccagtcgagatgcccttcaccccttgaagatcacccctcttttggtggtggtggtactggtttgtctcagttggaggccggctgaatgggggcgcctcaacttccggttgggggaggggaggaaggccgtcctggggaggggggacaccctcacttcctgtgggggggtggtgatggtttgggggtgtccgacccacttccagtgctgatgagggcttgaaaaggtggtgcttggtgccattcgcggagacattatcttgcagcttggggattgtgttttatgtgaaaagttagattattccaagttgtgctgaacaccaacctgcagtcagaatttatgagtttgcttccacgtggaatatggagcatttcctccccagcaaaattgtctgtgttttcttcaaagaattcgaaagcccttgttaaaaatctctatgcacctttgcaagacgacatagcttgtgtgactgatgaattgccaacacctgcacccctactcaagtccagccttggctgggtgaagtgtggtgccctctgccttgacatgcaacaggaaatctagcttctcttttaaggagataactttttatttaggggactgaatattttacataaaatctggggcattttcatcttagcagaatgaaagtatcacactgaagtactcaaatttgaggttaccttaactgataaaattgacatcttaaattattaggactgttgattttgggctacaggttttgccctgtgcctgagaacagcttcttcagccttaaaaattcttatgtgtagcttacacgtaacatttttgaaagttgtattttattacattttcctcctttgtaatttaattcatcactgatttttaaatggtatctgttctttgtggttttaaagtataaagcaagggtcatgagactcagctcagattctaaacaggaaaaagttggctcacaaaggacaaaaggtcaataagaactttctggttttcagtagctcatttttaataaactatatgtgaggcggtaataaacactcaataattttgattccttggttctgttgtcaga

SEQ ID NO: 1242281 - DNA, 4001 bp, Homo sapiens
ggctcactgcaagctttgcctcctgggctcatgccattctcctgcctcagcctcctgagtagctgggactgcaggcgcccaccacaacgcccagctaatttttgtatttttagtagagacagggtttcaccatgttagccaggatggtctcgatctcctgactttgtgatccgcccacctcagcctcccaaagtgctgggattacaggtgtaagccactgcacccggcctaaatgattatttttttaaccaacttccttgataaaccctgcagggtacattctaggtacactggaattacaggtttctatttaatgaaatttctatttaatgaagcttgtatataaagtaaccatttaaaaaacctatcaaactaatgagaaagccagtatagcttggtagttaagtgggcactggagtcatttgcgtggatgtgaatccctcagttctgccattgtagtacctattaacctctttctgcttcagtttctccatctgaagtgggtaaaatatttagagtatctacctcatagggttgtgatgagggttatataagttcatagttgcaaaacactgggaacaatagctgtcataaagatggcttccaaaagcctcattattggggccattctaattgatctgtttgtatcagcacttgcacacccagaagagaatgcagagctgttaaataaaactgcaactgtaaatattttttcattaagcaagaatcaaccaaatctctaaaacatcatgaactagtactgtattcgtattaaagatacaatctctcagttcttttcgtttcttatggaaccaaaagaaaaagagacacaatctctgtttaatattttcagtagcacagcatgaaccttagaggtgcagttagttctttctgagcttctccccactgtatttccccccaatccagttggtgtggtctcatccccgctatattttgttttacaatttacaaaactattccacatgcagtatctcaatgatacagcctgggtaataatggaagagaacttctgtctctcctcaaacatttcaagaggtatttgagaccgggcgcggtggctcgcacctgtaatcccagcactttgggaagccgaggtggacagatcacctgaggtcaggagttcgagaccagcctggccaacatggcgaaacccccgtctctactaaaaatacaaaaagtagccgggcgtggtagtgcacgcctgtaatcccagctactcaggaggctgaggcaggagaatcgcttgaacccgggaggcagaggttgcagtgggccgagaccgcgccactgcctgggcgacagagcgagactccgtctcaaaagaaaaaaaaaagagagatatttgaagtcacaccaagtggtttgcttccctagccacaaatactaatccaaagtttctctttaaaggagatccctcggaagaatgttgagtggagagaaccaatctttctgtgcccggagagcaaagttaggaggggaggaggatctgtcagccggtgtcccgtcgtcggcggtctcgaggcggctagggtgccaggcactggggctttcgtgcacggggctaggacgggacgcgggtgcgttgggcccactcacgttgaatttagggtaaggaggggctcggatactaaactccctccgtaggagctggcaacgtccttcctgcttccatctactaggctatcacctcctttttcccgggtgcaggggaataggcacgggagccgagttagggcgagaaaggggcggaggccgctggcacctgactcacctgaagagtcggtcccggccctgggtctggttggtgaagcgggtgaaggcgtccatggcttctagcccaaaggccacgagtcgcacggggctcaggcgtgggtcctctggggcccgtcggatccccagggaacggtcagtcccaggttatccgctgagggggaggggctgagtctctccgccccagagggggcgggcacactttctgtagagcaacttcgcggacttccggttcaagccggaagttgtggttaccaaggcgacgcaacgccgcccggccaggtgagcaaaactgatcttacctttggatgccggggctcccctcgagtcccaggactcccctttacctgtagagtctcctagaggaaagtctgagggggtccgtctccccagactcgggcgtttccggatgcctgacgcctccccgcagatctcaggttctcaggaacccggggtgatatcccgaatggtctctccagcctcagaactcccctgagctcttgcttgggacggtggggcctaatcatttcccagcgccgtgcctctttcccttgagctacaccagctctatgtctggtgaaggaagtggttaggtcagagataagccaatttcacagtgtgaacctagcatgggaggcggatgaagtgagaaaatgttctgcttggattattgaacattgaaagaagattgttacctgaggaaatcctaaaagagtcattatgagcaaagtgaagcaaaaatagattgcaatgaaattgcaccgctgaacattcgttctgtgcggcttgaagaaaaggagccttacccactccgtggcagtaattttataaaatgtaccctctataaccacaaaataaggtcggccggtgctgtggcttacgcctgtaatcccaacactttgggagccgaggtgggcggatcacctgcgatcaggagttggagaccagcctggccaacagggtgaaaccccgtctctactaaaaatacaaaaaaagtagccgggcgtggtggtgggcgcctgtaatcccagctactcgggaggctgaggcaggagaatcgctggaacccaggaggcggaggtggcagtgagccgagattgtgccactgctttccagcctgggcgacagagcgagacgctgtctcaaaaaaataaaataaaataaaataaggtgaacattttcgtaatctttattcccttggtcaggccagctcctaacatttgcaggccctgggtaagagtacaaatggagtccagcacaccgtatgtttaaatattttagttataaatcaagcaacaaattgtaaagtaaaatatagtctgttttcctacattgacaaatagaccctcataatgatgtagaaggccaggttcatcttcagaatccctagactccttagaatacctggaaacacagctggaatatggcagtgtggggagaaatggctcccagtcttttcccacttccctttcttttctggtttctggtgcccacctgcattccctgccaggagccttgtataccatcctgatactccaagccacatccaacgtctgcccgtacctctgcaagcagccatgcctttgccaccttttcagatcgaggagtgctcacattagcagctgggtctgccctcaggtgaaagctgagaagggctcatgcaggccatggtgtcatttgggcagtaaattccaggggtattggtaccctgaacatggtctagactccagaagagggaaactaggctttgggtgagcatatctccttggccccatgggttactcattttttgtagaggaaagagcctcgaagagagccagaagttttctctaaatacgtggcccaggtcagggcaattctgcaagcaatgagaatttattgagtcctggccatataccaaccactgtgctaaactctagtcgtagggtaataggttaacaaggaacacagtaaactgataagtacaacacagagatatgttagatgatagaggtgagcacagggtgcttctaaacacagatgtgtatcatctgttttttgtttttgtttttgagacagagttttgctcttattgcccaggctggagtgcaatggcgcaatgtcagctcactgcacccttcgtctcccgggttcaagcgattctcctgcttcagcctcctgagctgggattacaggcatgcgccaccacgcatggctgattttttatattt

SEQ ID NO: 1242282 - DNA, 4001 bp, Homo sapiens
gacatcatcggagcaaggacgacctcgaagatgttgctgccctggcttgtgatgcttttccagcattctttcaatcaatgccagtctgaagtttatatggctcatcgtgtgctcaggattatccttcttgaacaggatgtaggagttcagcactgtaatgtgtagaagatggtgaaagaatttcttataccaaaccttgtgtcttttgcgctcagatggataagaagtaagcatttgatcagccgagtccactgctcccatattctcgttataatccacaatgacacgtggccttttagttttctttccatttctattgtttacttcaatcacagtatcattgtggaatgttgacaacattgtcacctccttgccgtcacaccatttcagtgccataagttcaccacagaatctggctacagtcgtcccctttgcaatcctttttttcagatcatttggaatctgttttctgttcaaacgagctgtcccaactgcatcagtcctattttgatgtaattctctgaaaagcatgggagatatattaaagttatcgaggaagacacaatacccttggccaagaaggtcattgaccaaggtaagaacaatgcgtgatgatttcaggccatccgctgaatctttcaaattcatgccaggccctgtgtgaacaagcgcattccacacataaccagactgactttcacaaagtacatatagcttcagaccaaatcgtactcgttttgtcgggaggtactgcttcatagctaatggccccttgaacagcatcagtgattcatcaactgcaatgtttctgtttggagtatatacagtggaaaatttatttacaagaaagtcgaacacaggtttgatcttctgcaatgaaatctgggcctttgattgaccagcagatatagaagaattgttgacaaaatgcaggcaccgaaacaaaagtaaaaatctttcaccagtcataatttgcctgagataaggtgtatccaaaagaggccttgttgaccaaaacatctccagctcaggtttctgcacaataccttgcagtaacattactgcaaaaaagactttgagctcgtcattgtcagtgtctttccatttatccattcgcgaaaatcctttcggacccggtggctttgaagccaacaaggcagcttgggcatttgtttctctagtaatttttgaaactaattcctcagtaaagaacagttcaaaatactgcaatgggtcagtgatatcactgacatcgacttttctgccaggtgtgccggtaaagtcatacctttgacgtggaatcatagcacgagctgaccatttcatggagcgccctgagtcacttgatgtagagctctttccatcagattctaaatgggacagaggcctgatcttatcggcttctaaagcactatccgaaaaattatcagaatcatctatttccgaaaaatcagattcatcaaatgaatcttcagccaacaactgttcgagaccggtattactatcacgcataggaatgctacgttttctaggatttgacatttcagcgatcgagaattactatattttgtagatggaaatcccactactaaaaacagaatgctataaacagaatgatgtcttttgtttcaaaagtcaatataccagaaccatgcgaaaataacagaagcgagatatttcgtggcaaactttgggagtaaggttggcactgtaatccacgagttatctcggcgtaaacgctgcagtcgcaggcacagcagcgcgtaatctcggggctaaggagaaatgagttaaacgcacacagacagaagaagcctttcatctcatacgtcttggggagtctctagaagttttttgaaaggtctcttctggatggtgtttctcccgaagccagtctcgtcatcttttactcccgtgaggtccttggcctccgtggctgccgcagcaacacacacttgactttcacttcatgggcagtccccttcataggcacttgacacaggctctgtgcgccgtcttccaatccagagtgccgggagttaagggcagtacttccgccttacttccgcctcgctagtcgatcggccatgatctcttccctctggttggatcccacagcttatgacagaaacgggcgcgcagtgatgacaacatcaagccgccagcggcggcggtggcggccgggagactgggagggcttccggggctgccggtctgagtgcagagctgctgtcatggcggccgctctgtggggcttctttcccgtcctgctgctgctgctgctatcgggggatgtccagagctcggaggtgcccggggctgctgctgagggatcgggagggagtggggtcggcataggagatcgcttcaagattgaggggcgtgcagttgttccaggggtgaagcctcaggactggatctcggcggcccgagtgctggtagacggagaagagcacgtcggtttccttaagtgagcatcctgagggcagcgggaaaaaggctgggatggaggccggacagggaccccaccaggagagttaagtgtcaggacgggacaacgtcgctgtctcagactgaaggggagggtgccgctaacggtctatgccgggagaccttgggaggcagtcggatgctttccctttcctggtcctgtacctctggaatgagcatggcaggcgctcaccccctgccatggtcagagcatggagtcagttatttccaaccttattttggccccatgtggggacgatcattcctgggccctggggacaggtggacccttattagtctcttgttggattcttttatatctcatctggtttccctagaacctagtcgttttttgcattcacttcagtcttttggtagcttgttattatgtagaaagatgcgacacaagtgggaattctcaaaacccaaagggcttctagtgacgacatagactgggaggctaatgttactgcttctaaaattaataggctctgaaatccctaatcaaagcactttttttttctttttttttttgcttgggggtgggatcgttgttcttttttacagttgaattcatcgagagatttgctatatcacacttgtcatttatgtgagactagggttcctctacattgctttcttgcttctgtcctttcatgctattagtggaagtgggttttctgtctatattaaaagacaggatgaatttgttagcactagttttgcagcagcctgcttttgaaatgtctaggcacgcgtatgttgttttaaatctttccacccttacttggaggtgaaactgtaaactgaaagcaaataattaggaagtatttcctttggtgggttcgtacaccagcaaatggtatctgaaaatcagacaacttaaatgtagacatttaaatccaaatctgatttacatatttgttcagatcatctaagtgcccttgagtggttattcaacctcagattaataaatagtgacaaatttacaaccagtattttactgctgtctgtcattaagaatctggcattagggcattcgttagagtttaccctaattaatgatgttttaatgataaagttctcattaagctttaggaataagccttaattgaccatttggccactcttctgtatacagttcttttaaaaagcatttaatttctgtttaaaaatagtatattagaaacaaagtaggaaaacaacccttaatgtttcattgtatctttctttttatttttttgagacaaggtctttttctgttactcagcctggagtgcagtggcgagatcatagttcatggcagcttcgaacttctgtactcaagtgatcctcctgtctcagcctcctcagtagataggactacaggcggacaccatcatgtccagctaattttttaattttttgtagagacagggtcttgctatgttgcccagtgtggtctcaaactcctggcctcaagtgatatttctgcctcagcctgtcacatttttgggattataggcgtgagc

SEQ ID NO: 1242283 - DNA, 4001 bp, Homo sapiens
agctctaagcatttctaacacaggaaggccacgctctggaatccagcgggcattcccaaatcatggctgattatcaggtatttcatcaaacaatttccagtttgccagcaaaccacaggctgacaagacaaaggcaggggtcagtgtgattctaagatggtgcttcaatgttcatatttcattcatgacaagcattgcatgcattagagtacagtttccttaggaattcaagagtaatttgaaccattcaatctccagaaccaaaataacacaaataagagcaagggagataaaaggtttcccaaagaactttttctctgaaggtcgataggagttagaattatagtctgaaaagattaagcgacacaactttcaatttcccattcatccaggaaaccctgcctcttcatccaacacaattcagaaaacttaaaaccggccaaatgtgtctaactaaaaatgaaggctggacatgatggctcatgcctgtaatccctgcattttgggaggccaaggcgggaggatcacttcagcccgggagttagagaccagtctggggaatacaggaaaaccctgtttctactaaaaactaaaataaaataaattggggggtgtggtggtgagtgcctgttgtcccagctactccagaggctgaggtgggaggattacttgagcccaggagtttgaggctgcagtgagttatgactgagccactgcactccagtctggacaacagagggagactgtctcagaaaaattaaaaatataaaaataaaaatagggccaggcgcagtggctcatgcctgtagtcccagcactttgggaggcctaggcgggcagatcacaaggtcaagagatcgaaaccatcctggccaacatggtgaaaccccatctctactaaaaatacaaaaattagctgggcgtggtggtgcgtacctgtagtcccagctactcgggaggctgaggcaggagaatcgcttgaacccaggaggcggaggctgcagtgagctgagcttacgccactgcactctagcctagcgacagaacaagactctgtctcaaaaaaaaattaataaaaataaagacctttgtgaagatcaggcccccagggaccagctgggatgctgacttggtgaggcaagtgtgggtgggggtgactctggatgtgctggtgtttgcaggagtgagcagccaccattccttccaagttgaccttctggggctcagggtctccagctagtggctctcggggggtgcttcacagctccctgaaaaatggaagttcttactctggaagtggggactgtgtgttcctttgcgggtggctgttgtagatgggtttgcaagccttgtgagggccctgtggtttctgggcgtatagatccctcttccttgctatgagcctgcacccccaagggatacctcacgtgcctcgggccccactcagggaaaacaggtaccagcctcagcttcctccctgctgggttgaaaggcaaggtctgagcctaagccaccagtggcaccttcgtgcccgccactcgagagttacttgaagcgaatgagccacagaagcagaaatgcctgtgatcctgattgtttattaatagggcacagcagcaagttcgtttccatctggaattattagcaccaccagttgccattctttttttccctcagggaactatttaagacccaggatcaggccagtgcgcattccaggggcaggctaaaagcagcaacaaataggagagaaaaaaattatgtagtcttaccagtcaccaccacgcagctgggctgggaatccatgaagacgaagtgggagctcgcgctgcgcctccctggctcaggcagcggcccagcggccgggctctgcgcgctctgagctccgggcaccttctctgcctggccgcgtgctcgccggggaccggggtggagcgggagcccaacccctcctggccgcccggcgtccgtagcgttctgggccccgaaaggccaaggatctaggggagggtgataaagcaatgccccttgaaagcagaacgatccagctcaggacagcgggttggagcgccagcagggactttctggacatttgagtctgggtcactttgttgttcaggatggttcaaaggtgagctaagggtttggctaccagctgtcccggtttgcctgggacagaaggatgtctgggacggaacaccacatggtgctcaaagaggtactgtcctaggaactgtgggctaccctacaagtcgtttacttagatcttattttttcctctttagtaatccctgccagagcccctcattgtgtttggccattatgatttggtaaaatttgattgctctgaaaactaattccacaaaatatgtgagatgtgagcagaaaaaaaagagagaaaaccatagatgaatcttatggcgcctgcctttaaaatattgattgcaagcaccgctgcctaggagctgtgggtcctcagggaagttaacctctgtgctcaggtttcctgttttgagaaacgaggatcgcagcaccggatcctgtatggattctttctgtgccccaggcactgtccccagcttcatcagccctgaggaacagaggcttgccacctagctagcgtctgtgcaagcttgctagctctgtgctcaccaccctgcgttctacctgcgaaaagtgctttcttgacactgtgctggactccttaaacatgccactgacagtgagccacagccgtggcatgccacctggctctgcagacagtcctctttttaatgtgtcagaataactgaaaaaggctaacatttgaggctatttcctctatcgaaaaagctgttttccaatatcttgatctttcggagaattctatttaaaaacaaaacaaacttttggccaggtgcactggctcacgcctttaatttcagcattttgagaggccaaggtaggaggatagcctgaggccaggagttcaagatcaacctgggcaacgtggcaagactgcatcaattatttttttcaaaacgtggtatatgcccatagtcctggcttctcagggaggctgaagcgggaggatcacttgagccgtcagtcgtaactgcacctctgcactccaccctgggtgacagagtgagaccctgtctctaaaaatattcttaaacttttttttaaactgaaaatacttttttcctgaagctgtatattaagaggaagaagacccatgattctctgtccccatctaggtctggggaggagaagctcccttcagggaagcaggcagagcctctcaagcaccctgcggcctctagagagctcagtgtgacagcaggaccacgtggctccatctgctgaattgtcctcctgatataaagcgctcccttttaattgggatcacccccgcggattagaccccccttggtggctttctgggattctgaaccaggaacaattccctttaattagctcctggtgtgggctgcaggcctcttcactgccaacaggtgggaagcgccatttgctcccactagtctcccactccctgtcctgagaagctgggcccaccttgccatgagtgggatgcagaggatttttgtactttgcctcatttcacagaagttacccggtttctcaatataccccggatgcacttgtagacttggtctctacctcctctggtgagcagctctcctagctcctatcacttacctagttccgtcatggtgtgtccagaatcggcggattcttggtctcactgacttcaagaacgaagccgcggaccctggcggtgagtgttacagtttttaaaggcagcgtgtcccaagtttgtttcttctgatgctcgcatgtgttcggagtttcttccttctggcagattcgtgatctcgctgacttcaggagtgaagctacggaccttcatcatgagtgctacggctcttaaggtggcgtgtttggagttattcgtttctcccggtgggtccgtgatgtggctggctttaagaacgaag

SEQ ID NO: 1242284 - DNA, 4001 bp, Homo sapiens
agggtttggctaccagctgtcccggtttgcctgggacagaaggatgtctgggacggaacaccacatggtgctcaaagaggtactgtcctaggaactgtgggctaccctacaagtcgtttacttagatcttattttttcctctttagtaatccctgccagagcccctcattgtgtttggccattatgatttggtaaaatttgattgctctgaaaactaattccacaaaatatgtgagatgtgagcagaaaaaaaagagagaaaaccatagatgaatcttatggcgcctgcctttaaaatattgattgcaagcaccgctgcctaggagctgtgggtcctcagggaagttaacctctgtgctcaggtttcctgttttgagaaacgaggatcgcagcaccggatcctgtatggattctttctgtgccccaggcactgtccccagcttcatcagccctgaggaacagaggcttgccacctagctagcgtctgtgcaagcttgctagctctgtgctcaccaccctgcgttctacctgcgaaaagtgctttcttgacactgtgctggactccttaaacatgccactgacagtgagccacagccgtggcatgccacctggctctgcagacagtcctctttttaatgtgtcagaataactgaaaaaggctaacatttgaggctatttcctctatcgaaaaagctgttttccaatatcttgatctttcggagaattctatttaaaaacaaaacaaacttttggccaggtgcactggctcacgcctttaatttcagcattttgagaggccaaggtaggaggatagcctgaggccaggagttcaagatcaacctgggcaacgtggcaagactgcatcaattatttttttcaaaacgtggtatatgcccatagtcctggcttctcagggaggctgaagcgggaggatcacttgagccgtcagtcgtaactgcacctctgcactccaccctgggtgacagagtgagaccctgtctctaaaaatattcttaaacttttttttaaactgaaaatacttttttcctgaagctgtatattaagaggaagaagacccatgattctctgtccccatctaggtctggggaggagaagctcccttcagggaagcaggcagagcctctcaagcaccctgcggcctctagagagctcagtgtgacagcaggaccacgtggctccatctgctgaattgtcctcctgatataaagcgctcccttttaattgggatcacccccgcggattagaccccccttggtggctttctgggattctgaaccaggaacaattccctttaattagctcctggtgtgggctgcaggcctcttcactgccaacaggtgggaagcgccatttgctcccactagtctcccactccctgtcctgagaagctgggcccaccttgccatgagtgggatgcagaggatttttgtactttgcctcatttcacagaagttacccggtttctcaatataccccggatgcacttgtagacttggtctctacctcctctggtgagcagctctcctagctcctatcacttacctagttccgtcatggtgtgtccagaatcggcggattcttggtctcactgacttcaagaacgaagccgcggaccctggcggtgagtgttacagtttttaaaggcagcgtgtcccaagtttgtttcttctgatgctcgcatgtgttcggagtttcttccttctggcagattcgtgatctcgctgacttcaggagtgaagctacggaccttcatcatgagtgctacggctcttaaggtggcgtgtttggagttattcgtttctcccggtgggtccgtgatgtggctggctttaagaacgaagctgcagaccttcacggtgagcgttacagctcataaaggcagtgcggacccaaacagtaagcagcagcaacggttattgcaaacaagcaaaacaacaaaacttccacagcacagaaggcgactccagcaagttgctactgctacctggggcagcctgcttttattctcttatctggccccacccacatcctgctgattggtccattttacagagagccgattggtctgttttacagagagctgattggtccgttttgacagggtgctgatgggtgcgtttacaatcctggagctggacacaaaagttctccacgtccccactagattagctagatacagagtgtggacacaaaggttctccaagtccccaccagagtagctagatacagagcgtcgattggtgcattcacaaaccctgagctagacacagggtgctgattggtgtgtttacaaaccttgagctagatacagagtgcccattggtgtatttacaatcccttagttaaacataaaggttctccaagtcccttccagactcagaagcccagctggcttcacccagtggatcccgcaccagggccgcaggtggagctgcctgccagtcctgtgcagtgcgcctgcactcctcagccgttgggtggtcgatgggactgggtcctgtggagcagggggcggcactcgtgggggaggctcaggccgcgcaggagcccatgacgcgggggaggaggctcaggtatggcgggctgcaggtcccgagccatgccccgcacggaggcagctaaggccccgcgagaagtcgagcactaacagctgctggcccaggtgctaagcccctcactgcccgtggccggcggggcgggctggctgcttggagtgcggggcccgccgagcccacgcccacccggaactcgcactggcgcgcaagcgcggcgtgcagccccggttcccgcccgcgtctctccctccacacctccccgcaagctgagggagccggctctggctttggccagcccaggaaggggctcccacagtgcagcggcgggctgaagggctcctcaagtgccgttaaagtgggagcccaggcagaggagccgagagtgagtgacggctgcgaggcctaccagcatgttgtcacctctcagtgggggcttggcttcctctgcacagttaaaggaagagattggaccattaagaaatgcccacttcttctttttttttttttttcagatgtagtctcgctctgttgcccaggctggagtgcagtggcgcgatctcggctcactgcagcctccgcctcccaggttcaagcagttctctccctcagcctccggagtagctgggattacaggcacctgccaccagccctggctattttttgtatttttagtagagacagagtttgaccatcttggccaggctggtcttgaactcctgacctcgtgatccacctgcctcggcctcccaaagtgctgtgattacaggcgtgagccaccgcgcccgtccagaaatgcccacatttgtaaagttggttgctgctagggtccaactctgctatcaacattcacctatgaggtctgggaatgggaacttgtgtttaaggagactccttaagtgcaaagactgcccatctttaaccatactacttttctgataacaaagctgaaattttcatcattttttttttgatttgacaggagctattattttaactaaactggaatgtgtcctgcagttttcactttcccataattcacttatttttttctgttctaaagttttctctaattttgaaattaatagaaaaaacaacacaaaatattttacttagtcacagtgatatgtctatttttgtattcattcacctcccctctccccacacaagaaccccccagcacattcctactttctggaatgaaaatagctctgagaagtatggattttgaggttcaacatctgcacttttatttctttttccattgtaaaaacaaatggtctctaataattgatgtcaaacacagtctttaggctgatgaaatacagtaagcctgagaacgaataaggcaactaaatggagctgttttatttaacagagagcacagtgatcttccttacaagcgggattcccgagaggaaaatgttt

SEQ ID NO: 1242285 - DNA, 4001 bp, Homo sapiens
caggcatgggggttaaatggacacagcgggttcacctacatggtgggtagatggagacacaacagcaccatgtaccagcccctacaccccatactcttacacttgcccccctagactcaacaattgtgtgttaatccgattcctcttgggaagatttcaatatccgttcatttgctaattattcatgttgtgtgtctgccctgtgccaggtcatggtatgcttgtccctacagactcttgtcttgtgtaaacatctggcatggcatgggagcaggaagcttggagctatcagtgtgcccagtgcagggacgggaaggatggtttgctaggacaggaatggggttggtggcccctgagggcacaagtgaatggatttttgccctggggctcaagtgaatggaaagccttccatggggtcctagctgcttgtacctgtctcctcccaccaggattggaagggggtgggagcttggagtctgagccaacttgtcattcaccaacaagccgtgctgtcatgagatggagctgctgaggtaacgtggtgccaaggctggccatgtcttgcttggggctggcaagtcacaatggacaaccccagaatgggcccagtgaacatacagtacattcattttttttcaaccctcaaatgggagtgtagtatgtgacgtcaggagcaaatacttgacatcagggctttctggtacttacaagtttgctgagcatacaaaaacaaacagcgcccccaatacaacaaccctagcctcttgcaagacacagccccctgaacctcttttttttctagggagccttagtgcctctttaaaagtttttttgagacagtctcactttgtcatacaggctggagtgcagtggcgtgatcacagctcactgaagcctcgacctccagggttcaagcaatcctcccaccttaacctctggagtagctgggactataggtatgtgccaccacacccagctaattaaaaaaattttttttggctgggcacagcggctcatgcctgtaatcccagcactttgggaggcctagatgggtggatcatttgaggtcaggagttcgagaccagcctgtccaatatggtgaaaccccgtctctactaaaaatacaaaaattagctgggcatggtggcgggaacctgtagtcccagctacttgggaggctgagacagaagaatcgcttgaacccgggaggcagaggctgcagtgagccgagattgcagcactgcactccagcctgggtgacagagtaagactctgtctcaaaaaaaaaaattgttttgtagagacaaggtctcactatgtagcctaggctcaagtgatcctctcaccttagcctcccaaagtgctggatttcaggcatgagccactgcacccggccccctgcacctcttgagctacccattttcactggcctctacttgtactcaaagtgttcagctgaggtcagcctgtgaactatacccatggtccttcgtgctccctcgtcctttcccttagtgagtgataaagctggaagagacctatggggctgggctttgcggggaggagaggtaaagaaaacctcagggccagtcaggatcgggtaagacgaaagagaaaagacaatcctcagaatgtatctccccagttcaggcccaggtgtttgagggacaggagttggcagctctggaagggacctcatgcaatttcttccactctcagctaagccctgctgcctggcatggcaaaggctataaatcataactgaagaagacagtggaagtgtaggggcccagcccaggagtggggacagtgcaaatggacagacacacaccctcatgcagagacacggaagcacggataccaattcaatgcatatacacacccagagagaccctgaccacatgcacacacaacataccccacagagaccctactgtccccagccaacagcaagtagagccaggtccctacctgagagtgcagagcaggggcaggaagtctggggcactgtctgtcctcaggtgtatttgtacaggtcagggaggggctgggattgaacaggtgcactgggagggccagatgcagaaggctcgagggaatgaagagggatgggctaatccttatctgggcaaaggacagttgaaagcaggatgtgtgtgtgtgtgtgtgtgtgtgtgtgtgtgtgtgtgtgatggggaggctggggaacaagccgttaccagattggtgtggtaacgagatgccacagaatccaggcagaagtccccaacactggcaaggctgtttacaccagggactggctctgaacatttgtagagttcctactgaatgccaggccaggcatgcggtgcttcacacacattagtaacccaatgagtcccacaagatagataggatgattacctcctttcagcaggtggaggaataaatagtgaccatagtggaggacctggtggaatatttgccctgggcgccaagccccaggcctgaattgtcagatgtgctgcccagcccagggagctagcctgagaatggaaattagacacagaaaagggaacttttgggatggatctaggcaggcggggagggagcccagcctgccagcttgctctgcactccgaaagccccttgtggtccggtccccactgacccctgtggcctctgatgcctgccacaacctcttgcttggcgtgctctagccatggtggccttccttagtcccctgcagacagagccagtgcccttgctcagctctcctgtctccctggatccttgctcctgatgtctcttgatcccagtggggactctgtgctcctcagaggcaggggctgttgtggcttccttccttccctccttccctcctcctcctcctcctcctctctctctttctctctttcttttctttctgagacggagtctctctgtgtcacccaggctggagtgcagtcgcacgatgtcagctcactgcaacctctgcatcctgggttcaagtgattctcctgcctcagccatccgaggagctggaattacaggcgcccgccaccactcctggctaacttttgtatttttagtagagacagggtttcaccatgttagccaagctagtctcaaactcctaacctcaggtgatccacccacctcgacctcccaaagtgttgggattacaggcatgagccaccacacccggcctgtggtggctttcttagtcacctttatatcccctcaattagagcagtaacgtaaccaccatcaggatacaatttggaaaatggagaggaggaaaagagtgatcctcctttatctccacggtgggcaggaaagtgtttgtgtgccagtttctcttacagtatcagttatctcatatcagctcttggaggtaatggttatgatcttcccctcttttatagattaaaacattgccagcgttcagagacattaagaaatctgcttgaggtcgcccaccaagtgtgtagttagtcccaactggggactatttgagtctagagcccgggccctttcttcaccttaggtaatctctccttttaggaatgctcttctgaaaaattccagcctgctttgctaacattgttggtcaaaggactttggtttatgactaggtgggaggctattggtcccttctgcacacatttgctgtgggtctatggggaaccaggacagggcggcctactggggaggggcagaagtcccaggggaggtttacaaaggtatggtgcctgccaggctccggcccaaactgtgtgaatgttaccaactgcatccactgctcactgtgctcaccgccctcaccagccctctaagccctactctgcttccttttacccttcagggatcttgacaccgcaacctctccacctctgtccccagcctttggcaggaagctgaaagagaggcctgtgtcttcacaaagccccaggaggaaagcaggggctgagaggaatgcatgggggcccagtgctctgggttccaggcttgaggcctaa

SEQ ID NO: 1242286 - DNA, 4001 bp, Homo sapiens
ctttattctatggtccatgtataacaactgattagctatcattcaaaagaactcctaacaaaataaatattacaaggcaaagatcacagcaacatagtgactctaagagaaaaattatagaaaacatgtcttaaagttgtgtgcttttttttatttcaagggttaattatctccaaatattcaaattcctaaggctttctcatttcagtcaatagtttgaaactggggaaaaatcaaaaccatccattgtaaatctgctctcccttcagtaaatttgtaattagaagtacattttaaaagaatgacactcaaagccaataccttaacatacgaatcttggagtgtaaacattgtgaagttattaggagaaaagctctttcggtgaggatattccacaggaaaaactctacagaatcaaatctggcatttggttgttctagaagttgtcgtttcattataacggggaaaaaattaaataatttttatttattataaaaagaagactctccccaaagatttacaattgtatatccccatctcctctctgacagagatgtcagttctctgggtcgagacataaccagctgctgggttcacacacacaggaagccacagagaagatcgcgttcagagcctcgaaataatacgcgttagttaagaactgcctgctactaaaccaaaattattcaagcggagccccatttgtcacaatccagtcataagggttccaccaccccctcccccaactgcttgtgtagtggtatatctgctacggtaaagaagccatcatcaggtaaagattggggtgggagaaaagcggggaaaagggggcaccctttcatctaatttcgtgaggcgtgagtaattggtactgttaagaggaacgttctatttatcgggggttggagtagcatgaggggagaatttcgttcaaatcaacatggccagcaagatgtccctacaaacaaaaggcaatggggggatataaacacgaaccattcacctccatcagctacagcatcgccatcatggtgtgtgcagagacccccaaaggctcctctcaccctccacaccagctaaggcaaaagaagggagagaggtagctgcatccccccctcccaacactgcttccaaagacacactcttcgagggggtttctcccctcggctgcccggaatcagagagaaagagtaacgtcccgctcactacctctcagccgaaccccaacgccggcccggggctcgctaaactttaccagagcttctcccccagatccccaccctatcgccccgggatcgcgcttcccacaagcggggcaccccaggcgcttcctgacaagcgagcagccggggaaagccgagtccggggcgggggctactgggatccacggaggggcggggcggccgaagccaagttcccgggggtctgagaagagcgcctgacaggagcccgggactgcaaaggaggaagaggaagcggccacggggagctttcccaatcccccctacgagagcaccctgcccccagccccagctccccatggggggcagggaggctaactggaaggtgaaaaagccgagcccatgagacagctgcagcccctacctccggactccctatctcttcccccgccacccccgccagaggcgcccacaacaataacacgccggggacgacccgtcagcgcccccgaggcacccggggcccgcggcccgccgcaggcgggccccctctgctgagaccgggcgcgcctctctccctacaactccaggcccgggtggagtcaggcccgagaggccccccagggtcggacccatcccccctggcagcagcggcgccgtctccgcggccgaatattagaagtgaattcgagctgcgctttacctttagttccgcactgtccgccatcttgcgtctgtcagcgcaagcgcagtgaacttcgccgggggccgccgctagacccgcccctctagccggcctggccccgccccggcccgcccctccaccttcccagcccgcctctagcctccgccccgctcagggcgctcgaagccccgccccgggcacgtacagctgcgagacaggcacgttccatttaaataatggcgccaagcggcgaggtttgacagttactgccccctcggtctccctgccccccatcctagctcggccagctcctcccgggaagggccggagcgagagggatgctggcctgagccccatctctctgcggtccgcggaacgcttctgcatagcttcgacgcctacggtcacagaaacaatgctgtcccccaacccccaataagcaaggctttttcagcacctgctacctgcgaggctaccagtgggctaaaaatagaaatccattacatttaaggggcccttaatgaagcatttctatcattattggctcagatcctcttgataacgaggggaggtaggcaaggaagagataattcccatggtatagattcagaaatgaaagctcagagaggaaaagtgacttgcacaaacaagtattttaacgaggtggcgtaagacaaaattttgaaggtgttcattaacatttttgtttaaaaaagtatttatttagtgaccatctgcttgccttgtgctaacggctaaatatacattttgaaatcaaagtccgtgcccttctgtagttctctaatggggaatcagagaagtgaacgaacaaagatacaattgcaaatgttagtgagtaccagaaaggagcaaaaggtcattgagagagagaaagggtttgggagatgtacttaattctgggagggttttatccactaaattgacatttaagtagacttgatggaaggattatttcattccttttcgtctctactgaaagccttctatatacctcctccccaacccccacttttactaatcaactttgcctcataactcatggaaaaaatgaaagatatcagaaataaactcccttatcttctcaccatcaaaaccacccttatctgcatagtaacatttgggttgctatgaatgaagtgtccctgcgcctaggaaggccagtccctttaccagtgaccggatttttttcacgcacattcctaaggattttactcttacaattacctaccctccagcatcgttagttttttccctctcaattgaattgctcctatcagcatataaatatattgaaatttctcccatctaaaataaacttcctttgactccaaaatcgcctctaggaactgccctatttttctgctatcttcataaattcttagaaaggtttttcaagatctctccaatagtgcttgttcctacctctcacttcacattcacttctcagtctaccctgatcgagctttggcttccatcatctgtatcacttatcaagattactaatgatcttgtttccaaaggcaattgccaattctctatccatatctcaattgacctctctgtagaatcgcgaataattgacatggttcctttgatttgaaacacttttccccctgaacttacctacacgtcacagatagtcctgttccctcactgggcctcctttttgatatgctggtttctcctctttggctcaatctttaaatgttggactgctccagggctcggtccttgcattcttctctattttatcaccaggtgatctcatctaactggttgacttgaagtctatatgctcatgactttgaaaatgctctctagcctaaacctctccattgtcaagaaacaaaagtaaaacaaattgagattcaagatctcattggcattattgcactcctagaattggacaaaacttcattccacaaaatagaataaatgttgcaatgaatcaagcagaggatgttaactttagagacagaaaatagactgaagaaggcagaaacaacaaaaagcagattggttatatcaaagtcacttttctttaaggtggagacgtggagacagaacagtagaaagaaaactgattggttaacattgggttacttcaggtattc

SEQ ID NO: 1242287 - DNA, 4001 bp, Homo sapiens
gtatcaaatacccacaccggcttcccctcaaacttgggtctctaggtctctgccatcttaaagaatggcacatctactcctaaaggtgtcccttctttcccgtcctcactgtgctaggctcggccccagcctggggctccacaggccgcttcaccagcgtagtgtccggaacccgggtggccgccctgagccgccgctcctcgggctgcacagggctgatggtgacgaagtcgcggggccgcgggcccagcagctgcgctcgggcggaggccggcccgggacccggggccgcagccagcttgaggcgcaatgtgcgcaggaagcggcgcaggcggtctggggggcagtccgagagcagcagctgcactgcgccggccccgggggtgtcgtgggcggggagccgcagggtgctgcgcccggcctcggcgaaacgcgtgaagaggcgcgcggcgcgcagaggaaagcagcgcggccgccccgcgggccctggcgcttgcagccgcagcatcaactcgcggcgctcgttgcgacccaggctcagctccgcggtgcgcagggcctggcgccttcgcggctgcccgcccgggctcagctcctccacagccacgcggcaccgcagctccgagtcctcatattcccctgccgccgcctctatgcccgagagcatcgtcaccgcctctgctggtctgcgaagacaccggagcacaggggtcatgaggattcatgagacgtaatgggtgctataggggacgtaatgggtgctataaaggacgtgacagggagcagggtcaaggctacacaagatcacgaggactgtcactggtaacacaaagaggtcacaaagacggagaaagggctttgggctaaccgaaaatccacccttagaatatgccctgggccgggcgcagtggctcgcgctttaatcccagcactttgggaggctaaagtgggcggatcacctgaagttaggagttctgagaccagcctggccaacatggtgaaacctcgtctctactaaaaatacaaaaattagccgggcgtggtggcgggcgcttgtaattccagcactttgggaggctgaagaaggaagatcgcttgagcccaggaactcgagaccatcctgggcaacatagcgacaccctctaattaaaaaaaaaatacatacatataaatacatacatatgcatacattatatatatgtgtgtgtgtgtgtgtatatatatgtatatatatatatacacacacgcaccctgctacacaatttccatttctatatatccaatttctatatatatatacacacaatatatatacaatttctatatatatacacacacacacacacacacatatacacacacaccgtgctacacaacaatttccagagcggcggatgggcaccgaggattagggagcctcaggtgtcctgcaaggacctcactagaacaggggtccctgcgcagaaagaatcctccttccccgagacccagggcgagcacatgaatcctcagagtactctccccaggaagcaggagaatcgcccgtggggagatgcaaagagggctgccgtgtaataagcgacttctgccttgtaggtacattcactggcttatatgcagcgggcaggtctcactcttccccgtgtacagacgtggaaacaggctaagagagggaaactcacttgcccttcataagccacagcggctagtagtcaaagtcagtgtgattcccatgccctcgcgcttcccaccaccaaggtggggacgaggtggaaaatattcggctagggaaatcgcgggggaccctgggaccctagaagccgtgctccctcaggctgacccatttgtttgcaccctcccgccggaaacccctagataaatcaggctctttgctccccacctctgggttcgggcagacactcacttgtgccgacactcagatgaacaagcagatcgtagccggcctgtggctaagctccgaaactagaaatttttcaaatgctagaggcagaaaatcacccaatcaccgactggatctttaaattctccagccactcagaggtaggggcgtaacaatgggcgtgtctttctttgcgtctctactccaggagcttgggctgtaccaattgcctgctagaggaaggaggtttatggtggtggctgagcataccaaatccagtggacggctgggcgtggtgggaggaggccgccgctgcggcagccacccggcggcgcgtggtgtcgggtctgaaaaccctacgcgactccgaagatttattttcagaaccatccttccagcacactccctctcccctctagcccgcacacagaggctgggcttagccttggggaagatctgcctttggactctcacacccctgtttacactcacagtaccattgtccagttctgggcagaccaccccaaggcctgcccaatccctcccccgcccccaactctacatccttctctgcctttgtaagggactttacgctttggctctctcacccacctgaggcccatgagtgagaaactctgagacctgtgccacgtgccagagggtacagcggaagcgagtagagtctctgtcttcagggaaattgtatccctcttcttgcacaggatgctgaaagaatttacttttaatcatctttattatctcattgaagcttggaattacatagctggaaaggatcttacaggtgagtctggctacctcattttacagataatgataactaccatggattaaattgccctttcctttcctttttccttcttagggctcactctgtcgcccaggctgtagtggagtgcagtggcacaatctctgctcactgcaacctctgccgtggcgcgatcgtggctcactgcaacctccgcctcctgggctctggtgatcctcccgcctcagccccccaggtagctggaactacagatgcacacccagctaatttatatatatatatatatatatatatatatatatatatatatacacacacacacacatatatacacacacatatatatacacacacatatatatatacacacacatatatatatatacacacacatatatatatataatttttttttcgtatagacgggatgtcaccatgtttcccaggcttgtctcgaactccggaggtcaaacgatccacccaccgtggcctcccgaagtcctaggattacaggcatgagcccggaccttatttttcaaatgagaaaaaagcaaggcttccagagattttactgaaggtcacatagctgatatggagagcaaaaccaaacattgaacccagattacctgctcgcttaatcactccatggggcttagctactacaccacactgctcccagtctgttagcggtagagggtgatgactgaaagttgtccaggttcttggcgttttgaacaaagaattggacaaaatgcccatcaaagcaaagaaagaatgaagcaacaaaagaacaaaagcaggaattttttgaaaacgaaagtacggctaggcgcggtggctcacgcctgtaatcccagcactttgggaggccgaggtggggggatcacttgaggtcagcagttccagaccaccctgaccaacatggtgaaaccctgtctctactaaaaatacaaaaattgccgggtgtcgtcgtggacatctgtaatcccagctgcttgggaggctgaggcatgagaatcacttgaatccaggaggcagaagatacagtgagcctggatcgtgccgctgcactccagcctgagcgacagaacgagaacttgtctcaaaacaaacaacaacaacaaaaaacaaaaacgaaagtacactccacagtgtgggaggggacccgagatacagaattttcttgggttcaaataccccctagaagtttcccattgggaactttacgcttacttcatgtaactgaagtggtagcgataatcagtctgattggttgcagacagcaaccattcagccaccattcagaggctggag

SEQ ID NO: 1242288 - DNA, 4001 bp, Homo sapiens
tatgctaacggctgtgtcaagtatattaacataaaagaaagatacaggagaaatatttgtataaaataatggtatactttgatgagttaaaattatttggggaaaatacggaaaactgaaaatatgtatagtagtccccccttatctgtggtttctctttccatgtttcagttgcccagagtcaaccactgtctgaaaatatgaagatattttgagagagaccacataaaagttcacataacttttattatagtattgtgttatacttgttatattttaatactgttaatctcttactgtacctaatttgtataaactttatcataagcgtgtgtgtattttttacatatataaaaacaatatatatagagtttggtactgtctacagtttcaagcatccactagggattttggaaactatctactgaagacgagggagcaagggggactactctaaaagaaactgagcacaatttccaagatgaatacacactcatagtctggaaaagaaaccacaaaggatatttgaaaaccatgtgatgtgaaacttcaagagactgccagtattcatctggaacaaaacttgtctgcactaaaaagcagtttaatattcgtaaagctatggtaaacaagagcagataaatattttctccaagaagatctgaaaaacagaacaaaacaggtaatagtggcacaaaagtcaggcagttccacttgcaaaacttaaaatctgctgctctggttggctccttgtaaggcacagtagtgacctctggtccctccacaccattcttaaagccaacttggttggttatacaagcaccacagcgtcatcactgggtgactgccactcttttagtttaaccaacttttcttgcaacttattgtgtaaagataatattaaaataaatacaaaaaaaaaagagtgggttaactaaggccttaggctaattaattaggtcatactatgtgtgtatctaatgaaagaaaccagctaacaaattactaatttgggaagcagccctttgtatatgtgcaatataaaatggtcctctgtacatatatattgatgattactattatatatgccaggcactgtgttaatttcttcacatgcatctcacttaatcctccaaacaatattatgggataggtattattagccccattttacagacgagcaaattgaggcccagaaattaaactgccttgtccaaataaagttgtaaattacttatcaggattcaaacccgggtctgtgtgatgtctccaaagtcctgctcttgaccacaaatggacagcctgtcggccaaatacagagtattttttaaaaaattgaatttagttgccaacatttaaaaatcagaatttatattaaaatctgtgtttccagcatttcccagcatttcaaaactcaagatctggcaacacagagctcaacgggcaactggctggtaatgaaatggagggggttccttttagatgggggtaggagctctccagacagtgtcccctcactcacccccgcggcgcctggcgctcttctcctgggtgttgaagtacaaggtagactttctctttcgcagctttatcttgccgtgggagcggttctggagaccatgcaaagtgaggctggcatctccgccccccggctccattccgcacttgcttaggggcctcctcatccctggccgccaccttcctaaggcggaagaaagctgcagtagcgcgctgctcgtccatccattaagtttggcctttgagagcagtcgtcgctcgcaagcccggaagtaaccgggaacgggcaacttcgtagctcccacccgacgtggtggcctccttgcggtttcctttcgccgtttccgaaccgagggattgctactcgcctttggcttggcggtctctgtgctcgggggtccgaaaactgctggaaggcccccggtctctggaggggagcaggcggtagcgagtttagtgacgtggagcaggcgcagaacagtcggaggtacctgagtggttattaaaaacggtaacggtaattgtagacgtcagtgttggtgttaacatttcaggttcgttgctctcacaaaaaatgcctgttcaacgaggtaggcagggtagggatgatttagcttgttgtacagatgtggaaacaggccgaatggttcctattttttttgttgttgttgctgttgttaggttttttttttgtttttgtttttgtttttttttttgagacggagtttcgctcttgtagtccaggctggagtgcagtggcgcaatctgggctcactgcaacttctgcctcccgggttccagtgattttcctgcctcagctcccaagtagctgggactacaggcgcgccaccacgcctggccaatttttgtgtttttttgtagagacggggtttcaccatattggcctggctggtctggaactcctgacctcgtgatccgcccgcctcggcctcccaaagtgttgggattacaggcgtgagccaccgcgtgcggcccactcctcttgttaaaagtaaaaccaggccgggcgcggtggctcacgcctgtattcccagtactttgggaggccaagacgggcggatcaggaggtcagaggatcgagaccatcctggctaacacggtgaaaccccgtctctacaaaaaatacaaaaaattagccgggtgtggtgacacgcgcctgtagtcccagcttctcgggaggctgaggtaggagaatggcgttaaccgaggaggcggagcttgcagtgagccgagattgcgccattgcactccagcctgggcgacagagcgagactccgtctcaaaaaaaaaaaaaaaaagaaaaagtatgcatttaaaaccattgagaacattctgtaatagaaaaggttttagttttgtcttatacccttccctaattcacttcctgtactccttatgtatttatattcttgttttaattagtaacatattataaaaatattgttcactccagtgcaaagtagtgacataacatcttttaaaaggacattgtactaagtgatggctttgctttccatttttgtatgcagatttgaagagatttcctgggtgtggagtgtgactttccaaaaccagcttttccttgagctgtatttgttgcagcaatgtttaggagattgacttttgcacaactgctttttgccactgtccttggaattgctggaggagtatatatttttcaaccagtatttgaacagtatgccaaagatcagaaggaattaaaagaaaagatgcagttggtacaagaatcagaagagaagaaaagttaatactacatggagttaggcctggcgcagtggctcacgcctgtaatcccagcactttgggaggccgaggcgggtggatcaggtggtcaggagttcaagaccagcctgaccaacatggtgaaaccctgtctctactgaaaatacaaaaatcagccaggcttggtggcatgcgcctgtaatcccagctacttgggaggctgaggcaggagcatcacttgaacctgggaggcagaggtggcagtgagtcaagatcacgctgctgcactccagcctgggtgacagagcgagactccatctaaaaaaacaaaaagcaaaaaaacccacaaatacctcatggagatgaactgtaataattgcttaaagttccatttaattatgttaactctaatctagcaaaaacatagatgtacttaaaaataaatcatggataatgattttttaacctaacactgttaattttaatgtttattgtatatttgtcattttatgtctttttaccaggacagataagtaatttccttttaaacaaaagtgaatattttaggaatattttctacttgaggtttatttttctaggaattcagcatatgcagtatcatggggtgccagtctcagtgtgtatataataattgggaagggtgtttgcaatagtgtttgtagatatgtgaaccaacttaaactacctcaggcagaaat

SEQ ID NO: 1242289 - DNA, 4001 bp, Homo sapiens
aattaatgagtcaaacctgattctaaacgcctttttgacaacttcccaatgtctctctccacgtggaccttcactgtcggcctcactttaacccgtaccagcaaaggtccaagccctgggtctggagtacgtagattaagaagccaagggatgcccttacatgactgagtctttaaatgatcttcagactggaaggtgctttcctgcatcttctaatccagtgtgcttgccacctggtgagaccttacgaggcttcctgtccccctccctcccacagcaggaagctcgtaccccactcccagcattacaggagatacattttaagattgtgagctcggtgggctatgactcgtctagtcatcctggtctctaactctgacccccaaacagcccttgacccacaccgtttgcgttcagtgaacgcgacagatttcctgccccctccgtaaccagatccccaccccaccccgcggcctccgcgttccacaatcaggacgcatttgttaaaaaatgtgccggataattaaaaaaaaaaaaaagaaagaaaaaagaaaggaaaagaaagaaacgtgccggagaggcgcggaacgggcgagggccaggaggccccagcaaagcctgcagaggtttatcccgcccgttacgaggcccaaggccatcgcccggtgaagcggggtgggccctgggcgcggccgctacgtgcagcccggccgcggcgagatggagcgtggtccctggcggccacccggcaagggccggtcgagctctcgggccccgagccattcccaggccctcgcaggccgcccatctaatcccggccacaggggacggcaccgcgccgcaggggcaaccgccctgcctcccggcagcggggcaggccaacgttacgtaagtctccagctgcccccgggccgccgcatcccgcccgccgcgcggggcacccagcccagccctccgcccgcccgccccggacacggggcctcagcaccgcccgagcctgctgggagctgggaggcggtgatggaaaaggggggtgggaccgcgctcggagaccggagcaagtgggcgggcgcgaccagagcagagagggagggagggagcggacacgccaggcgaggaaggggatgcgggggagcggacgtgaccagcaagcagggggaggggcggcgagagggaactggggcgcgggaagggcggtcgcgcatgaatggagaatggacgcgggaggggaaccagaacgcagtttcaatgagttacacagaaagcattagaatcaggggacacgcacagcttgaagaggagggggtggaaggaccagacttaaggaggaagaggggaaaacgagcacggaacaggcggcgcggagaaaggggaagcaagggtggaatcaatcacgagggaccgagagaaggcaggcgaggatggaggcgcattgaggattggggcaggaggaagaggatgggaccagaatgagggggtagggctggggcgggaaaggagccggcggacccgcctgatctggaaggaacggcgctggggacttctgaagagcaggccccaggcgtgaggagccgttctcctctctctgagctccactgcatcccagacgccctggatcctgcgccgccctgcctgcgtgcccggggccggccggcgcgccgggattccgcactagccgggcgactggcccttggtggggactgatggcgtagcctcctgcaccgctcacctccggcgctgaccgactcgggctacgctgcaaagacgaagagatccggagccacggcgcgtgcagctgctgtgcaaggagccactgcctcagcctcaaggttatcccgctgcgggccgccgcaatccctccgccgccccgccctctgcccaatcccggctccgggcgacccgggccccgccccctgcgtccccgcgggcgcagtcaccttcaggaggaagcgcggcggcggcggcggaacgcgcgggcaggttgccctttcggtgggactaaattctgcggcggaaggacacagattcagagtcacattttaagaaacctgatgaccaatggggacgcggcggggcaacggggcccgcccccggagcgactttcctcccagacccccgggcgccgggccacctgttgccgccaagttgggctgccagatggggtgtcttttcttggctctcggcccaggccaccccagctgtcccggcctacctgggcagggcccagatttatgggttccggggcagcattctcccggccccgccctgccactccccactcctccgggtgtctgctctggcgcaccctcggagactgagctgaacggaaagttggggagagctgcagacttgtgcgtggttggaggtcctggccgccttcggaggggctctggcactggagcggcagtagggagaactagggactgcgaagtgggcctggagcgggagcgcgaggccgttttcctcttaggaccattcattgtgttaggaccgcggaacaaggaaggaccggttggggccatgtgaataatttagtagggtctggaatcctgcagagcgaatgcctcagagtagaaagtaaatagacggtgttgatattagcgcagagctgggcatctggaaatatcaagtcagaacattagggccgataacctatgcaggagtcagcatttctgttttcacctttgtcgtgtttaagtcagtattgttggaacttttcttacatttttctacaagacattttctgatttcccagttgttagccagcaactaatgatgcgagcagttatcaattaaacagctgttaactcttgccttcattcacagatacaatgttgcgcattcaaaatgtgaagaccgttctcttaggttctttttttattttcctggcaaaagagaccaaatgggtgtgacctgctcaggcatacccgctgcctgcagctgaatcacaggccttcattcgcttcctgttagctcagataagctgggaggagacagtgacagcctaaaagtaaatttctgtttgaagtgagataaaaatctttcactttcttctgtaagtctttcctggtccctttagttgttgttgggaaggaaatgcttgattattaaggtggtgaaagaacatgaagttgttgagaaggaaaaaagacatgcccccctagggagggttagattcctctctatcagagaaagagggatggcataaaagtccctccctggcccctgagctgaggacaaactaagaacagtggtggacaacactgggatggcaaggatctggccgatgctggactatattgtattttaaagttctaaattgtctgggtgcagtggctcacgcctgtaatcccaacactttgggaagccgaggccggcgaatcacatgaggccaggagttgagaccatcctggccaacgtggcgaaaccccgtctttactaaaaatacaaaaactagctgggcatggtggtgcacgtctgtaatcccagctactcgggaagctgaggcagaatcgcttgaatccgagaggtggaggttgtagtgagcagagatcactccactgcactccagcctccgtgacagagccagaccttgtctcaaaaacaaacaaacgaaaaagttctaaatctagatatgttcacaagactgaaatgtacatgtagagttgatggcaaactaactcctcagttgcagattttgatctgacagttctagaaatgctgtccacgagcctctggcagagacaaatccagcgaatcgttgctcacattaggtgcatagtaggccgggtgcggtggctcaggcctgtaatcccagcacttggaggcagaggcggtaggatcacgaggtcaggagatcgagagcatcctggccaacatggtgaaaccctgtctcaactaaaaatacaaaaattagccgggcatggtggcgggcgcctgtagtcccagctactcgggaggctgaggcaagagaatcgcttgaacccaggaggcagaggttg

SEQ ID NO: 1242290 - DNA, 4001 bp, Homo sapiens
gcaacaagagcaaaactatctcaaaaaaaaaaaaaaaaaaaaaaaaaaaaaacaaaaaactgaagcaaaataaactaaaacccaagtaaagtgagtttgtaatgtaagtgctgcattttcttctaccttcctgcccacggccgtttcctcatttcttccattgcctcaatattaagaaataaacagctttaggaaataaaatggtttttcctgtgaccccacatcagtgtcacaacattcaaggcacagaagcaactcccataaagtgctagctgtttagagtcaccgccaccaaatttgctaagtcactgggggtacggttcttaaagagctaatgatgctctttgctaaaatatgaatacaacattatttctaatgcaatgcttaaaatgaaagcagttgtgctagacaggagaccaacatccatacattttggctcaagtcagtaactgagaaatgagttcaagaaccttctttaagtcatcattaatcaagtcccaggagaggcggctgtgcccgctacaaaagggccaggaatgaagctgcacagacggcattagctgggcaccgggctctgccagtctacacttaagctcttaaggcagtacagagaaccaggtgacccggaccaatcattttttaattagttgtggctttttttttttttttttttgagaaggagtctcgctctgtcgcccaggctggagtgcagtggcgcgatctcggctcactgcaagctccgtagttgaggcatttttaattaggggaaatgcatgcttcattatctgactcactgaaaggggagaagggactttttaagcctgcaagaaccacaatgtagtttccccactcacccagcgaagataattctctcaaaagcagaataattgaaaggttgagtcatcttccccacagagccccactcccccacagatttggtgatacgttacatttcccttccccacaagacagcccactcctgcccccacagcacctcaggccaccaaagggcaaattatttgctaacaacgctgcagcaggggagtcctgacctccatctcctctgtgacctagggagtggccacaccctcaagacggccaactgggggctactgaccctggctccaatcctaatctcaccagcaggcagagcaagtcaagggctggaatgttcctctggtaggtagtattctacttacagcggaacaccaaaggcttaactcagcccctccttgcctgcctttgtctacaggtcccaatctcagatgaccaaaaagcatctgctccaagcagagagttggaaagttacattatcagttactttgtcaatattaaaccagatcccttggggaactggtttccaggagacacgtggttattcagagagcctgattcctcacgattagctgtaggcgtttggggacagtaggaagacaatggatcaaggcccttatgctcaattgtggactaagtaattgtgctcaaaaataatatattcagtcacaggcttttcttctgggtatttcgccagagattagacacttactgagtgtgccacatccacgtaagcatgaatcctttcaaccatcatgaggaaaatgttactcccagttttcccaggggaaactgaggtgtagaggctgaactccttcagagtctcaggaaattaatgagtcaaacctgattctaaacgcctttttgacaacttcccaatgtctctctccacgtggaccttcactgtcggcctcactttaacccgtaccagcaaaggtccaagccctgggtctggagtacgtagattaagaagccaagggatgcccttacatgactgagtctttaaatgatcttcagactggaaggtgctttcctgcatcttctaatccagtgtgcttgccacctggtgagaccttacgaggcttcctgtccccctccctcccacagcaggaagctcgtaccccactcccagcattacaggagatacattttaagattgtgagctcggtgggctatgactcgtctagtcatcctggtctctaactctgacccccaaacagcccttgacccacaccgtttgcgttcagtgaacgcgacagatttcctgccccctccgtaaccagatccccaccccaccccgcggcctccgcgttccacaatcaggacgcatttgttaaaaaatgtgccggataattaaaaaaaaaaaaaagaaagaaaaaagaaaggaaaagaaagaaacgtgccggagaggcgcggaacgggcgagggccaggaggccccagcaaagcctgcagaggtttatcccgcccgttacgaggcccaaggccatcgcccggtgaagcggggtgggccctgggcgcggccgctacgtgcagcccggccgcggcgagatggagcgtggtccctggcggccacccggcaagggccggtcgagctctcgggccccgagccattcccaggccctcgcaggccgcccatctaatcccggccacaggggacggcaccgcgccgcaggggcaaccgccctgcctcccggcagcggggcaggccaacgttacgtaagtctccagctgcccccgggccgccgcatcccgcccgccgcgcggggcacccagcccagccctccgcccgcccgccccggacacggggcctcagcaccgcccgagcctgctgggagctgggaggcggtgatggaaaaggggggtgggaccgcgctcggagaccggagcaagtgggcgggcgcgaccagagcagagagggagggagggagcggacacgccaggcgaggaaggggatgcgggggagcggacgtgaccagcaagcagggggaggggcggcgagagggaactggggcgcgggaagggcggtcgcgcatgaatggagaatggacgcgggaggggaaccagaacgcagtttcaatgagttacacagaaagcattagaatcaggggacacgcacagcttgaagaggagggggtggaaggaccagacttaaggaggaagaggggaaaacgagcacggaacaggcggcgcggagaaaggggaagcaagggtggaatcaatcacgagggaccgagagaaggcaggcgaggatggaggcgcattgaggattggggcaggaggaagaggatgggaccagaatgagggggtagggctggggcgggaaaggagccggcggacccgcctgatctggaaggaacggcgctggggacttctgaagagcaggccccaggcgtgaggagccgttctcctctctctgagctccactgcatcccagacgccctggatcctgcgccgccctgcctgcgtgcccggggccggccggcgcgccgggattccgcactagccgggcgactggcccttggtggggactgatggcgtagcctcctgcaccgctcacctccggcgctgaccgactcgggctacgctgcaaagacgaagagatccggagccacggcgcgtgcagctgctgtgcaaggagccactgcctcagcctcaaggttatcccgctgcgggccgccgcaatccctccgccgccccgccctctgcccaatcccggctccgggcgacccgggccccgccccctgcgtccccgcgggcgcagtcaccttcaggaggaagcgcggcggcggcggcggaacgcgcgggcaggttgccctttcggtgggactaaattctgcggcggaaggacacagattcagagtcacattttaagaaacctgatgaccaatggggacgcggcggggcaacggggcccgcccccggagcgactttcctcccagacccccgggcgccgggccacctgttgccgccaagttgggctgccagatggggtgtcttttcttggctctcggcccaggccaccccagctgtcccggcctacctgggcagggcccagatttatgggttccggggcagcattctcccggccccgccctgccactccccactcctccgggtgtctgctctggcgcaccctcggagactgagctgaacggaaagttgggg

SEQ ID NO: 1242291 - DNA, 4001 bp, Homo sapiens
tcaccaggtcctggtcaaagactttcagttccatgacattctggaggggaaaagagtgacagggctgcaggagggaggggacagaaaggtgagcagggcagcggcagtggctggcgaggatgtgggtagagtcagcgctgatgcctggcccaccttgagctgcctgtggatcctgaagtgaaagctctggttccagacagggctactgctgttcttgaccgtgcgtgtctggagcctgtggctgcaggccgtgggcagccagagagtcacgtagcagtcagagggggtcactgcgggaaggaacaagtgcccagcggtggacaagagcccttcccagccgcccagacccacttccttccatcacctagagccccatgtgggttaagactgagggggaggggaagtgggggccagaggcagagccccagctgccaccttccacccagaagctcctctcagctccctcctctaggccctgcccaccggcccacccgcctccaccaaatccagccacagcaccctcctcctcagcaccctcctcctccctcagcccagcacaggggccagggcggtgcgcactcacctaggtccttagagggtaggcgatgggcctgcaggacacgaaccgtgagcaggcaggtcctggacacctctgcctgcagaggtgggagaggggagacctgctacgggccgatgaagccaagggtgacaggggccacaaaggaggctggagcagtgcctcaaggcctaatcctgaaccccaggcccatcctccatctcatcagaatcctgaatcaacaagaggagacatgatatctccatcatgacgcctgccagcacttacacaatgctctgcgccggctctgggccaagggctttgcatacattaactcatttatcgcacaaccaccttatgcacagatactatttacgatggcccactccacaaggaaactgaggcacagagaagcagtcacttgcctgaggtccacaattggggttggagcccgggcaggctggctccagatttatgcctcacacagacctgcttccaccttctcgggctagtatcctttaggctctccaccccacatccccagcccacaccccagctaagcagctttccggctggtcttgggtggcaggggacataagctatcgagggaggggaagtagcacatcagggccttgggccccaggctgagctgctctcgtaccctccctccaccctggtcagaagagcatcctggaaatgggctctctcctgggcaggggaggcggctcctagctcagacccctcacaggctgtcatgtcctccaggtcctgccaggtcaggctgaagatggtcccccggtagctccctccaaacccatgcccctggttctgggaatgcagcctggcaggcgcaccgggaccagggaagcctgtgccaactgcttcctttcggccttccacctgcctccacaaggaccctaacaggtcaagtccagggagcaaccaggtccagggcagtgctggagggcctcatccaccagggtcagcccagggccctcacactccaggcaactgagtcagaggagcatggaggagccacttgcttccagggcctcagggcggcagctgggagcctctgagtctccagggcccaaatctgtggtgccagggagctctgccaggagcccgttcccaggacagaaaacactcaggacggatccctcatccccaagcctcctcctcccctggcttctgcccgctaccctggtcttgtggtcaataaactcccctccctacccctggagaagaccacagctcccataagaaacatattaactaggccccaggtagagaccaggggtcccagtagggacccagggccctgccaggccttaccacagccatgagactgagtcctcaggagcaggaatgatggggcagtggccacaggatcaaggactgtcagctttctaacccagagccagggatgtgatgtcccaattggtcccaagtccctcctacccgccgcctctgctccacctaagctccacacccactcctgaaccagccacctgtccaggaaatgaggcaccctaagcctatactagagctcctgatacctctgtggcactcgccagcctttaccagctgggcctgccccacccagccctgcaatcccagcctggagagcttgctgccaggggctgagcagaaggaaagcaggggtgagtcccagaacagcagccaagggaagagtggagttccctgtcacaggcctttcgcaactctggcacctgttggacaggaatgcccagtcttgatggcagggatccatcaatctgagatgaacacccgggccccctcacgacaggcaggggagtggctgtcacataaaacagcccttcaaagctaggtgctgagtggccagggatgaggcctgtgggttggcactcaggggcagggggttcttctgcctccagggcatggtttgtgggggggtcagcgtgtggagaccaactctttcctcagagggacagccccaggagaggcgggggcttccgtcccttcctgcctgtgcctgttatgggagaaacaggggttatccccagggcaccaggtcccacctgctgcccctgaactgggggaggacagtaaccataggagagctaggaatagctctcaaggtcctgggcaaagaggtccggaccagagagctacaagactcaggtctgcttgcttgtcccagggaggggctgcggtgactctcatggacagcgggacttgggcagctgacggctctttgggcccaggctgggatccagccctcacccccagtgaaggtcaccctgaagtttttacctgaaccttcaggccctccttagaccacagaaggcaacttcaagagggaggatcagaacatacgactcataagccaggcgcagcagctcacacctgtaatcccagcacttttgggaggccgaggcaggtggatcacgaggtcaggagatcaagaccatactggctaacacggtgaaaccccgtctctactaaaaatacaaaaaaattagccgggcatggtggcacgcacctgtagtcccagctacttgggaggctgaggcagaatagtgtgaacctgggaggcggagcttgcagtgagctgacatcacaccactgcactccagcctgggtgacagagcgagaccccatcttaaaaaaaaaaaaaaaaggacatacgactcacagctaccttttattcaacatgtcctgtgtgccagctccatgctggtcctcatagacatcatctccaagcccacaacagccccgcgaggtacagccattattatctctttactgacaggacaccaatgcccgagacgcagtgactcgcccaacatcacagcgctggggagaggtgccgctgcacctgatccccactctgctcacctgtgtggcaacttcctgagaaccctcacccagacctgcctggcaccttgagtccttatgaccacattccaagatcctccaaagctgatctcaagccatgctggacccggggccagcagccagcatgcacactccaggctctctcgagaattgacctggccagggaggggctggctccgtcccccgaggcgtgcttggtggtgttcaccagtgctccatcagtcaaggcctgaagccttggtgagggagtcgagcagctggaagtaactatacttgaggtcgtattccatgtcataccagaaattcactgtgggaagaacggggatctgagcatgaagatccctcttctgacctagagcctcccaagcctccccccagaggccctgctggaccttgacagggcctctccccaggcggcctgggcaactcttcacctgcgatgcagccctgggactgctggacgtggtggaaccacagagccggcagatagagcatctcaccggcccgcaccgtgcagcgaagggcctgggcctgactgtaactagggtaccgtgctaggtct

SEQ ID NO: 1242292 - DNA, 4001 bp, Homo sapiens
ttctgaaagctcctcccatctgaaatacctccttaattgatgactaacccggaggcttctggaggaaattcgtcagcccagtcacctgtaggatcccccgaatgcctccctgctgagggtctcagccactctgaaccttgcgcagggaccccagaggctctgggccatccttcttccggtggagaggcccagggcacacgtttgccaggaagttttgtgagaggctctgtgctgccccgtgcccatcttgggagatgtggcccaagagagcttaagggggttgggtctccccagctggggtccagagtatccttgcccgtgatcctgggtgttcggcaggaagagagaaatgagcagacccaccctgtcgtctgctggcactggcgccctgtggtggggcaatgcaggaggtcagagagaagaggagtggaacccctgggcacagccccaggccctgcacctccctcaggctgggctgagtctcctggaccacacggcaggcacgttccagaacaggtcccggatggccagcctagcctgctggcccaggtcccgctctggggcaggttccaggcccctgttccagcagaaatgaggctaggctaaaccgctgctgaagcttgccaaccacaggaaccgacttgaaggctggagcttgaggacctggtcctggggactcagtcctgtgaatgccagctggaggcgaggtgctttccaggtgtggggccgactgaggctcccaaattgctgacacttaggcttttgttttacccaggagctagacctagagcaggctgagggaaaaggggaaaggggcacagccttcgccagggagatgagtttaaagggggaaatattccagaagcctccacaatgggccgttctgggctcagggctcctgatgggacgggtggtggagccagggccgccagcccctccactggcctgcatccgtggactcccccgcatccaaatgtccgctgatgtctgactcgtgggtggatccacctgacctcaggctggggcaacagtgtggtccttcactgaggggtccctctcatcttcccccagggctccttagtgtctgccctgccccaggctgagcctcttccaggagcaccagtctggagctgcttgtctggatccagcttgggcctgggtctcagggccacagctctagaagcccagcgaggtctgcatatgaggcaaaggacctcaggacagtgaccttgacacacttagcctcattcctggccaccacctggggcaccggggggagacctcaggagccagctctgctggccttggtccctggcagaggatgaaaactctgggctttggagaaacacatgacagagggtgggggggtggcgagaagtttgcaggcctccttggcctggatgcagccccacagctcttgggcctactaaatacttggcagtggatggggatttgggcccccagagctctggagacacacagggtgatcccagggctccagccagttctgggaagtctgccggcctgtggtggtggggctgtgggcctggtgggtctccttttgtgacacacccagccactatgttctccgatgatggtgggggagaggtccctaaggacactgctgtggtcgctggtggtggggagaggaagctctgctgaccagactcacgtttcccagcccccgcatctacggatgctgctcacccaccccacccactctgcatcccaaatctcagactccctcgccctctggcccagtctgaaatcaccctgattccagctatcacacttcccagaatgcaccctggctccaggcctgccctgactggtgcccacatgctctgcagacactgttacctggtaagggtggccaggtggtcccccaggtgacaggctctccatgctagcccttccagcttcactccaggcccagcccttgccaagatgctggctctctggctgagtggcagcgacggtcccagtgggataggaccagcatgaatctgccagccttcaatgagccacgatcctataaacaggttggggctccacccccaggtcgctccttcagccctgcacctgcccctcttccccaagaggctgggtcaaccagcatctccagaaacctctggcagggctccaggacctgcaggcggagcacctcttccagacctggagtttcaggacagaagatgcagccagggggaggcagacgagtcccaggagtggtggcaggaagctggttcccctgaggctgagggcagaggatggggtgggggtagagctgaggaaacccccagctccactggagccagggccagcctctagaggaggagggctgagcacctgagactaggcaaggagccagccctcctgggcagctctgtgcagcagggagttcaggggatgaaaacaagagcagtcgtggtgacaggcccgggctagtgtatcctcctcacctgacctgagcaagctccagggagcagcacaggggtctggacattccccaccacaagcccctcacctccatgcggcgggccctaagaatttaggggatttcaattagactttgtaataaaagtaaaagagaccaatcaggagattcttaggttatgaaaattgtagaagtaaactttgtgaagccacctcaccgcttaaagcattcagtgtacacattagcactgaacgctctcctaaaatgacatgaattcagtcattttaccatcaattctgtaaacagttgaacagcgatgatgttgtttttcaaagcaaatgaaactgagttaatcttaaaatactacaagtggatctaaaatgtattatttcagagttggccaaaacaggaatctaatggtctatgaacaagtaaacattatttgggtggaaatatctgtcatttgcatgatataaaatttaataaaaaaatgaatgtagtggttgagcatggcagctaacgcctgtaatcctggcactttgggaggtcaaggagggagagttgcttgaggccaggaaatggagaccagcctgggcaacatgttgagaccccatctctaccaaaaaaattttctaaattaatggggcatggtggcacgtgtctatggtcccagctactcaggaggctgaggtgggagaattgtttgagcccaggagttcaaggctgcagtgagctataattgcacctttgcacttcagcctgggtgacagagtgatacactgtctctttaaaaaaaggggtgggggggaaagaagtaaatgtaatatgtagaaaactacaaagaacaagtcatttcaagtgggtcacagacaaagcaatacagaatcacccagctggtgactggaaaggctgggattgtactgtctgtcctgaagcccacccaccagaacttccctggtccttggtggcctccattgtttaggcccgttccagaggaatcctgggaccttaggagtcctgattaacctccctgcccctgtcatccccatacgcccgccgggatccgctgggggaacctagggaggcagagccgcagcaacacgttccttgaggtgaccccagccccagcgccccactccagtacgggagggccagacaccccctcacccccagaagacagctggctgtgcctggaggaggacgtggtgctcagtttccccacctgtgcaatgatggtgtggtagatgctgggcctggtgaaaactacgaaattcctaattcagagattcttaatttgggtctagggtccatggatgggaattaggatacttttaaccgtccctgaaattgtatacaaaattatgtgactatgtatgcatgtgtgaatgtttccagagaaggggtctagaacagcacagtccagtaggtgactatgtatgcatgtgtgaatgtttccagagaaggggtctagaacagcacagtccagtatgtgactatgtatgcatgtgtgaatgtttctagagaaggggtctagaacagcactgtccagtaggaatgttctggg

SEQ ID NO: 1242293 - DNA, 4001 bp, Homo sapiens
ttactccgcacatcattttccccatagagggagaaactgaagttcaaagaggctaaggagcttgtctgaggttacagggctggcaaatgacagagcaagggattgaagctggtataactccagagcccgtgctcttcaccacttgaatgaggccaataatttcacaaatattaagccattatgttttcgttgctcccaaaacctttcagctgccacttctaggtgtgagtcaggaggctgaagatgccagggcaggcaagggcaggccattaacctcgttagcaagacagcaggggagacagctcgccccagttcccatccccctccagcgtatcaacagcaggcctagccgatgagacacagagacttctagaacggaggcagagtcaggaagaggaaggggagaagcacctgctcaccggagacagggagactgcagaagatgagctcttgtgggaatggtgggatagtgtggggcagagacatcaagggaaaccctggggcggggctcttgacccctcttcacatgtgactctgggaagtgccaccagcagaggcccgagcctccagtccacctgggttaagggatggaggctgaactcacttttataacaatctcactctctcagttactcactcccatgatcatgacatgaattcatccatgcgggcagcggcctcatgaccaaatcccctcctaagggtcccacgtctcaacactgttgcattggggattaagtttccaacacatgaatgctgggggacatactcccccagtatggaggatggtcccccaatatggaggaccgggtcatccccaagcagccctcagttacctgtgtgatggatgctgtggtaggtatgaagtgggaccttctggatccagacaaggtgactccgtggttggggctcaggatggaccctccaagccaggggccagatagaaggaggcagagaccagaggggtccataggaggtgaggggatcttggccagttctccctgtaagccaggcctcggctggcaggaggaagcgaggctcactccctgcagagctcagtctggtgccaccgctaagaccatagcagccagaggggcagaggaatgctgtcacctccccaaatcactgagagcctcccagaagctcacacgcccgcccagaggagaaactgcacgaggcagacctggatcacctgataattaccttcagatgctgtttgatttctgtagcccactcaatttaccagatgggaattgcgtatttgctcataggtggggtttgcgaggtaagccagatctatgtgttccctccaactctctctgactcgcatggaattacacttacgaccctgccaggccactatgctagactgcatggttcgagagcctatgtgacaggcactctgccaggggcttcacatgcatggtcttgttcactcttctcagcatcgtgttgacaaatatcttccatctcaggtgcccatgaaactagctatgtggccttgggcaggttccttgacctgtctgtgcttcagtttcttcatcaaatgcagatactgattcctgcctagcaatatcagtgcatagaatgcacttgataaaaggtcaccactgttgttaacagttcttttgagcacagagggaggtaaggacagataggtgatggcagcagggtaaagggactcctccggagagaaagaaatgaacaaaaaccacaacctcttaactctgcagcaatgcaggtgatcttattccgagtcaggaaagtgaggttaaaatttaagggaccagacccccctcccaggaacacagacatacctcagagccccaaggagccataggacagaaaggtgggagaccaggagtgtccaggtcctgtgtatcctcgaactcactgaaacttcttcctgacctgctgccttcttcatccgtttgtgggctctgtgggacaaacacattagttcccaggccaggacagccttccgaggcctggagactcatcccagcctcctctctgggactcaggacgggctgtgtggagctgaggctggtcctcaaagtaaggtgttgttggagcctcctggggtaatttcaagggagttttgtgtgaaagggaagcagtgccaccagactcctcctgaagctaagccaggatgaattattaaggagctgaaggaagccagggcttaactaaaggagccccacgtctatctctgtgaatatttcaaaccatctggacctattttgtggagagaaatttcttgcgctgcctgaaagacaagcagggagctagcattatgctcacataggacagttctccgtcaagggaggcctgcgtttcagggctgggatccacgctcagagaaagcttcttagtgctgcagagctatttttaaagtgcgaaactcaatatgtcagtgggagagggagggagagagggctgggggtgaaatggctgaggccatccaggcccctgaaggagcctcactttcctgggtgggtgaagccactcatttgggtcttgcctgacacccccagatctctattttaacccctgaaaataaatacctagccttgtgttcagagctgatggtggggccacaggccagaatagaatttaatcatttactctggctctctttggtttaatagatgccatatctggcagcttaacggggatgtgtcctagttccatgttaaaaacaaaaattaaaaaaaaattaagaacgcttctttatgttctgtttacaactgtttttaacatacatttgaaatgttcatcttcctgtctttctgtgtgctggctctgaggcacccagcatcctctctagttgggagtatcccgctgtccccctctctttctgaggctgtggttttccagtgggtgtctctggcccaaatagccctatcagaaatgaagcaacaggctgggtgcagtggctcatgcctataatcccagcactttgggaggccacggcgagtggatcgcttgaacccaggactttgagaccagtctgggcaacttagcgaaatcctgactctactaaaaacacaaaaattagctgggcatggcgatgcgtgcctgtagtcccagctacttgggaggctgaggtgagaggatcgcttgagcccaagaggttgaagttgcagtgagctgagattgtgcctctgcactccagcctgggctacagaacaagaccctgtctcaatcaatcaataaaccaagcaacagccagacccacacttagactgaccagtcatgtgtttgggtaggagacggttataaagtgtcatttttccgtttgtgctatataggaaaaaatagcttgaatggcagtgctaataaggataaaaggagttgacattcgtcaagcacacacttggttcccttacaaagcaaaggcagtttggaataaaacaataaaaagtaaactttgaaataaaataaatggaaaatgcattgtaaaaatatcagtttggaattgacttgaagagttgccagatctcttccctgcaccacatttcacagtttacaaagcttgttggtttacgttttccatttcttaggggccttgttctggaggtctttactagaagccagtgccggcaagtgactggggaaaaggcaactcttcatggagggagtgtgcagatgccagacatggctataatattttactttttattttgccacaagggagaaaggaagcttgacattggaagaaaaaaagttatgtggatggagatatgtagatacaaaggtgtttgaaatcaagcttccttgaagtcaaagagaaagttatgtgttaagacccagaataatttctgattcaaggtgaagttttagaatgtgagagggagacctggattagactaaatattgataggtgatggtttattgtgcaattaaaaaaaacacaaattatcagttctttatccagtttccagtgagaattacgttcgtgaataatcggtgcaaaataaaaccaacaccagctaata

SEQ ID NO: 1242294 - DNA, 4001 bp, Homo sapiens
ctcccattcacctgaacagaaatcctgcggcagccagttggaaagatcccatggcagcacagaccattaattccagctactgcctgattcaggcagtaaaatcccctccctgtgtgggcactggcatggaaagctccctgagagcgcgtgctgacttgtagccacagcgggcctcacactgtcacccagggcggcactcccaggcacagggaggaggccgagtctgcacagctgtcccctccagccctgcctgccctcacctccatggtcagcaccagtccctccacctactcttgcactcacacacacactcttgcactcatgcacgcacacatgtgtagtactctcacactggcacacacacacgtatatacacacactcgtactcagtcacacacactggcactcactgtcatgtatacagacacacatacacaacacgcacacacgtatacacacatacacactcacgttcacacacactcgcactcacatatatacacttccactcacacttgcactcacacactcctacatgtgtatacacactcgcagtcacatttgcactcacacactcgctcacacttgcacgcatgtatatacacactcgtgttcccacacactcgcactcacatgtttacaccacatatacacgcactcacacacacgtatacacatgtactcacacttgcactcacacatacttgcacagatgcctacacgtatactcacacatgtatacacacatgcactctcacttgtactcacccatgtatactcttacacacacacactctctgttagccagcctgagctgagctctgaggaagccgcagggaaaggacagagagaaggatggagatggggtcactcacgcaggtctgtgccccggatgtttgtggccctcagcaccttcacctggaggtcatagtatgggtaggtttcccgctgcaataacagaactccagggactcagtcagctagtgtgagcctggtccctcgccccattgttcccctcgtcccatcatggagcagcaacctggcatagggtcactgacgtctctgtgccggggagcagggagaccttggcgggtcccaggcattgggagttcagcaccttcgtgatgtgtctggaccctggaacccatccggtctgggttcaaatctaaatccagcacggactcactgaactaacgatggctgtcacgcaccacacacctgcagctcccctcagacgctcgcgcccccactctagcttgggagcagctgtgagagctgtgctaatgttgtgcttgagaagattaaatattaaaagagaaaactgtgacaccccctcccttgcttgctccctgacagaggctcaaagaccgtctaggaggcagcgagcaggtgagcggaagccgagagtcaccggccggccggtaccggtctgacgagtcaccgagcagattgcagctgggcttaggagagataacatcagcatgctgcctactgggagggaaactctcccctcacaaccccaccagctccgtggactctacagccaggctcgcgcatccttggtgaaagccaacccaccccagacaagtgtcaagtgaactaaccctccatttcctaatcggagggagctatttttaagagccaaggtctaatttaagctctgccaggtcatctagaataaacaggtcccaccccaactcaaaacccagggctggggctggtctcagtcttcacagggcactgcagctcccaggactcccccagtccgggtttcccaggtaatctcaggtacgttacccgccagtgcctccacagagggcccctcttctctctcttctgaagcagcactgcccccaggaggggcagcatcttgtctgccagccaccttggccagagtgcccaaagcatggctgggcagcccgggccccagcagggaaccctgcctgcgctcctctggttgcacaaactgctggctcaggtgtgacaggcagcactgagttgggagggtggagctgcctgctctgcagagaactcaggctggatggcctgctggaggtggagtttgacatgctccaggaagtgactggagcttaatttccccaggcaggaggcagctcagtccctctccaagagactcttggggtctctggttagcactcttgttcccaaacccagcgccctggttatcactgggctgtttgtgaaaaatagacaccggagctatttccaacaagacctctaggtgaagctggcacagctggcccagagaccagctggcaagtgcaaatcagggaagagtctcctccagctgtggaaaaggcctgaaactagccacccttcaagtcccaccttccctgcggctcttaagctgaagcctagaaatctctgcttcagtgtttcatctgggatcaaagatgtttctctctttatatatattttctaattatactttaagttctacggtacatgtgcacaacgtgcaggtttgttacatgtgtatacatgtgccatattggtgtgctgcacccattaactcgtcatttacattaggtatttctcctaatgctatccctcccccatgccccctgccccccgacatgccccggtgtgtgatgttccccgccctgtgtctaagtgttctcattgttcaattcccacctatgagtgagaacatgtggtgtttggttttctgtccttgcgatagtttgctcagaatgatggtttccagcttcatccatgtccctacaaaggacatgaactcatcaaagatgtttttaatctctcctgaccaccctcattaattcgccaaacaccaagagcctggtgggtgccagacctgtgctaggcccagaaacgcaaaggtgacagaggtgaggcgggcccatccacatcctggagaaattcagtctcatgactccctgtggctttggcccaggctcgcttcctgggtcagtgtacagtgtccaggtacagacaggcatatgggcagggggttataaataaggacaggccaaacaacaagtctacgtatccttcagcgaccagatatacaggctttagcattctctttggccatcgtaggccttaggctgcagatggatgtgatgttcgctcttctgtggaccacaaccatcaaggtggctgagacaggcacagtctccaggaagagtgaggatctcgggggccgtgaactgtgggagggagagaatttctgtccctcaactaagattcagtcatctccactcttcccaaggcctagagtcacaggctgaaaaatacaacatccaaaaaagatgtgattcaactccaaaatgaaccgaatgggcaagttcagaccagaaactccccccaaaaaaggaatgtgtgactgccagtgaccaggccccaaagaagggcctgtttctgctttatttggattgtgaagccaagacttggcctgggctctaagaaatgagagtctggcagttggtgatagctgtgaatgtatgcaggggacctgcggatccatacaagaggagagggcacagagctagctgggggcagaaccaggctggggctctagctcctgactgatgtgtctttctggctgtaccatcctcttctggaagtcatcggccccactgcacaataaagtcattgcccctagtgccagatgggacagagacaacaaggactacattttctctttggagttggccaaagtgaaccaacacttctccacttcccaaacacctctgcgtccctccatcccaattccttcatcatgggctgcaggaagaggcaccaggtgctactacatgatgggggaaaacacttggatctcccagacgccagtgtgtcccgcagaattctgtaatgatggatgtgttccgtatctgtgctgctgactcatcagccatgaccacactggctgtaccacgtggcatttgtaatgcaagtattatattcattttttcttggtcactaattggcttattcttctaagttctttgctaaactac

SEQ ID NO: 1242295 - DNA, 4001 bp, Homo sapiens
ccagtttctgacatcggactggattttgtgatgaaaagtgaccactggactgtgttacctgagagtaaatataatgtcttgtggccttgcagagtttctttccatggccagggggagagcttctcctaccaaatatattgtaaagaggccatgggagatgaaataaagttgggatttgcttacatcctatgtattctgcttattcaacatggcacagcacacccatgccatccactaactgtgccaaaagcagcctgaaagcagagccctgtctcacagcagcatggacctgtggataggcttgggacattcttgcttgtgcaggtcaggatccagagaacatccaatgccctaccttggagaggggaagggaacagccaggtacacaggtgccagcttaggaagaaggacagtctccgctggccaccaacccccgacctccactgccaccctgtgaccctctgcccagtcaggttacacacactgcccagaggaactgagagaggccacttcgcttttcattctgagccacttccctcattccacaggctcctggggcatgtcacctccatgccactgccatgctacaccaaccccacatcactcctagggaagcaggaagcatctcaccacagggccccaacccatagtcatgggcagcgagatcccctagcctagcccagccccgaagggcctagacccagaccccctcatcccacctcccatcaggtggacaagtcagcactaagggctgtcttccctcccccaccaagccttcatttcccttcctgggacaagcccagcactctaactctcagactgggcgagcccagcagcctcccctccctgaaggagaatctccatattgttctctccagcctaagagaatccctggcctaaggtaacattttcaggggccaggagaaccagagcctgggagcagccccgtgtaggaaggaacagacacagcagagagagggctgcagggtgcagcagtgtcttccccttcccttgctgacaggcctgcatcggggagcaatgctgagcccagcaaggggtagcagaagtcaaatcagctccttccctgggagcagaagcctctagttctcacttaggtccaggggccttttgtggctgcccccacagcagcgcaggggagagcaaggcttccctggacaggatgatgcccagtggagggggtgaaggagctgggtctgagcgccctgccggagcaagggcaagacatctgtgctgggagcggggacgagctcacctctcctcctagcctgcctcagctctggggtgcactttcctcctcttctcttgggggtttgaaggagaagagaagcagacccaaataaactacctccagtgaccacccaggcagctcacccacttctcacacctagaaccaaggcttagccctttagctggggacatacacccttaatcccaggtttgtttatccaagcagtggtgtcagctgcctggccaaaccacacaggcgcctggatcctaggagacataaaccaatcctcccacccaagcaaagccccgtagcagcccggcccccaccacctggtgctccagcagctgaggcccctgccccacttacatcatcccatttgatgaagcgctccccttggctcagataggccttcaccttggggggcagcaggacagggttgagcagagacatggtgccaagcgttcctctttgcagaatctcagcagacacaggcaggcagaagggcaggaaggaggccagccaggagggggagccaagctgggctcaaatggcacccatccccgagctgctccagaaatctagttgctcttatagcccctggggtggccctggctgagtgcaggactgagctgtagccagaggcccatctgccttgtaaatcaccctcctcccacccgccctgcctgccatgggggcctgtggtcactgcttctgcccaaggaggctgaagcaggaagcccccgcctcttctggaggcccccgcccccacccccagccccaccctgtgcctctcagcacttcctgctctgggcttccttctctgcgctgctcacagcggagacgtggtcatgaggccgggtcgccttggagccagggcctctcagtccctgtggtggtctctggtcagatttggcccaggagggctggagaaggacgacatggagaccagctggggagactgctgcccaggcctggactgagggaaggcacagggagctcactaggagaaaggacctcctcaggggaagggtccagagcatgggcatctgaccccaaaggttgggagcaccgtagaggcaggggtggggtggggacagggcccagctggaatggagtgttttgaataagcaaagtttgctgaacacacggctcctctttctcaatgcttcctcccccatgaaaatgaggtgcacctgccgggcgggcgggtgcggtggctcacgcctgtaatcctagcactttgggaggccgaggcgggcggatcacgaggtcaggagatcgagaccatcctggctaacacggtgaaaccctgtctctactaaaaatgcaaaaaattagctgggcgtggcagcggcgcctgtagtcccagctactcgggaggctgaggcaggagaatggcatgaacccaggaggcggagcttgcaatgagccgagatggcgccactgcactccagcctgggcgacagagcaagactccatctcgaaaaaaataaaaaaagaaagaaaatgaggggcacatgaggcaaggcaatcactcccctcacccacctcaccagactcccacctctgggcctctgggactgcctgaggcctggacccccactgagcagccctagcccctgcctccactgcgctctcctctctcctccgtgtgcccgcctctgctgtgtaccccagcctgcagcggggctggggcggagggatggctgctctggttggccaggctcagccccagctgctcaggtgcctgacccacactctgccccaggcccagggagttcagcaccagtccagctcagcccagcccacttcctcttgcctaatctgctcctcttatcgcccttcttagcccagcctgggaggcagggagctctacccaagacttccttcccctctggggcctggccttttgccctgggtcacccccccatggggctttgcatacccccaacaacggtaagaccctcacccaggccctagaattgtcgcggctggaggtctggtccagggcagggtggagggtgagggaggacactcttcatgcggaattaagataataaactgcccagtggaggctggagctaagggaattcccagcacagaaataatctgcagaagagcaattctagggccgggggatggagccggagcagggcctgaccaagcctctggaaatggtaacaattcagaggactcttcttcctcgtttcccccagtcccttagcgtcatctctcctctctccctccctccagtctggggcccttctgggggcccctctggcagcccatgctgttctgggttcctccctgggatcaggttccctcgatatctgtttgaatggattttgcaagggaaatccctgtcccttcccaaagcccctgcacctgtcacctgcggctgccctggtcccggcacccaagtccctccctttcatctgtcctgtagccatcagccccctctccactttgggcctggagagaccagtccattcctccccctcagcctgaggaggaaagggacagcctcctctcctcatttcaggatttcagggctcctcactctgttcctttccatctccagctccgaatccacagaacaaagccttgcccatctttactcagtgatgtcactgcctgcactgttcttgggaccacaactgtagcttcagtgggggcctgtactctcctgctcacatcctgacctcctgcaaagctagctccaaaaatgcagaaaatccaggcagtcaggaga

SEQ ID NO: 1242296 - DNA, 4001 bp, Homo sapiens
tataggctgggtgcaatagctcatgcctgtaaccccaacactttcggaggccgaggcaggcggatcacctgaggtcaggagttcgagaccagcctgaccaacatggagaaaccccatgtctactaaaaatacaaaattagccaggcgtggtggtgcatgcctgtaatcccagctattcaggaggctgaggcaggagaattgcttgaacccaggaggtggcggttgcggtgagccaatatctcgccactgcactccagcctgggcaacaagagcgaaactccgtctcaaaaaaaaaaaaaaagaaaagaaagtgacaatgtgagagattcaggaccaagggtgtacagagctgagccgggcccaggaggtgtccggagaacttcccttaatcaggggccagcgcagatcaggagatggagtaatcctgacccacatcctctgggagcaggggaggggccctggccagagagcccagcccttgcagcaggggcctggggcaggcagatggcagccccacctaacagccagaaagaaaccgcagcaaatcacagaggcctgactttgccccctaccttcacccactgagagaaccggccactgtcaggccaggagtatgaggaggacaggcactatattttgtagaagaggaaatgaaggctgagaggggaagtgacttatctaccatcccacagaaaggcagggcctggcctagagggagccctgacggaccactagctgctcctatccatggccctggaaaagtgggaggtgggcactgaagggacacaggcagtccggtccactcagggcttcccagctggccagggttcccccaaggcagagaacttcatctttcctccccatccaaggaggcaaagacatgccccttcccttgggctgagaggggctgaagctgggaccccctcaggggataagaaacaaattcaccttcctctagacccaacaggcccctcattttaacttaatcattccacaggcatatattaagtgcttgctgcgtgctggaccctcggataaagcggctgctggcagaactgagtttgcaagtaaagggcaggggcaggggcaagacccaatcccaggccaagagtgttttgagtggttagaaggaggctccagggacacagttggtccagccctcgggtggggaaggcagggactaagatcagaccctaggtgggccggactcccgattccttccctacagctagctgctcagatggatgtggagcggggagagagtgggggaaaagatacagagacttatacaagggagaaaaaagcaacttctccaatcctcctgccaccaaagcatggtcacatccttgagacaggaaccccccaacacacacatacacacacacacagagtcaggatccgatccttgagacaggaaccccccaacacacacatacacacacacacacagtcaggatccgacacacacacacacacacacacacacacacacagagagagagagagagtcaggatccgaccacggtaatcggggttcgagcccagtcacccaggccactttcagcaagtcatcaatctcgctggagtctcagtctcctggtcaatccaatgggaacggtaacaaccacgacgccccacaactggtgagaaagtcagcgagaatgaaggaggacgcggtctgcgaagtccccgatatggatccagcccctcgcccctgccccatttgcccaggctcttcctgaggtgagactggcgggagtggggcgggcaggaacgagggcctgagcccaggaccgcaatccccgtgaggggctcgaggaccccagcccaacgccccgccgggccccgccctcacctcctcctccatggcgagtccgccgaggtcccgccgctccgccactcgcttccagcgccgcgcgggctctgccaccgcgtctacgcccggccaggcggcgactctccgcgttctgtcccgccggctgccgggggcccaagaaacttcgggggggcggggccgggggcggggtgaggcttccgggggccggggcggggccggggagggggcggtggggccgggggcccggcccagggcgggaaatgggtggggaggggcggggcctgggttggagactggacggaggagccgggcggagatgcaactggaggaagagggcgggacggggcggagaaggtttcccgcatcggcggagggagagggactaggagggggctgcggcgggggaggagagggggcttccggcccagagactgaggcgagggtggcgggagcggcgcgcaggcagggctggggtggggcgcacacagtgagcgctgggggcgctggcggtggagcctttgaggtctcccgaaccagtgggctggggttgcgagaccgagccgagctgccctgggcggccagagatgtgggcacacagaggctcctcctctttcctccccgacgccgggcagtgggcggtggcctggtcttctccctggaacctctgggcggggccgggcctggagcttgggtctctgtccggagggtggtgtcacaggaagagctggagctgagagtcgggactccggggtccctttagggggcggcccgcccctggctctcaggggtctccaagcgcagtgttctcctgctctccttgggcatcgctcaatccctcccgtatctgagggtcgaccatccccccgatcccgcggtgagcttgcagccctgacagccttactggagagtgggagtgtggggaccagcagagagtaatgattttagttataccatgcgccctcattttacattggagaaactgaggcccagagagagaaagtaactggctgcatcgcagcctgcagcaccgctcccctctcacacacacacgcatactcccccttagctctcctggtcaaccccgtcccatgccaaggaagggaaaattaagtgcatgtgagatcaatggtgaccttcttcggctctggctgccatagcagcggctgtgccagcgaccaagctcccctttcacggccttctgccagccctcaggctcccaggctacttccagccctgtacggaaaagggcagcctggggctcccaggccaagggggaaggagatgcaggtacacttctccctcatgcctaggcctgggatcctttagctaaaggaatgaagaaaattgaggctgatattatcacactggtcaagaaaaagaaagaatagaaaagaaagagagaggaaggagagagagaggaaggagggagggaaggaaggaaaaaaggaaagaaagaaaaagaaaagaaagagaaatgaaggaaggaaagaaagaaaagaaacaaggaaggagagaggaaggaaggacggagggaaggaaggaaagaaaagaaagagctgggagcggtggctcacacctgtaatcccagcactttgggaggctgaggcaggctgatcacctgaggtcgggagttcagaccaacctgaccaacgtggagaaaccccgtctctactaaaaatagaaaattagccaggcgaggtggtgcatccctgtaatcccagctacttgagcggctgaggcaggagaatcgcttgagcccgaaaggcggaggttgcagtgagctgagatcacgccattgcactccagtctgggcaacaggagtgaaactctgtcaaaaaaaaaaagggagagagagagaagggagggagggagggacgcaaggagggaaaagagaaagaaagagaaagaaagaaaggaaagaaaaagagagaaagaaaggaaggaaggaaagatgaaggaaaattgaggctgaggatctgagatagtctgtatatgtagcaacctctttcggccaccacatggttttactccctcaatctgcagagctgtgcagcattctactccaatgatcaaggactcagaagatcttgtatctggaaactcatgctccacctgcagcagaccagagaccctggggaaattcattttgttacacagaagcagc

SEQ ID NO: 1242297 - DNA, 4001 bp, Homo sapiens
tgtcacagatgagcccaagttacttacagggaggtctccatccagcaaggtgaggcctttgttgactgccatcctcgctcctcaagctgcaaaacagagtcccaggtcccatcagaagccctcaggcttgagctccactgggtcacttccctacctctcatggccaccaactaggcccaggctgcctgggggcccatttgccctgaacagaaggcattaggttggagggtgaatatcacacacaatagccccactccttagggtcccatagcaatgagttgctccatagcttacttgtcaagactgatgtttctttctttttcttttctttctttctttttttttttttttgagatggattcttgctctgttgcccaggctggagtgtagttgcacaatctcggctcactacaacctccgcctcccgggttcaagggattctcctgcctcagcctcccaagtagctgggattacaggcgcccaccaccacgcccggctagtttttttttttttttctgtttagtagagatggggtttcaccatgttggctaggctggtgtcgaactcctgacctcaagtgatccacctgcctagacctcccaaagtgctgggattacaggcatgaaccaccacactggctaatttttgtatttttagtagagatggggtttcatcatgttggccaggctggtctcgaactcctggcctcaagtgatctgcccaccttggcctcccaaagtgctgtgattacaggcaagagccaccatgcccggccaagaataatgtttcctataagagttcaggttaagaggccaggcgcggtggctcaggcctgtaatcccggcactttgggagtccaaggcaggcagatcacctgagttcaggagttcaagaccagcctgggcaacatggtgaaactccgtctctgctaaaaatacaaaaattagccagacgtggtggtgggcagctgtaatcccagctacttgggaggctgaggcaggaggatcgcttgagcctgagaggtggaggttgcagtgagctgagatcctgccactgcactccagcctgggtgacagagggagactctgtctcaaaaaaaaaaaggagttcaggttaggaaataaaaaatgcaggtagccataagagataaaaagttttagataaaatcttaaggctcttaaatgagggtccaaaagagactaaaacaagaagtttcaagctgggtgcactggcaagcacctgtaatcccagctactgaggctgacatgggagaattgcttgagcccaggagtttgagatcagcctcggcaatacagtgagatgcccatctctaaaaaaataaataaacaagttaaaggtttcatctttgaaaaggctctgggttaattcctctatttctctctttctctctgtctgtccctctccccctctccctatctgttttttgagacagggtctcaatctgttgcccaggatggaatgtggtggcacgatcatggctcaatgcagccttgacctcctgggatcaaggtaccctcccacctcagcctctcatgtagctgggactacaggcatgcaccacaatgcagggctaattttttctctttttttatagagacaggatcccactgtgttgcccaggttgttcttgaactcctgggctcaagtgatccacctgccttggccacctgcagtgctgggattaaaggcatgatccactgtgcctatccaattcctctatttctagattctggtatctataccagaatctctccctcagtagtttccctgcagagtttttcatccccagcaaaatccccaagaggcccttaccttcaacttcttccctttaatgttcataaacaagccatgtaaggcaggtgccccaggaccccaacactcactccggctgaccgccacctcagtctcacagagcccaggctgcagagtgtctcctcaggcagaaacaattcctgtcactcctgggaggcttgggcaatgctgcttccacctcccagctagaggagggcagagagggagagacaacagggtcagccagttgtcatggttatatgacccagggttccccaggcatatcctaacttctctaaggacatttagcaaacaaggaggtaggtggcagagctgaaggagatccaggctcagaggacttagtattccagagccatgaagcatcagttctgtaatgttcctgccctcaattcacaaaaatctgctttccagaaagaaggtatagggatagacatcattaaactcaaaagctctaaagttctatatacctctgcaatcttttggctccttttccatagagggtcttgtgggagttttcaatccatttctctcatcttttcttatttactagcaagactgaatgctgaacagtaaaatttaaacccacacagaagagttcatctgaatgtattcatctttgattatggagataaattgccctcagtgaagaagcgacagagccgggagttgagtttttgacaatatagcctttgagttgagggaggaattcccacttcttagaattcaaaaaaatttattgaactttacctggcctaagatgctaccagaatgaagagtaggagagccaagtagatttttattctcctgggtctggataagcgacagtgttgactaggattctatcactaatcaagagcacccagacagccaagaattagcaccactcaacccttctttacccaggactcaagcacaagcccaagttctagttcctggctttagatatgatggaggactatggtataagccatagctttcagattaactaagaagggcctcttcatgaaaacagacaataggaaaacaaaacttattttctttgttgctggtggaattatatgtattgttgactctgttaagtcacacagtgtgggcaagagaagaaagaggcaggggtggggaattatgaaagatccttggtaataaattacgtatctgtgatgcaataaagtagggaatgagaaggcaggaaagggaggagtcaagcagggaggcttcaaaggagtaatacgctatacgtttaatacttattgatccaacctgtgcttttcaaatgtaaggcagtagagaagacaaagtatttaaagaagtggcctctgccctcacctcaaggttcagcacaaattatctgtgaggctgtgactggacagcaacctgagccaaagggcagttttcagccttcagagtagtggctttgggccagagggaacatagggctttgtgcctgaaagctctgccaaatcaaatagtcctttggctgctttagctgggagtgcagaatgtgggtgagaggtgagaagtggtgaaagggcctaggagagtcccgagggaagacagaagtgttagttttctagcagtagcttgcagggcatagagttctatcttctttccttctccgtacctacctgctttccctacccctccaccaagtgagagcagggacctaggtcatcttgctcacaagtggatacccaaaaccatgcatggcactcaaacattcattgttgaataaatgaattgtcaggcaacaatgctcagttgtgaatgtgctgggctgtacatctacgaagaacttcttcgatttttggcatccctcatgaatgtggaggctctggggtggaaaacattagttacaaagaaggattcacagggtggtaccaggacaccattaaggtttacacaaacctcttagaagaggtagtatttcccaaactccccaccactcaccattgcagaggacaaaagtaccaagatggataccactgtaacataacataccaccatgaattcaaggcagacttacctaggcagaagccagccagcgattgacagggctactgtagagcaccatctccatggcagcagtctagatgagttcatttcagaggtccctctcaacccagaggctctacatctcaatctttctccatcctcctcctcagcctgga

SEQ ID NO: 1242298 - DNA, 4001 bp, Homo sapiens
gatacaggaatagctctgaaaagctctccttttgtaaaaaagaaaggcatttatatcttaaaagaaaatctacattagtaaaatgatctatattaaaagagggctgctccagacaacttttattatctaagaacttttaatctacatagcaagacaacctctattcaccaaacagctcctctcctcaccctcccataacttgtgttatcaccatcacccagaagctccaagctcttttccgtagctcaggatgttatacaggcttcaatcatctgacctttctttgagtctcatatattgtgggactcctgagtatacatatgtaattaaatatgggttttccgctggtaatctattttatgactatttaattcataggctatttaattcatagcccagccaaggaaactagaagggtggaggcaagccatctttccctcccctatggtttaaagagtacagagtttctggagtaatgaaaaagttctggaaatagatggtggtgatggttacacaatattgtgaatctacttaatgccactgaatggtacacttataaatggttaacataggaacttatccattaggtatattttaccacattttgtaaaatacaaaaacaggccgggcatggtggctcatgcctgtaatcccagcactttgggaggccgaggtgggtggatcacgaggtcaggagttagagaccaatctggccaacatagtgaaaccccatctctactaaaaatataaaaaatagccaggtatggtggcgtggcctgtaatcccagctactcgggaggctgaggcaggagaatggcgtgaacccggaaggaggaggttgcagtgagccgagatcgcaccattgcactccagcctgggcgacagtgtgagactccgtctcaaaaacaaacagataaacaaacaaacaaaaaacaaagcaaaacaaacaaacaacaacaaaaaaaaaccaaagtgcttaatacagtacctggcacatttgaagtgctcataaatgttacctagtattgttaagtaatgttattcttagttgtaataatgtttataaaagttactgtaatacggtgtcctctgtactttcatgaaggggagtaaaagggcctgaaaggcagcagagcaagaaacccaagtagttcctttgtcgggggaggtgggaggtgggcaggaaaggtgtggcaagagaagggttcgttggggaggcttccttaagcagaaaccacatgagctgggaggccttggcaaagatacctcttcagtctgagccagtttctcacctcggatctgggaagttggttttagttttgccgtgcctgggacatgcccctggctccaggccagcgcaacaggggtactacctccatcctccctaatctgaagtcctgcatctgaggcaaagttgaggcagggctcgagggtgggcggaagggcccaggcccggaggccactgacccttctcaccttgcccaactgctcagtggagaaaccgcagcccagcgaggccgccccaactcctccgtgtcctcttttctactctatcctaccctcccttccctgccccacccgagacggtcaggaccctggtgtctggacttcccgctttgtgtcactctctagggtacttgaccaaatcctccgttagaccctctcttcccgcctctccccaccacagcaaaccaacaaagcttaaccccatcatcccctaacccaatagtacctctgtagggctggggctggggctgggctggcggccttcagagggggtctcggggggaggcatggtgggctcctggggccgggcggggtcctgctggggcctcggagatcgggcgggtgcaggctccatggaccccagcttagtttcgattctcggtttagatcttggagtgcgtgaagagaagctgaaggggaggcgtgagccagttggctgagtcccttgagctgtccgaaaggggaggtgccggctcagggcccgcctctggagaggaagtgagacagaagctgggggcggttctagggggcagagaggccgactgtgggttttaaagacacgcccagagcggggaggaggtagaggcggagagctgcagacctaccgctgacttacggtaaagcgggagaggtagggcagagctgcaggggggcagccctgctcccggctttgatccattcatccgttcacactggcactgcttcgtgccacgtcctgccgggagctgggcgtacaaagatgagccacacgcagcccctgctttctaagagccgtagatgtaatggaagagcaagcctgcaaacggagacattctggaaaggagagcccacagctgggacctgcaaaagcagtggaaattcaccagggatttagggttgtaggtggtggggtacgggggacacttgaaacagaaaagatagctcttgcaaaagcctgtttgggaactaattttggccattttcagatttaagagggaattcatgagaaatgatacccaaggagtgtgctaggacaagatcctagctgaggagattgaaccagttctgtgagtgatgggaagttgctgaaggatttggaaccagggaacaacacgatcagctgtgcatgatgggacagtcactctgacaacctaggagcaggtgccctggtctaggacagtggctgtgggatgcagaggagggacttgattcagagatcctgggaagccagtgactggaggtgagggagcaggatgatgccttgagtgacagctggaaaggctggtggatctgaggtggtgggggcaggagggagggggagagctggagagcgggtatgaagagggtgaggggagagccagctaggtcttcgccaatggaaaagcatgtcagactcccagctggtaaggggaaaggggcacagttccaggtgacctcactgggtcagcgccccggcttcaaacttaaaccatcgcaaccactgtgctggctcctgtgtacccattccgtactctgttccaacttagaaacagactagaaaggatgatgatagggcctggctcttgtaaaccttacagtctgcagggtggagagcaggggttgggcagatacgcaacttcctagggactgtaaggcctcaggagcctgcccttccctccagcctggtcagtactcccaggcctttagagaatcagtccatgaaagccaaatatggtgggcagccatctgcacaagggacctggaagtgggctatggcaggatggggcttcggaggccagaggcgattggctgaggaggcagagctggggaagctttattcatttctttgcttgctttggaagatagcctgctcccagactaccccaaagtcctgttggaagttaacacttctcaaaggaaattcacgagttgcattcaggttttctcaagccctggagaggcaagttaattccaggtacctggatcaaggggcatgctctttctggacctgcaggactgagggcctcacctctgtggtgctctggggcccctgccctcatgtagctctgtgctatccccttcttccttacactcccatgctccccgaagtctgcatgtgaaacttctttctttttgtgccaaagttcaggccttcctactccaccttgatcacggtgacctggccaggccattacttaacaaataagtattgagacctgccctatgccagtccctgcttgctgggctgtgggttcacaaagaggaataatttgcagactatgtcccagagaaacccaaagtccagatatggcatgtcctgcctccagtgtgagagaaggagtgctgagaaggctgatatagcatgtccttgatcctggagaagattggcttcctgtaaaccctgatgagatcttgctctctcgctccgactgcagtgcagtggcacgatcatagctcactgcagcctcaaactcctggactcaagagatcctcccgcctcagcctcccaagtggctgggaccacaggcaggcatccc

SEQ ID NO: 1242299 - DNA, 4001 bp, Homo sapiens
aaaggcaccaaatcaccgtgatcttaagtggcctcccgaaggtctcatgtacagcgctctactgtgattctctgcgtggcctttactgcctgacatttacttgggtatttgcttactgcctgtgatcttcccaccagaaagtgagtcccacataaacaggggtctagtcctaattcaacacatcagcgctccctacgtgagcacccagcccgtaacaggacctcagaaaatgttcactgaaacaaactattaagctgggcccccatgcctgcttatgtccccaaccctgcccctacttaccaggccgagggggatatggccaccgccaatgtggggcaagttccctctgccaagcagacctccacgtcgaacaccagggcccgctcctcggggatggccacgggtacggcctccccctcggggccgtaccgggtccagccctccgcccaggcccaagccgggggcttcgggggcagctgggcctgcaacagcaagttggccgcctccaggtagggcaggctctgcttctgggccaggaggcggaagtgctggtccaggttgtccccgtagaggggcggcaggcgcagctccacgtcgggcaagggcacggctggctgcccccagagcccgtgcttctgcaggtgctcgacgctgcggcgcaccgcggcctcgccaggcatctcccctccttgcccgaagatttgctcgtgcagccctctcgagagcatctggatgtccaatgggttgtgccgcagctgcccgccctccgaggatagcacttgcggctgctgaggctgctgttgctgctgctgctgctgctgctgctgctgctgccgccgccgctgcccgtcgctggggtcggacgcggggacggagctggagacccagcgccccggagctggaaccggccctggcccgacggtggcgccggccaccttcctccagagcaggcggctcatggttggtgcagggacccccacgctgggagtcagaacacctggctttgggctccagcttggcttcttttactggctggaagacgtggagagagacacgtcctgtctctgctctcctgtcagtgaaatgggtttgaccatgcctgccttccaccccaaatcctaaaggagacagatgatataaagcgttattttaccatatatgtaataggtgtatccataatcatcattccttgagcatttactgcgtccccaacactgtgccaggcgcttcagttgcattttccgttaagcctcaaaacttgggaaacgtcaatacccctcctgggggaaccggggtccacgcaacttcgtcagtgaacccacgtggggaagccgagggcagcgagtaagagagcagtatctggagtagggcgacgcggttttgaaccccgcttctggctctctcgagctgtgtgaccttgggcaaagctccttaggccctgatatcctattctgtaaaatgggattacggattctgcctgtcacaccgggctgctgtctgggggacacagggcgcctatgtcgtgcggccctgctcttggcaagcgctcggcaaatggtggctgccattaccgcgaccggcgcgggcctagcgtcgagaggtgccagcgcccggattcgaacccgcagggtgggccgccgtcccccgggacccacacccacacccggaccacggcccacccggccgagagcgtcctgcaggaggagtcggcggccacccccgtgcgccccgccgcccgcctgcgcccggcagaggcgccgcggtgcgccctgggactagccgccgccctgctccgggcctcgctccctgactggagagggaggggccgcgccgtcgctcagcgacccggcctccccgccgccgaccccgccggaaacctcggtcctcacggtgcttcccggtctgctgctcccccgaccccaggcccacggcacggcgtcccccttcgcgcggcctacgcagcctcggggtagcgtgtggcctccacccggccggtccgcttcgctggcagccgcaacttcccgtctgcacccagctaggtcccgcggctacccgagaggcaagcgggagactcccagcgcgaccaataggagggccgccaatggagcggtccgcccgcggggggagaagggggacttctgggtgggctctccctgcggaacgcgcgaaccaaaggccaacctccccttctcaaggagcaggtggattggtcccgagctagctggtgggcggaggtgacgtttttataagttgctcaagagacggtaacaaccgacgggccgcgtggcctaatggataaggcgtctgacttcggatcagaagattgcaggttcgagtcctgccgcggtcgaagggaggttatgattaacttttagtttattcctccctcaggaacgaagtattgggacaatgtgaacgtagtcgccgccgattcccaccgcacttcaaagatgtgggaacgccaagatccgcggaagtaaccacgcccagcaagtccctgcgagattgcccgcctacgtgtctcagcggaggcacatttctaaaatgtaccaggtctctcgcaccccgacgcaggtggaggaaagtggagagggaggggcatcctgtacagaaatctcaatttatactcaattgatggttggcaagagttggggctcgcagccaaagcgaggctccctccctcgcccatccggtgctgcctcctcgtccagagcaattctgaggggtaaaaatgttgccttccgttgaacctgaatttgcccgcagatgctagcctccggcccacagcgcggctggagcttgtccccttccccagctgtttccagtctccgcatccgtcttgtgttgctccaggtgcttcaacagctctcagcgctcggtggttggtgaactgtggtaaagtgcacgcagaataaggtctacgtgattaagcaccgcctgggggttggggtctggaggcccagctgcacagatgaaagggaggctcagagacgtttgggaccaaccgagatcacacagctgattaggaataaaattcaggtcaagctgaaagtcggccgccaccgtccagcgtggatcccaggacaccgtgaacggactacagaagttgactttcgcgtttttaaggagtggggtgcagggaaacaatcctccgccggccctgcgggctgatgccgaccctcacctgctcccgccacgtggagaggtagagagaagccccgggccaagcagcattgagccctggtcccttctatttaaatatgaaatattttgcatacacttttctagatgtacttaatatacacaatgttttaatgtttgtgatttttttgttttgccaaaaaaatacaatcaatcagaaattcatctgttttttttttttttttcacataactgttgacttttacaaaatactggaaggagaggctctcagcttaaatcagggagtccctgaatggggaaaacattttcatcttgtttcttctaaccgcctactgatacttggcatttcctccaattatgagcataggctgtcagccacagtggtattaacagtgcctgtgactttgtcccctccagcaaccacagatattttcataacgcattacaagtgctgcacatttttcaaaatttgtttgcacttatctgtacttcaaaataacaggggttactagactgccactagatcctgttagttaataagtttacctatttgtcctaatatttgaatacctttggtgtcctttgtaatccttcatgttttatgtgcttaaaaacactattcttccatataaccaaaaactgcctgtacccctattgaaataaaaattaataaaacatatttcacagaaaaaaattaaaaacagaaacactactctaggccaggttcagtggctcacgcctgtaatcccagcactttgggaggctgaggtggatggattgcctgagctcaggagttgaagaccagtctggccaacatggcgaaaccccatctctaccaa

SEQ ID NO: 1242300 - DNA, 4001 bp, Homo sapiens
aatgcaggaagaatagggaatatatgcctcatttgtctcagcaaattagaatttcagcaaaagtattttaagcatataataatcacataagacattccaagaaccagcagtcattaaagtgcaatctccaaaatttggggatggggtggagtgtggggatgggcctattaggtcaaaactactttcataataatactaagatattatttccctctcattttctcgcatgggtacagtggagttttccagaggctacatggcatgtgatgacatcattgttctagaatagaatgtgtgcttgtgtatgcttatgttttaaagacttcagacgtatttctgataagtaaatacatttcgctagatacaacacataaaatagctctttgggatgtcaataattcttaaagtataacggagtcctgagaccaaaaagttaattcactgctatacattcaaaacctattctcacaaggtcaaaacacatgtcttgatcccaaccaattatttatttgtcccttttgctggatgacagagttccttttctgattcccttttctttaactatacaataaatggaaagaaaaaattacaccttaagtcctctgttctttttgacactacattcatccccacaatttcaactattaacaacactctacagctgaaattcctgttttctgtatttttccagggttctctctttcttgagcctcatgactacttctccagcttttaagtgtttggttttcgattaaccaaatgtctgtcctgctctcctctcaactctgcacaccctaagtaaaatcaaccttggatctattcctctccctgaattttcctatttttgctagtggtcttccatatagattggaaacttcagccatctctgtcaactgcatttaaattagtccatgcttaaaagttctcccaatcccttcctagctcactttcttacaagtgtctcgtgggaagtctctctgaaaatatccttctactgtcttctgctttttattccttcaaaccatcttttgcaacaagctgctgaacaaagctgcctaaaaaacaaaatcacttttattacgtggctcccttgctaaaatccgttcaaccagccagctgaatgagggtcgaactttcccggcctaataaacccctcttcatatcccactcttcccatttcctacggttcctgtaagcttagaatccagagatgaagctgacaatctgttatgggttaggggtgcgggcgacaaaagggtttagaaagcagactcatggaaccaccacagtccccgggtaaataaaaccgaccaggggctactaactccctgcaacgccaggtagccgttcaatccgagctatcctcgcaggcatacgtgcctggccaggaagaggcacggctctgccgcagcaagccctccgtccactcgcccgtaggactgaagcgaatgtgactgagtcaaagtcaccttccagggaagggaacagagtgcgggaggggaggggagcgcccagggagctcgagctgaaggagcctggcggagactccgcgggaccccagcttactcgttgcgcaaaagtctctcctggcgcttcaacatttcccgcagctccaccaaactccgctgcgccaagtcctcgggagcttggggctcgaagccgcggggcagcgagcacattctgcgcgggctgaggctggcgcggcggcgggcactcggcttcctcggcaggccccgctactagcgccggatccgcggacggcggtgactccggggcacgagcgggagtcgccattttcccggaagaacggggtcttcttcgagccgaatcgagctttattgaaattccggaaacaaacacggactgggagaagggggcgtccgcaggagcgttaaagggcggaagttacgtcggatgacgccggctccttggcttggcgccctttccccttgtgtgagcattcatgcggtcatcagctgttcgtcggtttatacaaaaagtattcagcgccagcgtgacctcaccaagcactatgtgtcagtcaacaaatagcaacgtcctgtgttatacttggggtttacagagttggcggggggatggggggagggagaatcaaattatgatataatagtaacgttgggatgggcacctgggaagatatctctgagaagtggttcaagtcgaaacttgaaagatgagctggccattaataaggtgggagagagtgcgggacaggatttgggagactctggcctgtgcgtggtgcctccggcctgtgcgtggtgcctcctagctcagcttagggacgtcctgaaattgttaaagttggaaggttcctcagaatcagcgatttttcttggggctcaatgcatttggagaaggacttcatttgtagcaccgcctcaagcattgttaagacatttggtgtttctggcttctgcctgctaggtgctatggcactcccaagtcattgcaacaatccaaaatgtctcctccaacatacatttccaaaggcccacaagaggtgatgagggagtgggagcagctgtacaaactcgttgaggaccttttcgaattttctactttgcctatagaaaaacagaggcatgaaaactgaaataaatattcccagggcacaaaaccagtaagtgacagcaccagatttcaaactcaaaagcccagccccttttccaacacaccaatttgaaaatccccttcttcactttaggcctatttccaaatgtgtaaaactgttgaaaagacttccctccgcccccccccacccccgccacctccccagctgttgagaagaaggcagcttaataggtattggacacagcttttaccttctcgttatagttcagctaccagaggtgcatcccagtggaaagagtaggaagacatgcagtcacagcagatgtcacttgggaggtttgaacacccccataacccaccgccctcccccgattttttgatataggaaattgaagttgtctcaatcctgtgtaagatgctatataaacacaagcagctctgtcctaaagagacagaagatctaggtaaactccaaagctattccagggagcacaattgcaaccatttatctatccccccaatctggtccattctgatcagattcattaatatatcaaaataagttttctctgtataagacttgctttcaaggacgttaataacgtgctgcagcattggctgaatgagaaataggtaaggtcctcgagtcaggtggttgtctgtggtactgacaaaaaaaaaaaaaaaagactccgtaaaatgttgaagagatgtattctgtgccaaatatgagtgaccatggcccgtgacacagccctcaggagatcctgagaacacgtgcctaaggtggttggtgcacagcttggttttatacattttagggagacatgagacatcaatcaaatacatttaagataaacattggcttaatccacaaaggtgggacaactcaaagcagagcgggtgtggggcaagatgggctcccaagttataggtaaatttaagtttttttctgattggtaattgatttaaaggaatgtctaggttagcataagaacttgtggagaccgaaattttatcatgcagatgaagcctccagttagcaggcttcagagaaagtaagttgtgtttcttatcagactcaaggtatatgtgttgatattaaatgctgtgtagcttttcctggattctaaaagaaagaagggcataatgaggcatgtctgacctcagcttcccatcatggcctaagccagtcttttaggttaaatttggaggaccctggactacaggaggaagtccattcagacggttgagggcggaccttcaaattttatttttggtttacagtgataagcaccccgcaagcctccctcaccccacccctggaccccagctggaggcctttatttctcccacagtagtgaactccccatgtgctgattgtaggccacaggtgtccccaaggc

SEQ ID NO: 1242301 - DNA, 4001 bp, Homo sapiens
acgggtttcaccatgctggccaggctagtatcaaactcctgacctcgtgatccacctgccttggcctcccaaagtgctgggattacaggcatgagccaccatggctggcctttcattcctcttctaacttaaacagaaaatagtctttcattcctcttctaacttaaattccttctcttagcaggaatgctatgttttcctatgtacacaggtcactggtagacatgcaaaaaagtaccttgcccaattttaaattgagcttattttattatatctgcatatatatgccggtttcagtggctcatgactgtaatctcagcactttgggaggctgaggtgggtggatcacaaggacaggagttcaagaccagcctggcaaagatggtgaaatcccgtcttgattaagaacacaaaaaattagccaggcatggtggtgggtgcctgtaatcccagctacttggtaggctgaggcaaagaattacttgaaccaggaaccagaggttgtagtgagctgatattgcaccactgcactccagcctgggctatggagtgagagtctgtctcagaaaaataaataaatatttgcacatataaataggcatttgtgttttcttctggtacttttctccttttgtatctttaaaatttttaatctatactccaggaacttatttttgtgacataaaaatctaggtagttttctccaaacagcatgcatttaatttatgaataattcaccttgttttaccaatatgaaacatcaccattatcaagtgctaaattcttacatatatttgggtatttctggatttcctattctgttctgttcacttatgtcttttcagctgttagtaaacaatttgtggaaataacacacgcacattttgatatctggaaaagcaagtctttttccattctgttacaaaaaatcaatttatcacaatgataaaatacatcatgtgcaatttaaagacactaagactttgctatttttatttggcttatgtaaaagtgataaacacagaaaaagctcacatcttaagaaaaacgaaccttcctattcaaagatatgaaccatacttcccatttcagtttccttttaaggttactcagtaaagaacgtgtttacatagggtacacatcgatataaaatccatattggattttatttgaaaaatatttagcccagaagttgatatattatgggacttagttctcaatatacacctttctatagtgtatagaacattgttttaaaatgtgtacattaaaaataatctgctgcatcgacttaattttgcgagttaaatcactttaaaaccgtctattagtgttctataagggaaattataattggattggaaatcagctaaagttttgtttttgtgttgctgtttataaagggacctgggccctgacatctctgaggtttccacacccagggtggtgtggggcctgcggaggaagagaaagcctggctcctccctccctgcgccaggagggtatgtccccatcatccccccatgtcccgcctcctcccatcccaggcccggttacctcttttgcttgtccctcttgttcatgtcagtgtccctgagcatgacgatgagatcctttctggggactttaccccaccaggcagctctgtggagcttgtccagatcttctcgacggacgtggtacctcggctccatgaaggcgctgtcgtcgtagtctccccaagtgcccacgttgctcttgccgctccccctgcagcaggggaagcagtgacagcaccacttgcccatcttgctcctgagtgtcttcataaaggagtcgtcatggtctccagaagtgcccacattgctcgtgccgctccccctgcagcaggggaagcggtggtggcaccacttgcccatcttgctcctgagatcaaatggcttcttcacagcagaggcagcgggcattgaacaaacctcagccaccatctgcttttaacagccaggggaggccggtagtagcgaacagatcgcgtctaccaaccagtttcaccaactagcaggaaaccctgggtttccaatctgtttgaagagaaaggtcaatcccagccaaaacttgccaaccccagcaagggagcccagcccaccccacccagggaaaacccacacccacccggggaaagcccacgcccaccagggggaccccacgcccaccccaggaaaggccaagccccccctcccaaggaaacacccagcccagtcaagggaatgccaaacccagcagagaaaaggtcaagtccagcaaaggaatgcgagggaggaaacgccaatccaagcaagaaacaccaggcaaagctactaacagccaagccaagctaggaacgcaaggccaagcgaggaacgcgaagcgaagcgtacccgttacaggtaagccaagccgttatgcgcgtgcggggcgcgcgtgcggggcgcgcgcctcagacgttatgcggcgtgtgcgtgaggcgtgcgcgtgtcattgcacgtggtccaggaagtggccgatgtgtgcaatccgcgtgcgcaagtcttggcgccacaaatgtcagtgacagccttgcgttactggcaaagttcatgggagttggcccagctttctggccactgaggagagaagcctgtggtgggaaaaagcctcttgaagcaggactggggctagagcgcctggaactcgaggatgctgacagcctcctctgaagaaagcccccaagacactagtggtggcgctgttgcgggtggccgccgctgcagcttagagctctggttggcggagctggatgcaaatggcctcaaaatctccaagcacaagacgcccacggagcccagggcctgcctgaggcgccttccacacctgctcctccttggtccgcacccagaacacagggccatcagcaacggggcactcggggccacagaatcggggctgggctgctagctcctgctgtggtgccccctgcctggtgtccaaaccagggccaacagctgtggggcttctggcccggggtgcttcgcttcactggcatgcagtagggttgaggtgcaggccgctgtctccaggcctgcaagagggggctgggaggagcacctaccactgatggggagatgcaggaaggcacccccacgtgcagatcctgggaacaggacactgccagcaccagggagccagatcggagcctccctggcagcctgtgagctggacccaggcagtggcacctctaccctcctgctgggaccctcctgctgtgcaggcttatgcagccaggctccaggctgcttcacccatactgcaggtgctttggtgtgggaggaaaaatgcattctggccgggcactgtggctcacgcgtgtaatcccagcactttgggaggctgaggcgggtggatcataaggtcaggagataaagaccatcctggctaacacggtgaaacctcatctctactaaaaatacaaaatactagcgggcatggtggtgggcgcctgtagtcccagctactcgggaggcaggagaatggcgtgaacctgggaggcggagcttgcagtgagcccgagatcgcaccactgcactccagcctgggcgacagagcgagactccgtctcaaaaaaaaaaaaaaaaaaaaaaaaaaagaaaagaaagagagagagagagagacagagacaaagacagagacggagacagagagacagacggagagagagaaaaatggattctaagcctgggacaccgacctgctcctgccaacaaaagcagaggggaagccaattgcaagtgcaaaaaaaaagtttttatttcagtgggatgaatgtctaggtgtgcagtcactggagtaaacgtcactgggacatgctgtgtaattctttgtgtacattgctgagttctactgctaatgttagcccatttcattcatgaaattggtaatttatgacatcccttttttctttatcattattagttaaggtttgtcaattttatagatattttcaaaga

SEQ ID NO: 1242302 - DNA, 4001 bp, Homo sapiens
acgggtttcaccatgctggccaggctagtatcaaactcctgacctcgtgatccacctgccttggcctcccaaagtgctgggattacaggcatgagccaccatggctggcctttcattcctcttctaacttaaacagaaaatagtctttcattcctcttctaacttaaattccttctcttagcaggaatgctatgttttcctatgtacacaggtcactggtagacatgcaaaaaagtaccttgcccaattttaaattgagcttattttattatatctgcatatatatgccggtttcagtggctcatgactgtaatctcagcactttgggaggctgaggtgggtggatcacaaggacaggagttcaagaccagcctggcaaagatggtgaaatcccgtcttgattaagaacacaaaaaattagccaggcatggtggtgggtgcctgtaatcccagctacttggtaggctgaggcaaagaattacttgaaccaggaaccagaggttgtagtgagctgatattgcaccactgcactccagcctgggctatggagtgagagtctgtctcagaaaaataaataaatatttgcacatataaataggcatttgtgttttcttctggtacttttctccttttgtatctttaaaatttttaatctatactccaggaacttatttttgtgacataaaaatctaggtagttttctccaaacagcatgcatttaatttatgaataattcaccttgttttaccaatatgaaacatcaccattatcaagtgctaaattcttacatatatgtgggtatttctggatttcctattctgttctgttcacttatgtcttttcagctgttagtaaacaatttgtggaaataacacacgcacattttgatatctggaaaagcaagtctttttccattctgttacaaaaaatcaatttatcacaatgataaaatacatcatgtgcaatttaaagacactaagactttgctatttttatttggcttatgtaaaagtgataaacacagaaaaagctcacatcttaagaaaaacgaaccttcctattcaaagatatgaaccatacttcccatttcagtttccttttaaggttactcagtaaagaacgtgtttacatagggtacacatcgatataaaatccatattggattttatttgaaaaatatttagcccagaagttgatatattatgggacttagttctcaatatacacctttctatagtgtatagaacattgttttaaaatgtgtacattaaaaataatctgctgcatcgacttaattttgcgagttaaatcactttaaaaccgtctattagtgttctataagggaaattataattggattggaaatcagctaaagttttgtttttgtgttgctgtttataaagggacctgggccctgacatctctgaggtttccacacccagggtggtgtggggcctgcggaggaagagaaagcctggctcctccctccctgcgccaggagggtatgtccccatcatcaccccatgtcccgcctcctcccatcccaggcccggttacctcttttgcttgtccctcttgttcatgtcagtgtccctgagcatgacgatgagatcctttctggggactttaccccaccaggcagctctgtggagcttgtccagatcttctcgacggacgtggtacctcggctccatgaaggcgctgtcgtcgtagtctccccaagtgcccacgttgctcttgccgctccccctgcagcaggggaagcagtgacagcaccacttgcccatcttgctcctgagtgtcttcataaaggagtcgtcatggtctccagaagtgcccacattgctcgtgccgctccccctgcagcaggggaagcggtggtggcaccacttgcccatcttgctcctgagatcaaatggcttcttcacagcagaggcagcgggcattgaacaaacctcagccaccatctgcttttaacagccaggggaggccggtagtagcgaacagatcgcgtctaccaaccagtttcaccaactagcaggaaaccctgggtttccaatctgtttgaagagaaaggtcaatcccagccaaaacttgccaaccccagcaagggagcccagcccaccccacccagggaaaacccacacccacccggggaaagcccacgcccaccagggggaccccacgcccaccccaggaaaggccaagccccccctcccaaggaaacacccagcccagtcaagggaatgccaaacccagcagagaaaaggtcaagtccagcaaaggaatgcgagggaggaaacgccaatccaagcaagaaacaccaggcaaagctactaacagccaagccaagctaggaacgcaaggccaagcgaggaacgcgaagcgaagcgtacccgttacaggtaagccaagccgttatgcgcgtgcgggggcgcgcgtgcggggcgcgcgcctcagacgttatgcggcgtgtgcgtgaggcgtgcgcgtgtcattgcacgtggtccaggaagtggccgatgtgtgcaatccgcgtgcgcaagtcttggcgccacaaatgtcagtgacagccttgcgttactggcaaagttcatgggagttggcccagctttctggccactgaggagagaagcctgtggtgggaaaaagcctcttgaagcaggactggggctagagcgcctggaactcgaggatgctgacagcctcctctgaagaaagcccccaagacactagtggtggcgctgttgcgggtggccgccgctgcagcttagagctctggttggcggagctggatgcaaatggcctcaaaatctccgagcacaagacgcccacggagcccagggcctgcctgaggcgccttccacacctgctcctccttggtccgcacccagaacacagggccatcagcaacggggcactcggggccacagaatcggggctgggctgctagctcctgctgtggtgccccctgcctggtgtccaaaccagggccaacagctgtggggcttctggcccggggtgcttcgcttcactggcatgcagtagggttgaggtgcaggccgctgtctccaggcctgcaagagggggctgggaggagcacctaccactgatggggagatgcaggaaggcacccccacgtgcagatcctgggaacaggacactgccagcaccagggagccagatcggagcctccctggcagcctgtgagctggacccaggcagtggcacctctaccctcctgctgggaccctcctgctgtgcaggcttatgcagccaggctccaggctgcttcacccatactgcaggtgctttggtgtgggaggaaaaatgcattctggccgggcactgtggctcacgcgtgtaatcccagcactttgggaggctgaggcgggtggatcataaggtcaggagataaagaccatcctggctaacacggtgaaacctcatctctactaaaaatacaaaatactagcgggcatggtcgtgggcgcctgtagtcccagctactcgggaggcaggagaatggcgtgaacctgggaggcggagcttgcagtgagcccgagatcgcaccactgcactccagcctgggcgacagagcgagactccgtctcaaaaaaaaaaaaaaaaaaaaaaaaaaaaagaaagagagagagagagagacagagacaaagacagagacggagacagagagacagacggagagagagaaaaatggattctaagcctgggacaccgacctgctcctgccaacaaaagcagaggggaagccaattgcaagtgcaaaaaaaaagtttttatttcagtgggatgaatgtctaggtgtgcagtcactggagtaaacgtcactgggacatgctgtgtaattctttgtgtacattgctgagttctactgctaatgttagcccatttcattcatgaaattggtaatttatgacatcccttttttctttatcattattagttaaggtttgtcaattttatagatattttcaaagaac

SEQ ID NO: 1242303 - DNA, 4001 bp, Homo sapiens; identical to SEQ ID NO: 1242301

SEQ ID NO: 1242304 - DNA, 4001 bp, Homo sapiens; identical to SEQ ID NO: 1242302

SEQ ID NO: 1242305 - DNA, 4001 bp, Homo sapiens
ccagctacttggtaggctgaggcaaagaattacttgaaccaggaaccagaggttgtagtgagctgatattgcaccactgcactccagcctgggctatggagtgagagtctgtctcagaaaaataaataaatatttgcacatataaataggcatttgtgttttcttctggtacttttctccttttgtatctttaaaatttttaatctatactccaggaacttatttttgtgacataaaaatctaggtagttttctccaaacagcatgcatttaatttatgaataattcaccttgttttaccaatatgaaacatcaccattatcaagtgctaaattcttacatatatttgggtatttctggatttcctattctgttctgttcacttatgtcttttcagctgttagtaaacaatttgtggaaataacacacgcacattttgatatctggaaaagcaagtctttttccattctgttacaaaaaatcaatttatcacaatgataaaatacatcatgtgcaatttaaagacactaagactttgctatttttatttggcttatgtaaaagtgataaacacagaaaaagctcacatcttaagaaaaacgaaccttcctattcaaagatatgaaccatacttcccatttcagtttccttttaaggttactcagtaaagaacgtgtttacatagggtacacatcgatataaaatccatattggattttatttgaaaaatatttagcccagaagttgatatattatgggacttagttctcaatatacacctttctatagtgtatagaacattgttttaaaatgtgtacattaaaaataatctgctgcatcgacttaattttgcgagttaaatcactttaaaaccgtctattagtgttctataagggaaattataattggattggaaatcagctaaagttttgtttttgtgttgctgtttataaagggacctgggccctgacatctctgaggtttccacacccagggtggtgtggggcctgcggaggaagagaaagcctggctcctccctccctgcgccaggagggtatgtccccatcatccccccatgtcccgcctcctcccatcccaggcccggttacctcttttgcttgtccctcttgttcatgtcagtgtccctgagcatgacgatgagatcctttctggggactttaccccaccaggcagctctgtggagcttgtccagatcttctcgacggacgtggtacctcggctccatgaaggcgctgtcgtcgtagtctccccaagtgcccacgttgctcttgccgctccccctgcagcaggggaagcagtgacagcaccacttgcccatcttgctcctgagtgtcttcataaaggagttgtcatggtctccagaagtgcccacattgctcgtgccgctccccctgcagcaggggaagcagtggtggcaacacttgcccatcttgctcctgagcgtcttcataaaggagtcgtcgtggtctccagaagtgcccatgttgctcttgccgctccccctgcagcaggggaagcggtggtggcaccacttgcccatcttgctcctgagatcaaatggcttcttcacagcagaggcagcgggcattgaacaaacctcagccaccatctgcttttaacagccaggggaggccggtagtagcgaacagatcgcgtctaccaaccagtttcaccaactagcaggaaaccctgggtttccaatctgtttgaagagaaaggtcaatcccagccaaaacttgccaagcccagcaagggagcccagcccaccccacccagggaaaacccacacccacccggggaaagcccacgcccaccagggggaccccacgcccaccccaggaaaggccaagccccccctcccaaggaaacacccagcccagtcaagggaatgccaaacccagcagagaaaaggtcaagtccagcaaaggaatgcgagggaggaaacgccaatccaagcaagaaacaccaggcaaagctactaacagccaagccaagctaggaacgcaaggccaagcgaggaacgcgaagcgaagtgtacccgttacaggtaagccaagccgttatgcgcgtgcggggcgcgcgtgcggggcgcgcgcctcagacgttatgcggcgtgtgcgtgaggcgtgcgcgtgtcattgcacgtggtccaggaagtggccgatgtgtgcaatccgcgtgcgcaagtcttggcgccacaaatgtcagtgacagccttgcgttactggcaaagttcatgggagttggcccagctttctggccactgaggagagaagcctgtggtgggaaaaagcctcttgaagcaggactggggctagagcgcctggaactcgaggatgctgacagcctcctctgaagaaagcccccaagacactagtggtggcgctgttgcgggtggccgccgctgcagcttagagctctggttggcggagctggatgcaaatggcctcaaaatctccgagcacaagacgcccacggagcccagggcctgcctgaggcgccttccacacctgctcctccttggtccgcacccagaacacagggccatcagcaacggggcactcggggccacagaatcggggctgggctgctagctcctgctgtggtgccccctgcctggtgtccaaaccagggccaacagctgtggggcttctggcccggggtgcttcgcttcactggcatgcagtagggttgaggtgcaggccgctgtctccaggcctgcaagagggggctgggaggagcacctaccactgatggggagatgcaggaaggcacccccacgtgcagatcctgggaacaggacactgccagcaccagggagccagatcggagcctccctggcagcctgtgagctggacccaggcagtggcacctctaccctcctgctgggaccctcctgctgtgcaggcttatgcagccaggctccaggctgcttcacccatactgcaggtgctttggtgtgggaggaaaaatgcattctggccgggcactgtggctcacgcgtgtaatcccagcactttgggaggctgaggcgggcggatcataaggtcaggagataaagaccatcctggctaacacggtgaaacctcatctctactaaaaatacaaaatactagcgggcatggtggtgggcgcctgtagtcccagctactcgggaggcaggagaatggcgtgaacctgggaggcggagcttgcagtgagcccgagatcgcatcactgcaacctgggtgacaaagcaagactctgtcaaaaaaagaaagagagagagagagagacagagacaaagacagagacggagacagagagacagacggagagagagaaaaatggattctaagcctgggacaccgacctgctcttgccaacaaaagcagaggggaagccaattgcaagtgcaaaaaaaaagtttttatttcagtgggatgaatgtctaggtgtgcagtcactggagtaaacgtcactgggacatgctgtgtaattctttgtgtacattgctgagttctactgctaatgttagcccattgcattcatgaaactggtaatttatgacatcccttttttctttatcattattagttaaggtttgtcaattttatagatattttcaaagaaccagctttatttctttgcttttctttgttgttttcttttggctgtttcatttatttctgctcttatccttattatattctttcttatatttgttttgattttattttgctactattttctactttcttgatgtgatagcttgaatttttatttgagagatttctacttttctattatatatatttagtgaaatacattttcctctcagcactgacgtcaactgtgttaaatcaagtttgatatgttgtatttttatttttattcagtttaatatatttaattgtttcccttgagacgttctccttagaagtgtgcttgctgtttagcactattcacaatagcaaagacatggaatcaacctaaatgccc

SEQ ID NO: 1242306 - DNA, 4001 bp, Homo sapiens
ctccagaaagacagggacagacagagcaaagagcctcagcttgtgatgtttaagtctcctctgatgagtttaattcagggcagagttttaggtttcagggatacctgccagtccctatatgggcaaaggtggagctggcacagaaccagactaaagacagagcaaggaaagcaaggccagacagggtatacgttcaagctcaatacaggaaggatgagaactgagcctaagacaaagcagaaccaaacaagggaagtgggtggtgggtaggcagggatccaagatccattatgagcctgaatcctttagcctaacatcaaagcccctcactaccggctgcccaggcttctgctccagcttacacctgtaatcccagcaatttaagagggcaaggtgggaggattgagcaaacccaggtactcgagaccagcctgggtaacatagcaagaccccatacaaaaaatttaaaagttagtgaggtgtggtggcacatgcctgtggtctcaactacttgggaggctgaggcaggaggatcgcttgagcctagaaggctgcagtgagccatgtttgtgccactgcactccagcctgggtgacagagagagaccatttcaaaatataataatagtaccacaaaaaaaaaaaagtgtgtagctatttacatagcatttacactgtatcaggttttataagtaatctagagattatttaaattatatggagggcgtggtggcacgtgcctgcagtcccagctacctgggaggctgaggtgggaggattatctgagcccagggagttcgaagatgcagtgagctatgattgcaccactacactccagcctgggagacaagagtgagaccctgactcaaaaaaaaaaaaagaaaagaaaaaagagtatacaggagggtgatgtggtggctcacacctgtaatcccagcattttgagaggccaaggaaggaggatagcttgagccaggagtttgagaccagcctgggcaacatggtgagaccctgtctctacaaaaatgaaataaaataaaaattagccgggtatggttgtttatgcctgtggttccagctacacaggaggctgaggcaggaggatcccttgagcccaggaggtcgaggctgcagtgagccatgttcctgccactgcactccagcctgggtcacagaatgagaccttgtctcaaaaaaaaaaagtatacagcaatcccctgcggatactgagggataaatgtatctaacacacacactcacacacgtgggctactagaaaggcagtgactgcgaattgctacttcccagccactgtgagagatgtggaaacccctgctccaggacaaccaccacttccccaacttggcaacctctcctgctcaccatctagcacctgcttccaaatacttcaaggacagcaggaagttcttttctgacaagatttggcctaatttttaaatagcactcagcactttttggcaggcctagggctacttccaacatcccatggctttccttttttaattttaccaactttttaaatacactttgtactttgggcagcccgggtaagcgttcagtgtgaggagctgacacggccatcatttaaactagattaaacgacactggacaaataatcgcagagcagcacaaagtcgggctggacgggtacagatgcaaaccctccactcagggctcgggggtccctcctgctccaggcggccccacccgtacagccgggaaagtgaggtcgcacagatggacggccgcctacccacgcacagtcgcaaacagagcttcatgggcacacaggggaaaataaggacacacacagacagccgtggacccacgctcgcggacacagctccccgaacctcccctcccgcgccgccgcgagaacccagcttcccagcccccttccactgctcacccgcgccaggcgcgtctcggggccgctcccaaatatcgcggtatctctgccgctctcccgcggaatctgactggcacgcctcacgagagcaccgggctggctgtatgtcgcgcagccttctgggagctgtagtccacttctctgccttccgggagttgtagtccactggggaaatcctggagcaaaccctggccctgttctttgtattgctgggactctcgataggggctggcataactgtccgacctcctttcctcactcctatcagccccacacacactgcttgttgcttggggcctttttttttttttttttttttttgctgttgtcccaggtttattgaaaatattacagtatctcaaaaagattcaaacagcttccacgtggcgttttgaaattcatccccactgttggctgagtgacctgcaggttggacagactgccaaagtccaaaaacatcagcatttccttaatgtcaggatatgttaatacttcaatgatttcctgatccagggctgagacctcaggaacatgattatctctcctttctctcttctcctcctgcaacttgatgcagatacctctcactgagcgcttcaaatcagcttcatcacatgcatgttgtagcctgctatcttgttggggagctgtttttttttttgtttttttttttttttttgagacagggtctggctctgtcacccagactggagtgcgcagtggtgctatctccactcactgcaacctccaccttttgggcttaagccatcctcctatctcagcctatggagtagccaggactacaggagtgcaccatcatgccagactaatgtttgtattttttgtagagacgggttctcactctattgcccaggctggtctcaaactcctaggctcaaacaatccgcccaccttggcctcccaaagtgctgggactacaggagtgagccaccacgctcggccctggggagcattttgctggaaataatggtgatctccttgcacatgtgttgtttgtgtggaagttgctgcccgggtgtgtgtattacttttttatgacgaagtatagaaaagggctatcttcatggtattagtgtgaatggggcccatgttggcaggtccttagtaaaagagggctcgtggcacttaatatttaccaagcctcttctattttaggtgcacaggatacagagataaatcagatgcgtccctgttcttgagacaaacagggacacagaaaatgacagggtaagatcctccatgaggaagcaacacctctaggcaggaaagccttcttgaaggagtgacttgaaatgaatcttgaaggacagccaggaggttagatagaggatcccaatagcgatccaggtggaaggcatcaaatgggcaaagggaaggcggcagaagaacacacactggcatgcttccctgcccccttcattttctagccttcacaggccccaggaacctctgtattcattgaggtggctgaaccagctgcgggtcccctgccctgagctgaggtggggcctctgctctacccccgcccttagccgcagtggaccatctgggccaaaccatcccttacgcagggatccagccgtgtcttttttttttgagatggagtcttgctgtgtcgcccaggctggagtgcagtggtgcgatctcggctcactgcaagctccgcctcctgtgttcacgccattctcccgcctcagcctcccgagtagctgggactacaggtgcctgccacctcgcccgcctaattttttgtatttttagtagagatggggtttcaccgtgttagccaggatggtctcgatctcctgacctcgtgatccacccgcctcagcctcccaaagtgctaggattacaggtgtgagccaccacgcccggccgatccagcctgcttcttctacttcctcctcccaaggcagggggcctaggtggcaatttcatcacctactgaaggctgcctcagagaaggagccacacagggtcgtatagctctaggtctcggggaatgacagaccacagatccacccaccccccatactttcatgcccctgccc

SEQ ID NO: 1242307 - DNA, 4001 bp, Homo sapiens
cagaacagaccccagtacagtacgtggtaggcgaaagctcaataaatgaggtggggggtggcaattagggagaaggaggagagaaatcacacccaaatcttcccaggacgatcatataaacaaaggcagctcccctttaagggcaacagctccctggaggcatcttaggcctaggacagtgcccactttggacagctggacttccatttctccctaccacccatcggctctcgccactgccccgtctttctcccctcttcccctctaagcttcccctaatatacaggaaagctacaagggtgataaagtgtatatgagccatctatgaagaagtgaacccccaattacattgcccacgtgtatacccagatctgcggagaaggcagagctgaagcgggaggcgatggggctgggcagagacagtggaagagcacacccaggcagcccacgaggagggacaaagagcaaggaagaagggtcttcctgtgggcacctggctgggtgcaagggcaggggagagggggacactcctggggagcagtggcaggtcacactgacccatcaggaccagggctgtgcccatgtgctacagagaaggtgagagcactgggggcgatgtggggaatggcggagcacgatctccctgggcagaccggggccccacagcagcaggtctccttgtacaaggatgtctgcagctcagcaaactgggtgtgaggcccagggacggacgagggcaccaggacatcactcacaagcaagttgtcacagatgccactggccaccttccccagagtgttggcatcaagaggagccaccagcaggaggtctgcccacctccgcaggtcaatgtgcagaactgggtcagagcggctcttccatatctggcagagggaagaaaaaggggtcagtgtggaggaagcaggatgcagcgccaaggcaggccaggtacggtaagtcaggagactgaggaacccactgacctgccctgcccaggccaacctccgttccctcctgcagctaagctggcgagcgctagccatggagccagcagccgagagaaccaggcctgaggaaacaagtgccccttgtctctctgagctattcccttcatggtttggctttcaagagaactgacatctggcagggagctcccggcctgtctgcttgaggcggatgcttgggttgtccaagccagtggaaagctccggggcagtgagaaatggagggggtgggggcggggaagacaggccagccggaaatgttctaggctaagaatgtttgaaaatgcctggcagggaacccctgtgaggcccacactcagcgtctggtgaatcagccagtgcccacccatccgcaggggagatgcagcagagcccggcggccgtgggaagtgaggcgttctcttcagccctgacgccaggaaccacgtggacaagggtggtgggaacagagctcctctgtggtttcatcagcccagataagtacaaggacactcaacctcaggcaccaggccaaagcccagctctgcctgggccgggaggagactagggcctcctgcaggccagaagctagacagatgttttcttcattgcctctgcccagagggccctgaccacagacttgagcccagcctgtctgttccagctgccagaccataggccgtagggaggactgttctgtcctgctggtggaaactcaatggaactcagcccaggggccccagcactgacctcccattcatcagcgtcgctgtagagggtgacaggaatgtcctgggggctgtagaaatgtttggctctctcagttgtgaccactgctacttccagctgtcaccaagaagaagggggtggcggggagggaggaagaaactgttaccagagccacaggcctggaggccacaggagggtcagggcaggcaggtgctgtcttcacaggctggcttgagagaggacttccctccttagctgcaagcctcatgtctgcttagctacttctgctgtcacccaaaggtcaggccctatcaggtgtggctgtttcacttccctatctgaggggctgctgaggaatgagtcaccaactgcccgtatatacaaagctgcaagctcctgccactcgggcagaggtaggcccagtggcagaggcacgcaagtgacaggaaaggaagtcaaggccagggccgcagaggccacagcaggcaggaggggccacccaaggaggctcataggtcctgagttctgtgccacacagcagctctgccctctgcaggccaaggcgctgggggctggggcgcggcatgtcctctgtgcatgcatgacccgaagagaaagcagacagtatcccttcacgtacttctaggaacaagtcctcgtgggcacaggctgcagacaggctcctggagaacccagcctgtgtgtgccctacactcatggggtgagaatgaggtttacctggtgtacactacccattcactaagaaattactaacgcaaaccagggctgcctgcaatctgcttaacagaacacatggctgtgaaaaacagcacccaggagtgtgaagggcactagatgggttggctatcatttgtaaaacaagatttttttttttttttttttttgagatggagtcttactttgtcgcccaggctggagtgcagtggtatgatctcggctcaccgcaacctccgcctcccaggttcaagccattctcctgcctcagcctcccgagtagctgggattacaggtgcacaccaccacgcctggctaatttttgtgtttttagtagagacgaggtttttcaccatgttggccaagctggtctcaaactcctgacctcaggtgatccacccgccccagtctcccaaagtgctagtgttacaggcgtgagccaccgcacccagcctgtaaaacaagattttagactaacgagctggcaaagtacaggggcccagaggaagtagctgttggggagaggggtgtatagggaaccacatctttgggggaaaccaatgaatcaggagaggacatttgtttctctggacatttatccagaagaaagaaaagtcaagggtgacaaggacagaaccatcaaccagccagagctatagtcatgggccatgtctgggccagacccagcctatagacatgctgtttggcctacacaagattattaacatttttgagccaacatgtccaagttggaagatttcgcatagaaaattcaatttcctgagttcttgtgaaaagctgaaggctaggcgctgctggacacacattcctacgtgagagcgacgtggtgccctaaggcctgcctctcactctgtaggacgtgcccatgccaattccaccttgtcctcattcctccttactgtctctctgaggcaccccctcctcgcttgcttcctgcatattgtacagggcagggtggatgacacagcggcacagcgcctaggaacaaagctaggaccaaggagtagaagtctcagagaagaagactgaggaagaacttcagaaagtctggcgttctgagttctattgacttgtccattctccatctcactcccccttaggatctaccatgcccagaacctgcaaaaaaacctcaaggaccttttcagaggtccatcacttatttatttatttacagagtcttactccattgcccaggatagagtgcagttgtgtgatcatggctcactgcagcctcaactgccctgggctcaggtgatcctcccatctcagcctcttgagtagctgggactacaggtgcatgtcaccatgcccagctaattttttgtattttcggtagagacagtgtttcaccatgttgcccagaattatctcaaactcctaggctcaagcaatccacccaccttggcctctcaaagtgctaggattacaagcatgaaccaccatgcccagcctagaggtcatttaaaccaaactcccactgaatgctggagtctccctaggatggccctgaataagccttgcccagttctg

SEQ ID NO: 1242308 - DNA, 4001 bp, Homo sapiens
ttcgccatgttggccaggctggtctcgaactcctgacctcaggtgatctacccgcctcagcctcccaaagtgctgggactacaggcatgagttactgcgcccggccttttatttttaattaatttattttttttttgagacagggtctcactctattgctcaggctggagtgcagtggcatgaacatggctcactgcaacctccatttcacttcagcctcctgagtagctgtagctgggaccacaggtgcaccccgtcacacccagctaattaaaaaaaattttttttggccgggcatagtggctcacacctctaatcccagcactttgggaggccaaggcaggcggatcaccagaggtcaggagttcgagttcagcctggccaacatggtgaaaccctgtcactactaaaaatacaaaattagccaagcgtggtggcgcatgcctgtaatcccagctactcaggaggctgaggcaggagaatcacttaaacccgggaggcggaggttgcagtgagctgaggccgcaccactgcactccagcccaggcgacaagagtgaaactccgtctcaaaaaaaaaaaaaaatttgcgggggtagagacagggtcttgctatgttgctcaggttggccttgaactcctgggctcaagcaatcctcctactttggcctccaaaagtgctgggattttaagtgtgagccactgtgcctggtcagggccccattactcttaagaaagggcaatactgtgttcccagggcaacaggcagtcggtgctcagtgaggtccacgctacagatcggctgaactctgcaggtcagtttgctgccatccccagtgccaatttcacttcatgtgagttgactacccctgctccagccacttacctctcctgtagctaaggccacaaaattatccactgtttttggaacagtctttccgaagagaccaaagatcacccggcctacatcttcatctccaattcgtaggtcaaaatacacctgaggaaagagaccatttccaacttagcttctttaaaggggcgttgctaggggagggaaggtacaagaagctaacctgaggatgggagagagaatagagccatatttttagagaagtggttctgaatctgattttggtgacggtaaaaatcctatgagaatctaatgaaagctccagacccttttcttggaaaacatgcttatctataccctccttggactacaggataacaatatttgctctaaacagctaatggacccagattctaaaaattaacattagaaaacccataaggagcggagcctaagttcaccacttaagtttgaagtatacatactgtgctttgtaattggaagtggctaaaatttggcttaaggagagaaaggattcggaatccggcaggcgtgatctttcaccatctccccagcactgaggggtgtttgcaaaaagcctgctctgagactgccagtgtcggccccagatgggtatccggggatccaactaactccctgggtcagggcaggggctgggggtgtcggggtgggtccgggtcgttccctggactgaatgggcaggacggcccagacgccacgaggccacagacagaagccgagggaggaggggctgagccaaggccaagccaaggccgcccgggcccgagctccggcaccgtaaatgccgcggactccaccggaccttgacggtgactttgggccccttcttcttctcatcggccgcagaaggtcccggcagcagcaggaagaagacggaccccgcgatgagggcggcggcaaggagcaccttcatgttgcgttcggagaggcgcagcatccacaggcggaggcgaaagcagcccggacagctgaggccggaagagggtggggccgcggtggctagggagccggcgccgccacgcgcgggtgggggggactggggttgctcgcgggctccgggcgggcggcgggcgccgtttcccccctccggctcggcgccggatagtaggtccccctgcggggcgggcaccgacgcgggctcgtgggtggttgccacgttattgctccctcattgggctcccggccgccctctcccgcccacaggaaggccaccggcggaaggcggcctcgcagagcacgggcccgggctccgagaagaccacaagccccggcatgctccgcggcccgccccgcccggagcgctgttccactggcctgcggtagctggcgcttgaggttagcaaatacgtgggcctggacaaggggcacgggaagcttgtcactgttttgggccagtcaagtgtttgtcaccgccaaattggctctaaacgttgtggcttccaaacacttcagggacatttatccttaccgagcgtggccttgtacggctcctccacttgtcttgcaaaacttgctgcacaacccacttccttttttactgaggccgtcaagttactacccatttttctctcccttctgtaatcttgctgtgcttactgttgtgtatatcaatggacatcttattgtatacgctgttcttaacttcctttaccttttcccccaatagactacatttttttttttttctgcggaagggactgtgttgcatttactctgtccacagctccctcacagcgcggcagtactgagtgcccaacaagtcctggttgggatagcttcacatccgcactgacatgagaaataatttatgccacggcctgaggatacaatgcctttttccggaggtcaggaatagttactagatgtccccacagggctattttaggtcttcacacacttagtgttgtcccaatctacaacatagatactttggtactgggagtcttacacaccaaaacaaaccaaaacacaaacttccaaaatttggacctatggcgttaaaacgtctttaaaactaattttcaacgattaacttcgtagaaattccaggtcgtcacagcacagattataggcagggctccatttacataaattatgcaatgtagtcttcatgaggcgctgacctgagactgaagttatgcaaggccactggcattaactttgttgttcattacagcggccttacacaggttgtagagcttcaagacagttctcttatttcccatccttgcacctcaattcagacaaccccaatcaggaggaagttttaaacattgttatactgacaaagatgatcttccagatccatctctcatcccttttttttttttttctcctattttgttaagcctctttcttcactcactggtctcaggctgccatagccagagaaaaatgtttactaaatcatgttttcaaagtagcctccagctgggcacagtagctcatacctgtaatcccagcactttgagaggctgtggcaggcagatgacttgagtccaggagtttgagcctgggcaacatggtgaaacctgtctctacaaaaaatacaaaaattagcagggcgtggtggtgcgcatctgtagtcgcagctaccccagaggctgaggtgggggaatcacctgagcccagaaggtcaaggctgcagtgtactgtgatcgtgaaactgcactccaccctgtctcaaaaacaaagaaacactcaaaaaacccaagtagcctcctgcacatgaggagctaaggctaaaatggcatcacagcagcctttctcccactcccactttcaaaagaaatcaggttgatggataaaatgctctcaatgtgaaacttttctctcatgattcttccactgctacctgcctgtgaaaaagtaattaaagagtagtaacaaactggaaggagtcaatcatgcccagattgacagttgttctgttggctacatatgcagtatggttttacattgctcatcatagttctatcttctgtctggacacatattccgcatttgtagaggagaattataaagctactaaagttgttccacagagcagatcctgatttcctgtgttctaccacctgagaacaacagggacccaggaactaacgtat

SEQ ID NO: 1242309 - DNA, 4001 bp, Homo sapiens
actccagcctgggcaacaagagtgaaaatcctgtctcaaaaaaaaaaataaacagaaagaaagttctagcggacctttatatagacctcgacctctcgacctttccagttttcattatctgctgtctttatttctcaactgccacgggggtgcgacattctccttaggcttaatatttcttgttgtgcactgcaggtctcacacacacactcttacccctgataaaaacgctatttttttgaattccttttcagtgacctgacccaatttccctgacttgggacattcccaaggtccctgtatagtttgagcaagtagaattttgttgcattctttatcttcgctctgaagccgggactttctctcaactctaagattcctaaccctttgccctttcttccattgagtccttcctcgttttccactgaatgtacactcatgttcttgaaattctactgcaactacataacggggcatggtaactaatagaatagggaagagactgtttacaaatatgtggctgaagagagacgaaaggtctaaattcccagttaacaaagcaaaaatagaagcctgacagaaatagctatgaaataagccaggatttatttagatgcacctctgggagaagatgggctttaatgtggtgttcccagagccgcttccctgttttccatgctcttctccccatccgcctctcccccaagctttgttgtgaaagaaaagaaaacttcacactccacactgggctaaagggcagtcttactctgacaggaatcaatgtgaatggaaggaaagaagcaaggagataggcgagtaaggtaacgagggaggggcaggcaggcaatcttctcaggaacatctatgttagatctggagaaggggtagaagggagggtaaacggtgtaacttctttaacccttagaatttagggctccttgcatagtcatctaatttcctaaatcactatgcacttgatggtggactccattggtagcgaagaggaaatatcaatacaaattccaggcaggaatacttccaacacagaaaaactcctcaggccaccaacactattttctgcccaccttgaacagtggacgcctcacttccttcttaatgcaatttttaattcttcagacacactcctcattccgactctgatcaactgtgctcctctccctgttctcagtatcagctgcttcgtttcgccttctttccccaacttgctatgactcttgccccaatactgactgcagcctccccatcccaccccgcatcattggtcaactaattccattaatccaactaatcctcgcactcactgattgcccagtattaaactccttcaccctctcgcacgagtcatcatacttggtaacatctttatattgacccctcagtgaccccccacaatgacgacctgccatccattctttcctcacatcacccctccctccaggctgtcttctctcagccgcaacccattcctcaagctacccccttcctcctggactccagccccacccctcctggcgcagatcccttccaccttgatcctctcccctgtacgactccgctcctccatcctcccacaggaccccctcttcctcacgcagacccccacatacctatctcctctcccgccgaccccctcctcggtactctcctcgcacagctccgggtcacgaataccgccctcgcatcccgactccactagcctttgcccgcccccgccttcgccgcctcactctccctacgctgacactaaggcccctccgctgggcctcttcccaaagcggagcccacccggaacgaaccccagccctgggaacccaccaagcccactctaccgcgcccacccggtccgataccgcccccagccccagccactcccccaccgcccccggccttcactcacccgcctccctccgctcgcgcagccgaacctgcaggcagcgacacctgacagcggcccaatcaaagcgcgacttctttgcggttccaccaatcagcgaagggcgcgcaccggtaacagagtcaggctgcgttggccggcgcttctgcgcggaggagcgtgacccctagtggctctgggagggaatgcaacttgatgctcccttcctttgatttcttagtgtgtcgccaaagtccagaagcgtggtctagacagagacgtttcatgagacgacggggtgggtgggaagcctcatgctgagaaagaggaagaggcagagtttgtgccattgctgttccttcagagcaaaaaccaggtcttccctttgtcttatgagacaaaacagggtctcatatatgtacagatccaataaataaaggttgaaaattttaacagatgtaaagaggactgatagggagactggagacaaaaaagagacaaggagagaagcagataagaaagttaagggaaggaacagagagacatttacagaggaggcaagaaagtggatggacctggaactctagacaaattgattcctatctccacagcctgctttttctctatgctccagacaaagctggatttgaatcctggccttacctctaatagctgtgcagccttgagcgactcacttaatttctctgagcctttatttttctcatccataaaaataggattaaaaacctagggctgggctcggtggctcacgcctgtaatcccagcactttcggaggccaagttaggcggatcactaggtcaggaggtcgagatcatcctggccaacatggtgaaaccccgtctctactgaatatacagaaattagccgagtgtggtggtgcgcacctgtaatcccagctactcgggaggctgaggcaggagaatcgtttgaacccgggaggtggagactgcagtgagccgaaatggcgccactgcaccccagcctggtgagaaagccagactccttctcaaaaaaaaaaaaagaacccaaaaaaaccccccaaaaacctaattaaggccaattgtagtggctcgcgcctacaatcccagtacgttgggtggccgaggcgggcagatcgctggagtgcaaggagttcaagaccagcctggtcaacatgatgaaactctgtctctacaagaaatgcaaaagctagccaggtgtggtggcgtatgcctgtgctcccagctacttaggaggctgaggcgggaggatcacttgagcctgggagatggagtttgcagtgagccaagatcacctcactacattccaacctgggtgacagagcgaggccctgtctcaaaaaacaacaacaacaaaacacctcacttaaaggtactgataatatgaaagcattttgtattgtatatgttattgctcttattatcctcgcatcttcacttgggtttccctggtcaagacagttgttcccttttccttctctgcaatattaggggtcttgccacttttccagtcgtgcctcattgtactgaccccacaaggcctcctgaatggacatagaaatgattctaatggcttgaatagattattctaagaggaatagatgcctccctagttcatgctcaggctcataccccctccaccactctagcccttcaaactagctattacagcatcttccaggtatttaactccccttactatccccatgaaaatgtagactctgtccccagtaatcattggaacaatccaattcaactcaatgaaataatacatataaaagttccttgtaattgtaaagtgctttaaaaatattaaatactattgacaacaataattcttattaaataaatgaaataccatataacaataccatatattgattacttccatatgctgcaaaataattttttaaatgagcattaatatattatgtgcttgtaaaaggcacacaagggataagaaaagtgcataagtacatgtgttttctcagtggaattattgttcacatttgggaagctactctctaaacttgggtaatttctctactcctctggctgtcttatttctccttcggtaattatctct

SEQ ID NO: 1242310 - DNA, 4001 bp, Homo sapiens
cattgataagaaaggggtttcgaagcttggagtaagcaacagctttgtccagaggaaagcctgggatggagacaggaaataaagagaccaaaggaagggagagaaagagaacgagaaaagagcaagagagatacaaagacatattaaagctattagctgccactgagctcctctacccattcaacccatcacttattcttcttcccagctccccaagtctaggatatttatcaagaaaaagtaaaacagaagttatttttacagtccttccagagacccaattctgtcagagatcctaagacacttagagttgtcctgaggttagactataggctttaaacccccggcaactcctccaagatgcagggaaagcaaactccttggcaccattctctagtgtgtcacaagtagctgacggctctttactaaggaaataagacaataagaacctcatttcccgaaccagtattcccaccaccattccctcccattttccttcatagaccccaacctttggagtggaaagagatgaggcagtggcaggatggccagttttccacaggttcattaaggattacatcttctcccagaatgacaacagtcaggtagtcaaatctgcagagtcgctctaggatttgagtcattggcttggacttggatttcttggtcatggcacagatgccaacaatgatctgaggttcaggaggctacagagaggaagtgctatcagaaactcaagaacttcccaccaatatcacccccttctgggaacactgtcttatcttcttagggcacagagtttcttgccaggactctggacctatgggataaagggtgcctcctaactttgatcgaggttgaggcacagctagggattccaactgcctacagaataggagcctttccacagtaggaaatatgtgctcaagcaggagagctagagaaccaacaaccatgagacgacaggaagatcctaagggcaggggtttctttttttttttttttggagatagagtctcactctgtcgcccaggctggcatgcagtggcacgatttctgctcactgcaacctccaactcccgggctcaagcgattctcctgcctagacctcccgagtagctgggattacaggcgcccaccaccacacccagctaatttttgtatttttagtagagacagggtttcaccatgttggacaggctgcttttgaattcctgacctcaaatgatctggccgccttggccttccaaagtgctgggattacccacgcccggccagggcagggatttctaagagaggcaacctaccaatctctactgcccctcccctaaactaggatagggcctgtttatgacagggagtctatgcattcggaaagaacagagaggtatctctaaccaatagaatcttaactctttaggacagaggctccaaccccaagttacatcattttccccattcttaccacttcatcctcctcatcctcaaggagctcgctgtcactctcttctggcctcatgcctattccacgggtgcccagcccctcatctccagctccaaggaagaagtgggccgtggtactctcgccctcactggccgtcaatgaccacatccctgccggaacacccactcatcccgctctgcagaggggggtaccccatcagctcagaacccaagccccctggctgtgggtggggctggggatggagatgaaaagcataagagggaactataaggggaaacaaaacaaagctataggaagaaggatcaacaagaaaggaggcatatgggctatgacttgagatgctaaaagagccataaaagaaaagcaaggtatcccttttcctccctgctcaccccaccccaaccaataaattagtaagaggatcagataatcagcccttacaatgccggcatgtccctgatttggccagcaagaaacattaacttcaggcagcaaatgggaaaggcaggtcctcgaggaaggctactcttgagtcctaccagaagagaaggttagagtgacatttcaaactttggactcatttcacaatgttcctagcccttttccacctcctcacagtagtgttgaattcagtaatttaattcaaaggcagaggaatgagagagctcagctgcctttccccttaaacctcttcttcattcttcccaaagattaactcaaaaaatatttattgagggcaccctacattctaagcattatatcagaacattaaggccaggcacactggcttacacctataatctcggcgctttgggaggctgaggagggtggatcacttgagtccaggagttcaagaccagccaggcaacatgtcaaaacccagtttctacaaaaacattcaaaaattaggcaggcatggtggtgcatgcctgtagtcccaactacttgggaggctgaggcaagaggatcatttgagcccaggatgcagacgttgcagtgagctgagatcacgccattgcactccagcctgggtgacagagtgagaccctctctcaaaccaaaaatttaaaaaataataaaacccccatgctctctctctccttcatctactccaccttaaaagacagttgcacagccagataccatggttcatccctgtaattccagcattttgggaggctgaggcaagaggatcgctcgggcttaggggtttaagaccggccagggcaacatagcaagacctcatctctacaaaaaaattttaaggctgggtgcagtggttcatgcgtgtaatcccagcactttcggaggctgaaccaggatgactgcttgagcctcggagtttgagaccagcctgggcaatataggtagacctgacctttacaaaagctttttcttaaattagccatgcatggtggcacgttgcctgtggtcccagctacttgggaggttaagctgggaggactgtttaagcccaagaggtcgggactgcaatgacccgtgattgtaccactgcactccagcctgggcgacacaaaaataccctgtttcggccaggcacggtggctcacgcctgtaatcccagcactttgggacgccgaggcgggtgatcacgaggtcaggagatcgagaccatcctggctaacacggtgaaaccccgtctctactaaaaatacacaaaaaaaattagccgggcatggtggccggctcctgtagtcctagctactggggaggctgaggcaggaaaatggtgtgaacccgggaggcggagcttgcagtgagtggagatcatgtcactgcactccagcctgggcaaaagagcaagactccgtctcaaaaaaaaaaaaaataccgtttcaaaaggaaaaaaaaaaaatttcttttcttgagatggagtctcgctctcttgcccaggctggagagcagtggcatgacctcagctcactgcaacctccacctcccgggttcaagcaattctgcctcagcctcccgagtagctgggaccacaggcacaccccaccatgcctggccaatttttgtattttttttttttagtagagacggggtttcaccatgcggtccaggctagtctcgaactcctgacctcatgatccacctgcctcggcctcccaaagtgctgggattacaggcgtgaaccgccatacccggccaaaaagtttttaaaaattagccaggcatagtgagtggcacaagcctgtggtcccagctactcaatagactgaggtggaaggtttgtttaagcccaagaggtcaaggctgcagtgagctgtgatcgtgccactgcactccagcctgggtgagagcaaaaccctgcctcaaataatgatgataataataataataataataataataataataataataataatagaagacaaatgcccaagttcagaaaacctgttcagggaaagaggtctagtgtggttgggaggttgagaatacaggcatccatacagtagtctccagcccactctcaaactgaaatctcaatgttctctctagtgtcccctgg

SEQ ID NO: 1242311 - DNA, 4001 bp, Homo sapiens
gtaatcccagcattttgagaagccaagattggaggatcgttcgagcccaggagttcaagaccaacctaggcaacatagcaagatctcatctctataaaaaaagaaaaacagtacttgcttaatggagttgtgggaaggattaaatgaaagaatgcatgtcagtgcctggcattgagcctagcacgtagttgtgttcagaatgttattcttattgctggaacagcagttcttacctctctagaatccaggtttaaaggtatataagtaagaaagtgccgtttccagtaaccagggaccaagacctgtccttttcccagagtggggttgaagagtgttagtcagagccagggtcaaagattgcttaggtcctggtattggcactcaactttggttactcttaacattctagtcccgcactgtccattctgaaataacgaaaatattctatatttgtgctgacaacatagtagtcactagccacatggggctatttaacacttgagatgtggcccatgttggctgggtgcggtggctcacgcctgtaatcccagcactttgggaggctgaggtgggcagatcacctgaggtcgagagttcgagaccagcctgaccaacatggagaaaccccgtctctactaaaaatacaaaattagtcgggcacagtggcgcatgcctgtaatcccagctactcgggaggctgaggcaggagaatcgcttgaacttgggaggcggaggttgcagtgagccaaaatcacggcattgcactccaggctggtttacagagtaagactgtctcaaaaaaaggcaaaagaaaaaagaaatgtggcccatgtgactggggaactgaataattttatttaattataactcatttaaagtcaaacagctacacatggctgatggctacagaattggaaaatgtagctctaggctgggcatggtggtgcacacctgtaatcccagcactttgagaggccgaggcaggcagactgtttgagccaaggagttcaagaccagcctgggcaacatggtgaaaagccgtctctacaaaaaaaaatacaaaaaaatttgccaggcgtggtggtgcgcacctgtagtcccagctactcaggaggctgaagtgggaggatggcttgaacccagcaggcagagcagtgagctgagattgcactactgcattccagcctgtgcaacagggcaagactttgtctcaaaaacaaacaaacaaacaaaaaacaaaagaaagaaagaaagaaagaaacaaagaaaaagaaaagaaacgaaaatgtagctccggacatgtatgtgcattgaacatgggagtaaataaagatataaaattttgaaacatagtgtgaccaagcattttcccttctattgtctcatttgagcctcagaaagtcctataaaggagatatgacaggcactaacagccctattatagattagggatgttaaaagaccttccccagatcacaaagagcattagaggcacagacaagcctagagggaggcagacttctggacttcaaaccgatgcttctttctttcatcagttacaaaagctttctcttcacggaagcacctcacatcagccctccagctcctgtgaaggtctcagtgccctgggtggaccccaggcccccatctcctcccactatccgctgtgctacctacctggaagagctcctgaacttgagcatccacccattgctccatctccagccagcgctggagctggccccggtcatacttcactgtcaggcggctgggtctccgggacctgggtatcttggaggagtccgggtgggacttggactctgagtctgtggatgatgtccttctcctcccagaagcccagtggaccttcttacatgggttctccccatctgggctgggagatgtgcaggaagcagggcttgaagacagcatggaagtattggtctgggcaaggagctgggaaaaaccgccagttctgagcagagccacagagggaagtgaggagacagagaacaggagaggccagcagagaagaaatgaaggcaggaggagggccaaggctcccagggaggggcaagggcaaagatcaataggactttggtgctgggaatgccagtctcctggctcctcactgccagccagtgagtggcactccagagccatgccccagcctccctttctgcagcttctagggcccaaagtggcataaactgcagatgagcaaaggtcaagaggctgccatgcccagggaggaggaaggggccctggggtcctgaagggtacagggctccaatcgctgctctatggccagctctggaatgggacctgagtcgttctcacctgagatccctctgtatcccaccttcctggggctggatccactctgggctctgagaagctgtggtcagattccgcagaagcagggtccctggctggcagggattcttactcagagcgtagcactactgggggcagagccccagctggtagatagagttggaggtcagttattgatggctcccgtaggaccagtgcccccagtgtctgggtgtgtccgaatgtaaactgctatcagcctggcctataaaggcagtttacctgcttgtaaaggcaaatttatcaagacttgtctactatgcccgctcccctgaggcaactgcttaggaagccatgtttattaccacgtgaccctcccccgattcatgtatttgctgacacagaggaaacctgcaaacctaacttatacacaggtgtcagggactaatacttccaggcatacatacttgcattctaaggcagggtatttttgtttagtcttttataatgaaaatttctaaactttaaaaaaaaaaagtgacagaagaacactgtaatttttttttttttttttttgagatggagtctcgcactgtcacccaggctggggggcaatgctgcgatcttggctcactgcaacatccgcctcccaagttcaagcaattctcctgcctcagcctcccaagaagctgggattacaggcgcccaccaccatgcccggataattttttgtatttttagtagagacgaggtttcactatgttgcccaggctggtctcaaatgcctgacctcatgatccacccgcctcggcctcccaaagtggtgggattactggagtgagccaccgtgcccagcctgtaatttttttaaaatggggccaggcatggtggctcacgcctgtaatcccagcactctgggaggccgaggcgcgtggattgcttgagctcaggagttcaagaccagcctgggcaaaatggtgaaattctctctctaccaaaaaaaaaaataataataatacaaaaaattagctgctttgggagacccaggcgggaagattgcttgaggccagtagttcaagaccagtccgggcaacacagtgagatcttgtctccattaaaaaatgtaaacaatgggccaggcacggtggctcatgcctgtaatcccagcactttgggaggctgaggtggacagatgacttgaggtcaggagtttgagatcagcctggccaacatggcaaaaccctgtctctactaaaaatacaaaaattagccgggcgtggtggcacacgtctgtagccccaactattcaggaggctgagggaggagaatcgcctgggcccaggaggcggaggttgcagtgagccgagatcatgccactgcactccagcctgggtgacagagcaagaccccgtctcaaaaaaaaaaaaaaaaaaaaagtaaaaaatgaaaagcaagattactcagatatggtggtgcacacctgtcatcctagctgcttggaaggtgggaaaatcacttcagcccaggagttcaaggctacagtgagctacaatggcaacactgcacttaagcatgggtgacagagcaagaccctgtctcaaaaaaggaaaaaggcgaatggatgacagtttaatgatgaaattttaggccctcacttaagaagataagggaggtgtttgagtggc

SEQ ID NO: 1242312 - DNA, 4001 bp, Homo sapiens
ttaaatactccctggctaaattgtttcagataatcccctaaaagcagcaagtctgagttttttttttagattcactgaaaaaaatcaagagtgcatacaaagactaccactcaaggacaaaaaggttgtaaaatgagtcagtttttccagtcttgaacataaatcactggactggaaggtatctcacagtggtccttaaattattttctaccttcaggcagccttcactgatccactgccctattttttcttagcattccagagaaggagctttgttgatctccagttcaacctgtttcggggatcgataaccataattaattctggccagagtttcgtttgagcctcagaggtcaaagctgcagtgagcaatctcgccactacactccagcctgggcgacagagtgagaccccgtctcaaaaaaaaaaaaaaaaaaaaaaaaaaaaaagttaattatatccattagcctggaaccaacattaaagggtaagttttctcctgcttcattcaatcccttgatagaggagatgcctacataattcataaactgttaatggacttttttttttttttttgagacgtagtctcactctgtcgcctaggctggagtgcagtgtcgagatgtcggctcatgcaacctctgcctcctaggctgaagcgattctcctgcctcagcctcctgaaaagctgggggtacaggcgcgccaccagggccagataatttttgtatttttagttaagacaaggttttaccatgttggcactcaattctcattattctgagggcaagcattttaaaaagactgatcagaattagtgatcatgaaatgaagaatcttacaaagccttagaacaatcagttccaccaaaaactacacattatttaacgctgtatcatcagaaaactgcatccacaacttttagaaaataaagttaatatttggaagtcacaaggttggtaagtggcagtgtcaccgtctggtcccgatttcaagtcggacagtccctccccaacaccgcctaggaagttattaaaacgaccggaaaagaattccataatccgtttcttaacttgcaaagaaacaaagctatctttccaattcaaacaaaacgttaacaccgctggccagatataaagaaaaacaacgggccgggcacggtggctcacgcctgtaatcccaacactttgggaggccgaggtggcaggattacttgaagccaggagttcgagaccagcctggccaacatagaccgcgtttccacaaaaataaaaaaaaagaataaaacaaagaaaaacaacgataaataaacttaacagctttaaagaaaagccacgaccacagaaggtttacaacgagtcatctgcgccaagcagcggcacctgagacgctgcgggcggggagggtggggtccgagcgccagcgctgaccgcctgggtggaggccgccccgggccccgggcctcgactaccctgccgcgtccgggcaccggcgctcggctcccacccgggcgtctgagcctgcgggcacctgcggccgccggcggacagcgcgtcaggtctcaccgccgcggccctcgcactggctcgccgcctccagaccctgcccctcagcgcccccggcctccctcggcgccgactgccgtgacgatctaggcccgggaccccgcacgggtcccgcacccctgaacaggccccgcagccgaaacgagcgtcgctccctcccgcgtcccctcgatttccccgcaacccgcaccttctcctcatggcggacgctccaagcagccgtgagtccaggtccagacctactccacacggccccgagagcaacaaccacccgcaaacaccggcgatgtcactccgcgtagccgctccgcgagccgttgagccccgcaaaatttcaaaccgcgccacggggcgaagcctcgtcgcgattggcgtcgcgtcccgtcgctccaagaaaatccccgcccctcgggctgaagtcgcgggtgcgcaatcggggtggggactcgcgagcagggcctgggaagcgccggagtggcggcgggggatgacgtcactgtctgtgagtggccgggcgtggcctgcgcctcccgcttccctggcttggcggcagcctcaagggactcctctcccaagccagctacctcatcggagcgccgccccgcctcgccccgcgcagtttggattcgaagtgcgcgggcggggagggagttgagagcaccgcggctacctggcttccctgagtcccggctgccgggaacgggcgcgggggtgaataggtaagttagcgcctagtttccctcgctcatccaagaagcgaagcttggaatcgatctttggtgggactcttccccagatgtaagaagccatacactaaaggggaagggaaggaacattgagtcctgctcatgggcctggaacgtttcaacgccagttatcccatttaacctccacaatcgccattgcagaggaaacgcaaaaagatttgaatgatttgcctaagtcacgttatcaaattagatgagtttctaaatcgttacatgaaaaatttaaaactcaaaatagacattacttttgtagcctcctttcctcgatgaacatgttacatccctaaatgcttatatatcaccgttttttcccagtgattcatggtggcatggtggcatgaatcctggtgtgtagatatctcgcccattctgctattgatatttagatgataatttaaaagataaggctgggctgaatatcttcatacataaatctttgtgtatgtatgtatttataaatgcatcctgcattttcgtacggctgattcctagaggtgtaattactgaatgctccctttattaatttgccttctgcacaaagcctcaccggaaaagtaccctccttttgttaccctcagcagggctgaattctattgtacttctaaacatctttgctcattttgtaggtaaaataataatactggcatttccttgtttggcacttgattataattgaaattgcacatttttcgtgtttattggccaactgtaacttaagtgaatcctcttcatatgccttttccctaaaggtaaaggatgcttgtttgcttcaccttcagaaccatatttttcttattttcagaaaaacttcattagtgctttcaatgttctttttactttttttaattgagacggagtctcgctctgtcacccaggctgtagtgcagtggcccaatctcagctcactgcaacctccgctacctgggttcaagcaattcttgtgcctcagcttcccgagtagctgggactacaggcacgcaccaccatgcctggatactttttttttttgtatttttaatagagacggggttttgccatgttggccaggctggtcttgaactcctgacctcaggtgatccgcctgcctcggcctcccaaagtgttgggattacaggcgtgagccaacgcgcccggcttccatgttctttttaacttgtcagcagcatgccaaacattcacagcaccaacacagtgggcgacaggcaccactttttcaatttccttgcactctgtgattaacattgacaccactaatagagtagatggtagcactacttttaaaatttacttgcattctttgttgattaaattaacaggagagcttttcagaaagcttcacaaatttgtgatcttcatacttgttcttagcaccagcattatgaagtatccaaagaaaaggcaattttttctctcttgtcctttacactgaggtgctgaggctaacaaagtcatagaactgatgcaaagatatccattcagagcataaacgcagcatgtaaaacactgtgtaatacgcgtttataatatatgaccttagcctgggcactgtggcaaaaccctgtctctataaaaaatacaaaaattagccaggtgtggtggtatgagcctgtagttccagctacttgggaggctgaggtgggaggatcacttgagcccaggaggtcaaggc

SEQ ID NO: 1242313 - DNA, 4001 bp, Homo sapiens
ttgaagtgtttttggaacccgtggcacctactcctttgggaactgcgtttatcttttgtgacaaattacaagtttgcatttttctatctgcccttttacagcagggactctatctcctctccttgaaagaaatccatttacttaatttctgcaaagcaagctaggtatttaaaagacaaacaatagactttgaaaagttggtaactcttgctgcttgtactcagtgggtgatcggattaagaaacttttatttcacttttctagaactaccaactgttggaaaaaatgcgtgactaattggtccttactgtctaatagggataggagatcgcttaatcaaccaatacacatttttatcagagcagaggaaaggctttatcctaagcatatacacatcgcccctgggccctcgccaggataaagcattcgatgaccatacaatactctgtcacctcctgcatttagtgcacaggccgtcttaaagtctcacgtattgattgggggtgaatggagaatgggggtgtgtgggggaagcgttgcttcaccttcctcctgatcgttgtggatccttgattacaaacccccagaaatgatttgtttctcctcaaggcaggtcctcggaatactcactcttcaaggctccctgcttcccgtaatgtatgcccagggcgacgcgagccaccctaacagcccagcgctgtgcgcggaccactccggaaggcgcccattgtgtttctgagccacatctgactttgatccttttttcaagcctaacagaaactaaccccattgcagaaaaagcctagcgtctgtaacctgcaaataaataaaataacccattctcctgaacacctctcctaccgtcaccccattcactttacacttttatctcttctaggaaaccaatacggacgcaaggtagaaaaacgagttcatccaagtttgtgcaaggcaaatctagaatttggaagaatcttcagagccgtacacacttcaggccctgcccccaaatacctagctgtaggagataaatcctatttacctaccttccttttcagcttcggggacttttcccccctcctttccggggcacaaatcggccacttcacttccaaccctgccaattccaccctcccatctcctcctggctggatccagatccggcaagctggtgccgattggggttatgagttcacctattccctctcgcagccctaaaaagtgggggaactcccacaacagacacgggaagccgcgaggaaccgcggcgccccctgcacggcgaggctgccactaaggaaacaatataaataaagccacgtgcagccgcggcggccccggcgggctggcgacccggagtccggccggtcgcggaggcgcggacgcggccggagccgggacaatggcgcgagaaggaagagaccagagtggacagcggccgccagaactccgcagccacgggcgcgcggcgcggaggggcgtgcgcccggagaagctcccgcagccctgcccaagcagcgcagaggccgcaagcaactagtgtctgcagctggcggttccggacaggccgcagggcgagagcgggggccgggggtcagcgccaccacggaggaccccgccgcgcgctccccacgccccatcgtttcctctttccccatcccactcgcgcccgctcccgccccacagcggtaagagaaagcagaagaaagcgcgcccacctggcaaaggactgagcagcagcaggagcaggagcgcgcggagcagcatccccggcggtcgcagccgggcgaggggtcgcagaggaggcgccattcagcgtagccgcgcgggcatgctccccggccgcccagagcccctgtccgtctgcggcccccgccccgggcgctctctgctctgcggctggtcgcacgcagcctggctccccgctccggctccggcaccggcgtggcgagcgtctctgcggcggcgaggctggtgctcggacggccgctcgcgagaagcaaggggcctgagagtccggctgggggcggagtgaggcggcggctgcagagggcgggggcggcggagtggacagcgccgcggccgcgggcctgggactactttctacatctggcccttggtctgggccagggaggtcggcgcggccggcggagggagacgctgggagggggccagtggcggccgggtcggagccctgggggaagggtacgggtcccgccggacaatgcacctgggggtcaagccccggctgagggtctccggcccgcgtccccgccccctctgcctccgcgccaccgtcggggacagagccacaaaggccgagcctcctggcccagccagcctccggggcccccctcccgcggctagttgaggattggggaaggggaggcggccggggagggctagtgttgagagacagggaaaggccggaggcttctcccttgatggcccccgcccaccccctcctacaccctcctaccctcacacgcagaggcccggtgcagggaaatctcactctttctcacttcagagatttgtctgctccactggaggcatctccggatgataagcccccggagatgccccctgcatttgggcacggctcttcttctccctgcccccattagatgcagcgcgggcttaaaaatatctccgaagagtggtctcaaatgaacaatcgcctttagggggagagggtttattatcttttcttcaagttagtcaagttctttaatttgtgagaactgtgcacacaaaaggctctgtcctgagagcagaggcgagatcaagagatttgtagattctgtgagcttgctatgggggagcaggctttgatagattacttggttataaattaaactaagacacaaatgtgaatttgttcacatctaagtttaattaaggataacaggagttaaaacgtacatttaaagaatgtaatcagattgctaagcgtgtggatcatagcgtttacatgtggattaacatttgctaatccaaaactgaatctgtggcacatgatgagggcacaggctaaaagctagccttcatgaaagctgctgatggaaatctagctttggttaccacgacatcaacacacttactgcctttagcacgttccagaaatcctcctgggacggtgcggtggctcatatttgtaatcccagtactttgggagaccggggcgggcggatcacttgaggtcaggagttcgggaccaacctgggcaacatagggagaccgcccccgtctctacacaccactgacccccgtacccccaaaacttagccgctccagtagtcccagctacttgggaggctggggtgggaggatcacttgagaccagaagtcgaggctggggtgagctatgatcaggccactgcactccagcctgtttccaataagtgagtaaataaaccctcctgatgaagaagtagtgaaaaaaaatagtttagaacattaggatagcactacctttcccccttaagctcattatagtaaggaacagcctatttagcaatttcaacttaactgcatgtaaaacagtaatatccttggtatgttgcttccaaaactgtatttgaaacttaaatgaatttggactatttctaagcatcagaataaaggtatgtgggaagggaaaacgttgagaggtaataaaacgaaacatttgcaagtacgttttcaatttctgataattcaaatttatacaaaatgatattcctgtttgccattagactatttttttcattgtatcacattctcccccttccccttctccctgttcccttttagtcgatcccaagtgcttatatttcctgaataacacagtacatgtctgcttggacacttacattttctctcatgtataatacttgtcttatatcatgtactaggctacataagctatttaaggacttgttatctagttctgtgatgccccacaatttccatccagcagagtatcttgcatatagtgtgtaatactgaggtagttaaaa

SEQ ID NO: 1242314 - DNA, 4001 bp, Homo sapiens
aagcaagctagaaacaaatttccactttcactcttctatggtataatcaacctggtgatgataattgcttcaaagtacaaaaaggatgaactttgcaactaccaaaaaaagtttgtaatttttttttctaaaagtctaacacatttatttttaaacttgaggcagattaaacaatttctattttaccttctggagaaaatatagtggtcctggagtcatatcttcgagactgcaaaggaaaaacacatgagtgattcctacccactgaaagtaggccaactcctgcaagcctacaaatgatcttacaaaacctatcctggtatacaaagttcaataggtgagaggaaactgacaagaaaaaaggcaccttctcactgctttccttctatttcaattttcccactcaagtctgtaaactgagtacaagcaatactgtttatcaggcaaccgtttattggcatgtgtattaactcaccatgttttctgaactttatatagttcctgtaaaaagaaaatcagatcatcattaaaataagattcacaaattaaaaagcatttgctgactttacaaatctgttttatttactccctttattcagctaagtgtcaggcattatgctagatgctggaataccaaaatgtgtaaaaccagttcctgtcctgaaaagctaatactggcagttaggtgagagaggcagtcatagattataatgtggaaagaggaaccgggggtagggtgggaaaagggatgatgaaagaatcaagaaagtattttttgagaaatcgatacagaaaatgaaagtaaatcagagatgggagaggcagaaataaggctgagaacccttgggtctaagagaaagaacaggggaagaaagaagggcattccacacagagcagaaagtatgaacaaagggtacggaggcaggatagtttagtgggcatgagataaactgctgatgcttttaaaatatatataaataagagctaagcgagtatccaaatcacgcagagccttgaaagccaaggcaagaggctgaggccttctccagagagtgatctgggtcctgaacttgggggtggaggcagttatcttgggcaccatcagtaccattcgtgcaaaaggcaatactaggtgttcagcgttatttggtaaagcctcagtccaaggcccacatttccaaatactggaatatagggaatcaagactggaaaggtaagctggaatcaaatcctggagagcccgcgtgcccaggtaaaaacagaattttatctctcagccaatggggctcctctgaatgattcccaaggcccacaggaactgattggcattttaaatgatcactctggctggtgagagaccgagggcagcgaactggttgaggtaattgcaataggaatggtgcaaagtaaggatggcacagagcagagaagcagggaggacacagagacactcgccggggatttctgattcgagctttaagcacaactttctgttgtctccacgcctgacgccgggcacagcactattttgagttcaccggcacctccgggagagctaactttcacgtaccgaactcctgaggacggaagccaccccaactctcggtcctgcccacagacccccaccctcagcccgccccctcgcgggccccggcgtccaggcttggcactgggaagcccccgacggcggccggcgggggccattcccggcggtcggtccgtcacagaggaggcggtgcagagtcatcgtgcccacggctcctcggcggcaactgcaggccgggaccgactgtcttgacgttcacgacccccgcccaatgggaaagcggccaagcttccgcgggccccaaggggccaaaggctcaccagatggaagaccctgaagacctgagatgtccacggagcccttaactccacggaagaataaaccaccaccgctcaccgaataaccgctgctaatatggcccccgcgcatgcgcagaaccgctgggttggggcggggggagcgggacggccgaggacgcggaagtccttcttgcggggcggagctagaacccgtgcccctcgtgggagctgggtcgcgggggtgctgaggctctggggcgctgcagcttaggctagggtcctcagcaggtggaggagttgctgtgccatggggaagagggcaggaagacagtagccaaccaggaggtggaatagctaatttctttctcttacccttggcgctctcctttcattttctcttcactattcagacctaggatagcaaatagtgtggaccggcttcttaattgctatcattcctgtcctgtttcccaaaatggttccaaccacatgagactttacccctctcatcaccttcctttttcattctggctttcacttttactgctgatgcatacattttggacatacacattatgatgaggaaggccgggtggctcatgcctgtaatcccagcaccttgggaggtcgaggcgggtggatcacctgaggtcgggagttcgagaccagcttggccaacatggtgaaaccgtctctactaaaattaacaaaaattagccgggtgtgtggtgcacgcctgtaatcccagctacttgggaggctgaggcacgagaatcgcttgaactcgggaggcggaggttgcagtgagccgagagtgcgccacttcactccagcctgagactccatctcaaaaaaaaaaaaattatgatgagggtcgagcatggtgactcatgcttgtaattacaccgctttgggaggctgaggcaggaggatggcttgaggctaggagtttggaggctgcagtgagctatgatcgcaccactgcactccagcctgggtgacagagaaagacactggctctaaaaattaaattaaaaaaaattatgatcaggttcacacttttgggggaattttcaccttggtctctttctctgcttttcaccagtcagaaaggatttccctgaccagcacagttaaagcaataccctaccgtcagcatatactcgcaccattttatcttctttactgaaattgtcatacttgtttctgtgttcattatccatctctccacctttttgctcattcagcctcggtccgtatgtaaactatctactatgcattttaggttttttcaggctagaaggttgactagatctgggttaatatgaagtcatctgctcacagtctctcccaaaaagcagcccactgggcagaaactcctcttcatgttggttgcaaaattattgggggatctgggctttgaaaaggagatagcttggaagtaagttacattttgaggtctcgcctatcgtctctactttccaagcacacagggaagtgagccaaggcaagatggcaaagagccacacgcaggtggtgctctgaaagcatcctcaggtggtgtaacttatggcatctctgagggcccctgcctgccaccttagttcattctgcggaattcagtgaacagtcacttttaagtgagaggtagaatttctcaggtcaagagagggattccttgagaaaaagggcaagagaagaatgagtctgacaagtgtgggtgactgagtagttcggtctgatctgaatggaggagataatacaggaagtaaggaaaggcatttgaggcctaagtgtagagtgcctttaatgccagaatttgttttggtcagtaatgggaagacaggattaaagtgatgttttaggatgatgaaccctcaacatctctcatcccacatgttcctcttacaatgtgccacagatggttcccactgagaggttctgtgtccccttattctgaatctgggtgagcctgtgactacaatggaagtgatatcatgtgacttccaagagcaaatcacaaatggtgatatggttctgtcttgtcctcttgggatggtcgttcttgggacccaggcactgtgctgtgaggaagcaaaggccacatggagaggtgtttggccaacagcctagatgaagtcccagtgtcacctgcc

SEQ ID NO: 1242315 - DNA, 4001 bp, Homo sapiens
cataccctgctcccttatacgccacccctacctgtgcccagatcctgccatggaggctgctccttgcccagctctgccctagggaaggcaggcccaggggctctaggactggacagaggtctcagtgataaaatagtcaaggggtcctggcctgccctgggctacagagtggcctgggtttccaggccctaccccttcccccaactttgcacaccaaggcagggcagctaggtggtgactcacatcccccatcccccagggctccagctgccagcctgggccctgagcatcctggtgcctggtcctccggatgggctgaggcagctctgcctccattggcttctctgggctgggcccaccctgtctttgtagagatggggaaactgaggcccagaaaggcacaaggtgccctccccacgtggggtcctttgcctactgtacagtcagagcagaggaagcagaacactcacacgctggccacaggccccaagtggagccggccggaagggaaggaaggcctggctccatagctctcatcctcctggctgcagccccaggaaaaggcccggggagggcagggctgttggctggggctcagccggctgagccgagggccagagcgtcctcttcggggttggaggcagcaccccgggacagccacattccccagctccaaccagagaggtctcagtttttccccagagccctgggcacagccagagctgaggggcagaggggtagttgaaggacagctggaaaagtgctgagatgaccaggggtccaagctgggctgcaggctacgtggcccgggccaagccactttacctctaccactggctgggcgcccttatttcatgggggaaatgacttgatttaagcccgtgttgaatttaagaaagtaagcaagccattgcccacctggctgcctccttgaaggacccctaaggtctgcaagggacaaggggctgggtgaggggaacagaattaccatttggagtgaggcaaggtgctgggggctttagtgccttggatccccttgctgatccaatgctttagttggtgtgttgatttctattttatcaccattatatagatggagagactgaggcttggagacagaaatgacttgcccagcctgtaacagagccaagacctgaactcaagtttgtctggtctctaaatctgtgacccctcctttgctgccccacacatcctcctcaagcccccacccatgtgttaccctcttctgaggagctcctgctgtggggagaggtctcccagaggagaaaacacacggggcagcagagaggaggacgctcattcacggagtccacttgcgttccagtccagaaggggtgggggcctgggccacctccatgacaattaagaccaagaatcaaccactattttatgagaaagctcccctctcggagccgcatcccatcacctgcatggagatttcagcctagctctgccccctccacttgttcagtgcccccaaccatcctcactcacccaaaaggcatctttgaactgcagctggggcatcatcctcaggcgtctgccgcggcaaagctcactctcctgccacaggctggcctgatggagggccaggcgccagcagcagcgtcccagtcctggcagggctggcccaggccccccttcccggccggcgccgtctgcaacactcagaaggcagccacgagccagagaggagcttctgaggggaggaaaaagctcaacctgttttgtttggggctagaatcagcagcaaaatgaggaaggagtggagctcagtgatgggagggcgggccctggtgtccagcccagcccctcaccgaccctgcggtgatggaggacacagtctgggacccagggcagggagcagggatgccagccctgggtgggaggcagtggccagtggaagaggcaggctggagctcgggccgggccaggcaggcaggcaggcaggcagcccgaggcctgcgcaggaaggtttgtgcaacctcccccggggcaggcacagggccctcgcccacaggaagtggagttgctgtgctcccctgtgcagccccgcctgccacctgccatcctgctcctgcctctgcttgccccctcccgaggtgcgggctcactttattccagaggccatatgctaagggagcttgaggcccactgacagtgtggccaggaggggcccaggaaccccaggtgtgtcacccgccagccagtccagcacccttccaggctgggcccagagatgccagactccccaccccgcactagcaagtcattctggaggggcttacccaggtctagggcatctgtcattcatcaaaccctggctgctctgggacccaaaccaggtcctgccctcaaggagcccatagtctgggagcagacacagctgtgctctggggggctgtgagcacacagaggcaaggtgagcaggcagcaagatgagggagaacagcctgaggccccggcactgcccccaccaccaccaccgccaccaccgcaagtctccagattagacgctgtttggggcagagaacccccttctgaagatggaggcttccggctcagtgaatgggaatggatggagagagaaacaggattatcaaggcacagagtggggtgtttggaaacccagtctgaggcccagtttttgtttaattttgaccccacctttcaggggctgagggaccttaatagaccccccaactcgctgagcctcagcttcctcatctgccacacccagtctttggaaagtagacggtgtcgagaatatttctggaatttccagtttggtgggcaggtgctgggggcactgtgtggtaccaccttaggaagagccctggactagagccccagccccagccctgagacgccacgccctgccggctcagcagaagatgcagcaggaagtcctgagcccagggcaggctggcaaaatggggtgagtcagggattgtccgcaaatcaccaccctcactgatgtctgccttacagctgacggggtgataagatgagagctgctgcagatgaaatagttgagctcccaagtgcccattatgcatgcccagggtttagagagagggggcacacccaggctctgaaatagccacccaagaggaaacactttggggaggattgcagagcaatgggactgcccccagaaggccctcacctccagaaaccttggatttgagctaatctttaatctgtaaggcgccccagtcaggttttttgttacttgcagctgaagacaattaatagtgtaaaaatccccttgaactttgtaggccatagagtgagccaggctgcacctcacctcccaatggcaccaccacctctgatagcactggctcagcctccctgagctcagtttctccatccatcagatgggatgatgcctctaggtctggagcagactagagaccctctgttaacagaaggctcctgcctgcttattggcagaaatttttacagctgggctccctgccctgcctctctaggtgtccttcccatcacctcccagagacttctgctccagccaggcctcttccctctccctggaggcacctttcccactcccacctgctctgttcccagcctcccttctggcaagccttccttgatcttccttacctgggcaaatcctcccaccctcaaagccaacctcaaggctcccacacatgaggccttcctttcccaactgtacctgtccagccagggcagccccggatggagggccatgctggtgacgggctggagcaactggggaaggaagtaatgtgaggaacctctggagagactctgcaattctctactagagaggccttcctcctcccctcccttccacccttacctgttgcaggtccccaggctgggcgaccagacagccaattcggctttggagtacttacccagcaccgggtacatcattctgcttttcacacggaccacctcagttacactgtcattatccccactttaca

SEQ ID NO: 1242316 - DNA, 4001 bp, Homo sapiens
ccatgcccggctaattttgtatttttagtagagatggggtttctccatgttggtcaggctggtgtcgaactcctgacctcaggtgatcctcccgcctcggcctcccaaagtgttggcattacaggcgtgagccacagcacctggcctgttccgtacttttttattgactgctggaagaaccctctctagacggggactttgatccccatctacaaaagattttgtttgttttttcctattctattaaaccaccgtggagcagtagagggagacagcacagaacatttactcatactctgacccaaaagtatagcctcagtctggatgaacacattaaacgacacaccatgcaatgtcatagcctatttaaaggcattctggccactactgtcttcatctttcaacaggaaaactgtttatattccagaagcaaagattatattaaattcaataaattcaagtcgacactcagaaagcacctacattttaccggatccacgggtgatccaagcagatgcctgttcagaggcagagagagttaaatggagtgaaagagatgacaaagtgccatagatgttaaggagaagtttccaataagaatgactgtagaaagaaccttccagaggctgggcgcggtggctcatgcctgtaatcccagcactttgggaggccgagacgggtggatcacctgaggtcagaagttcgagaccagcctggccaacatggtgaaaccctgtcgctactaaaaatacaaaaattagccgggcatggtggcacgcgtctataatcccagctactcgggaggctgaggcaggagaatcccttgaacccgggaggcagaggttgcggtgagccgagatcgcgccattgcactccagcctgggcgacaagagcgaaacaccgtctcaaaaaaaagaaaagaaaaaaaaagaaagaaagaaagaaagaaccttccagaatgaaaattccagtttctcaaagcccagaatctttagtttggacagagacatgaggatacacaggtcctggagtctccactactacgtgccttcagcttgcttacattaagggccaaggagctcaaacagaaatgcttaatgtaacttaagaactttttaagttctctgtgcaactcagcaaacctgagctcacaaccttcagaacagagggggaaatcacttcctccagctcttgtgaattttaaaattaaaagtaatgagaatgatttccatcactgaacggttgcgaggtgggtgtggccccccacccctccccctcccccacctccggcagcgcccagcctcagtaacgtccgaggggcctggctggacctctcaggccagcggcaggcattcagctacggcccagcaagccgctgtcacaaccgcacccctgacccaacaagctcatcccacatctcgaagggccccagccaactcgaaccccgacggccaggcagccagggccgggcctgggctccatgaaggccgccgactgcgaacaaagaagaggcccggggtagcctgagaggcccaggccgagctctctggggacccgaaggttcctgcagccctcggggggttgtgcccccggcccgagatctgcagatgagcctcgaaaagcgccagcacgccgtaagcgcaccgcgtcgccgaccttgttggcgcactgcaggctctccggcgcgcacgcggacaaagggggcaggggtcctggcgggtacccggagccgcgatcccgcgcgcttcccgccgcccgacccggcctttacctgtacgtcactcagctccacgcgcagatatagctcgcggtgtcgctgagcccagtagacatgcggcgtcaacacctgattctccatggccacactgcccagggcgcggggaggctaggctcgctgcgcctcgctgcctcaggtagtgctctgctggcgcgagcagaaagcaggcctcaaaccctagcgctcctgagcgcctgcaacccggcacctcgagataccccacgctcgcgggccgcgcctgcgcagtgacgcgccgggatggcggcggcgccagcagcgggccttggcgcgagccgggcgggggcggggcgcaggcgggataggggcaggccggggcacagagacgccgcagctcgccgcggccgcctagggaattggaatcagcgggtggtctgctctccccactcgtcttcagggacatgctttaaaataagctttaaaataaaaaaggctggagacttatgggggaccgatcagcctggaaaagggtttgggactggtgtctctggacggtccttcgcattctgtttactgagtacctactgtgtgcctgggtttcaaagctaaacactggaacaacagaagtgagacacagtcccttctgtcttagaactcccagcctattaaaagatgcaagtaattacagatgaaatgaggataataatggtgataggggacatggtgtgggagcagcgtggaagagcgttccaacaagggaaaataaagaccagggcagcgctgcccaataaaactgtaggtgatgatggaaatattgcacattgcgctctttaatacggtagccactagccacatgaggcttttgagtacttgaactgaataaccgaattttcaattttactcacttctgttttttttttgttgttgttgttgttttgttttgagacggagtttctctcttgttgcccaggctggagtgcaatggcgcgatctcggctcaccgcaacctctgtctcccgggttcaagtgattctcctgcctcagcctcccgagtagctgggattacaggcatgcgccaccggctaattttgtatttttagtagagacgaggtttctccatgttggtcaggctggtctcgaactcccgacctcaggtgatccgcccgccttggcctcccaaagtgctgagattataggcgtgagacaccgcgcccggccaactttattcacttctaatttaaacttaaatatccatatttttggtggctattctattggacagtgcaggagactgtctcaaaaaaataggaaactcaaactagagacaacactcatttatgtcttacttaagctgtcttgtctgtatcgggtttcatccccaagttcttctgcagagaagaatttaatgggaagaaatatttatatgaaaactagaactctgggacaaaaatggaactcatattcaatcctgttagctcccatttatttagcaaagtgattctattagcacccgtttgtttagcagagggatctaacgctgaaaacaaattctgctagctctctggaaacatttagctcaagagtggacagaataaaatatagagagttttcatataatgaatgtgctgagctcacaaagagtttatgatgataggaactgagggccgtgggaaccattgtcagacatttgagagccaacccttgagaacgggatggtgaaatgcgagtaggaatttgactgagtaagaaccaggtaggccgtggaagcacagggcgcttgcttcgttcacaggtgaaaagatgtggaccaggtgcagcgtctcacgcgtgtaatcccagcactttgggaggacgaggcgggaggatcgctggagcccaggagtttgagaccagcctgggaaaaatggcaatacactgtctctacaaaaaatacaacagttagcagggcgtggttggcgcgcccctggggtccgagctactcgggaggctagggtgggagaattgcttaagcccaggaggcgagatcgcgccactgcactccagcttgggtgacagtgtgaggccctgtcttaaaatttaaaaaagagagagggttgtggaaggaggttctgctgctagggattaaaggcatagaggagagaggtcgccctgaatctggaaaggcagagggtgcattaggaaagtctttgtttgcttcactgaggtgcctatactgtatcccacagacacatgggagccaaggaagtttgttaacctggagattagt

SEQ ID NO: 1242317 - DNA, 4001 bp, Homo sapiens
ggaaaaggatgaaagaaagagattttgtccctttaaaatcagccaacacatcctatcttagtactgaagtacttcccaattctggcagaatgggctccttggccacctgcttgcactagggtctgactagcattttattaacatccaactgcagttaccaggacattcattaccactgcttgtacaaagcagaattctttttaaatttttttcccatacagatttcatcaccaggtgtcaaaagacaaaaccgtggcctgaggccaaatagaaaaatgtcatctccacaaataaggagaaaagacaaggactttaaaaaatcaggtcaacaagcccattagccaataatagtttgtaaaactggactgtcttcacactagaggctgtgctagcaaatgtggtccttggaaacaagagctgtagagcttgaaatgggttgccagcatggtttgcctttttcttttttcatgtttatttttattttttttatttataacatggaatcagactatgactataatcgagcatagctatggcggggtatgggcagtgccaaggaagagacagcgaaaagcccgtagggttcccagtctaagctagcagaccttcccatcttcctcaggagtggtccctgtctccgcagctggaatgtgcgggagggaaagttacaagggcccccaaaatgagacagcaaaccacttccttctgaaaactaaaggtcataggcttttaaggaacaatagagctcaatgtaagcttcagaaagatggagacagtcagatgagacgagggtagggaagcgcgggtgaggagatgcgccccgtctgggatagctgaataggggggtcaaggccagggactttaggaacacgagaagggctggatcttccataacctgcccaagtgggcctgagaaacctaagaggctcctctgaaaatctagggcatctatgcatccaatactctcagccctctcctcgggaagggagataatccccacaggaagcaccccccaaactggggcttttcctgcccttcaaaagccacaaaccctcacggaaaacatttacaagggagtggaagggccgggggcaagcagcggttctgcaaatctcgggaagaaggcccctggatccaaggaactttgcccctggaatagggggtggggtgcggagggcaccgtctgaggctggtaagcctcggcgaaagaagcggcgggaacgggagtagggtcccgtgggtcccccgacgagggggtggcggcctggggcgcggtcgccggtgagggaggcccgcgagccgggcacgggagcggggggctgcggccccgtggctgcaaagagccggcactcgggaggcagaggccggcgtaggcctcgggggcccggacacacccaacgcggcggcctcgggcccgcttacctgctcctcctccggggtcagctccggcgccatgtcgggccggggcgcggtcgcgggctccatccccccgccaccgccgccgggcggacaaaactcgctcgcgagcgcgggagcccggcgcgctcggcctccgcttccgcgtccccgcgcctcagcagcccggggccggctcgcgcatagtgtggccggcagggcccggcgcctgcagcggccgcaaacgccgcttctgcttccttaagaaaaatctctccgaactgccgctctcttccgggaggaaatccttttttatattattcgctccgttcctcacactcccccttatctcctggggaagaaaaagtgcaggcgaagagctaacagccactcgggatttaaaaggaaataggaaatcaggaacttttagagccgggagcgaagggtcggcggaaatttcccgaaggccgccgaccccctcggcgccccgcttcctcggccgcgctcccgctcctccacagcgccacagagctcggggccgcccagccgggccgtcctcgcggacgctggccctgcgacctgcgcggctgcctcagccaggctcctcgcgggcggccgcagcgaaagggagggagtggagagggagcgagggaaacgcgcccccctcctgactcacggccaacgctgcggccgccccgcggccgcccgagccccccgcggctccattgagaaactgagcgtctcattcacaagctggcggcgaggagggcccggcggagcgaggacgcagtccgggagggggagacagagaggagcccgggcgggggaggggaccgggagggggaggggacccgggcggggaggggaccctagctggacggaaggcaactcgactgcgggagggagaaaaaggaagaaaagagtatttcgtgaggctcagatcctcggaggaggaggagaatacgttcgtttgcaaattatctgctgactggcacctctcctggggttaacttgccgctgccacctacgcgtgagaaacccacaatcctcaactatttgtcgcttgcagcctgaaagaccctggaaaggttgcctgccaggccaggatgcttaggtggaaggaatcgcacctgcctccctctctctccctccttactggctgcaccctgtaattcatctccagtgtcgctaattttaatcccccatagaaacgacatcagactccgaacatcattcaggaatgacgcggcctttgcagacctttgattttcactagggcaagtgcagcaaagggttcaggattaggggtacagtcttggagtcatttggggaggaatggggcatagagaaggcaaggctgggtctggtacgttgttgcattattccaagccaaagataaatattccaaagggacccaaagtccacaactagttccaaggctgaagccctggagccagtcctgagggacccaaaggaggggccttcagacaacaggaaggtgctgtgagttgtgatgctcctatgattttttttttatttttttttttgagacggagtctctgtgtcgcccaggctggagtgcagtggcgcgatctcggctcactgcaacctccacctcccggggtcaagcgattctcctgcctcagcctcctgggtagctgggattacaggtgcgagccaccacgcccggctaatttttgtatttttagtagagacggggtttcaccatgttggtcaggctggtctcgaactcctgaccttgtgatccgcccgcctcggtcttccaaagtgctgggattacaggcaggcgtgagccaccgcgcgcctggcttttttgtttttctttttttgagacggagtctcactctgtcacccaggctggagtgcagtggcgcgatctcggctcactgcaagctccccctcccaggttcacgccattctcctgcctcaggctcccaagtagctgggactacaggcacccgccaccgcgcccggctaatttttatttttattttttttatttttttgtatttttagtagagacgggctttcaccatgttagccaggatggtctcaatctcctgacctcgtgatccgcccacctcggcctcccaaagttgttgttgttgttgttgttgttttaacacagggtctcactttgttgcccaggctggagtgcagtggcgtgatcacagctcactgcagcttcaaagtcctgggctcaagcaatcctcccgcctcagcctcctgagtaggtgggactacaggtgcacaccactgcacctggctaatttttttttttttttttttggtagagataggggtcttactatgttgcccaggctggtctcaaactcctggtaaactgcctttgcaaaattataactgatgattttatgacagtgaaagaaatcagacctaactgactctatcttgtttctaacccttaagctgtccttgttcattcctgggcataggccgaactaactttgggaaggaattcagttcatggtttgactctgaaacaaaattgataatagccctttcccgaaaagacccccttcttccctggggtccagtctgcctttgcaggactaacagattaa

SEQ ID NO: 1242318 - DNA, 4001 bp, Homo sapiens
tgttttgttgtccaccataccacctacgatttgacattctgtatctactgtttatcatttgtttatcccacaagagggtgaactcctactggatgaagattgtctatctgctttgttcactgctgtatcccagtaacaagaacagtgtctagcacatagtagatgttcaataaatatttgcttaatgaacagtgagtactactccaactctagaactttcagtcttaaccttattaagagctaaaaggcatcccccaatttccgggtggcatttgacttttgtgaacttatatgcagtatcttttgtttgacacatggttccctctgatttttcttagatgatagtaacacgaaaggaaaattcctaaccagtgcgcaagaaagaagaaaatcaaccatgcataacactgattttagataatatcttatccataaaccaacagagaaaatgccttctgaatttgtagcttctcctcttaaacctacggaaaataaactgaatatttgttgcctttgccggggtgggggggcgagaagggggccaggagagacgtgaaagcccaggagcccttcttcaacagcatcaactcttgtgtactccaacttactttttttgagggggtgggcaccgttcgaggtctctgccagggggtgtctgtttttcaccctttgaggtgcctattgtgctgtcttgagaacgaggagaggtgggtgaggagggggtaagaaaggatgctgcttgcggctccaactgcctccgaacacaaagtcgggaggcgagggatccgcgcggatgtctcgggggccagcgggcgcccgggccgcgcgctcggatcgcagcctcggccccggggtgccggcgggacgcgggctgcgcggacttaggcccggacagagccccatggcctcccggcggccgggcacggggccccgcgcacctcactcaccccggttcccccaatccggcacccttctcggttacctcgaactctcttcagcgaaatgggatccttctcctgttctgctgacattacagaccgcaaagcatgactcccccccaggccgcgggaattcggtctctttgatgctgcggcggcggctcctcctcctcgcggggccgctgcggctgcgaggcaagcctcggagccgaggcacggccgagggcggtggggacgcgggccgactttgcaaagtttgggaggaggacgaggcctcggggcggcggggcggcggggcggcgtgcgggcaccggcggggctcagcggcggtggccgggagcgcggcctgggggcggccccccacccggggccggcatgtgctgagggcgagtgcgccgccgccgccgccgcctcctcccactccttcttcttcgccgccgcctcaggagccgctgacaggggaagcaggaggctcgcggcccggccctggcggcacactcacagcgccctctgaggaggaggtctgctctctcgccgctcccgagtcgcagacacaaaagcccccagactggagccgcctgtaaaacccgctctggggcgggcgagggacgtggcgcggccccgcggcttccccgccctgagctccccagccccgcgcggggacgggcttcggggggcgggggccgctgcctcgtcccgcggcgcctcccgccaccgccgccgcctcgcgctccgcctcggcccagcccccacggcccgcgcgcgcctcttgctccaagccggggctcgcgggcccgcggctcttgcagcccgggtgggcagcgcgcgcctaggggccgccccgccccgcgcccggcgctccctcgccgaccgccaggcccgagaacgcccgaccccgcggccgacgctaccgggcccagctttcgcaaggaaagggcatctccgaacttcgtcggaggccacagcagcaggcgtctcggcctcgcagctagggatcggaaagatgaacgtaccatgcgaggaaactttgtaagcgggagctggagagttctcggcgggcatgtggggatccagattccccgactccgtgtccgcgtggccgtggtgtggacacctgtctgtagaatgcctccacttggtattttaacgacttgactcttcaagaaagagcgacgtagaataaataccagaaaggacggtgggcgggggaggggggagcgtgggtagaagcggtgacgcggctggatctcatttagacgttaaattttaggaggaacacccccagtgtgattgtaaattagatgtgatcaccggtccacattcttcagttgggctgtgtgaccggaggcgacttaggtaacctctctgggtctcagttttcttgtctataaaaggcagtggggctacatctcgaaggtctcttctagctccgacattgtttaacgcacttctacgaaattgttttccctggtttttgttttttgttttttgtttttgtttttgttttgctaggttttctggttatccactgggcttattttgatgtaagaatcaccgaaaagcactcatgaagcgtgggaggacacagaactagctacagacaggagtctcgtccttccggagacagacacccaactcattcagctgcacagtgtcacagagaacagatgttaacatgaagccaatgtacagcctcaacagctgcataccagacaatcgccacagcggctgatcgtcgttaagacatagcgtggccggaggcaaatgttaccctttatctaataagggtggtctggaattatggaattcctgattagaagagtcagactaggacaggctaaggaaaatattcttacaggaagcactctgaggagaaggttcctcctaactagaatgtaagcgccatgcaggcaggaattttgactggctcactgctgtatcctctggtacctaatactgagtaacacatagtaagtgttcgggaaaatattcattgatgtatgaataaagagatttgaagtggccctgggacgactggggtggcagggctttggtaagtgtaataaagccgaagcaaatggtaatataataaagcagattgggggccgggcgcggtggctcacgcctgtaatcccggcactttgggaggccgaggcaggcggatcatgaagtcaggagatcaagaccatcctggctaacacggtgaaaccccgtctctactaaaaatacaaaaaaaaaattagccgggtgtggtggcgggcgcctgcagtcccagctactcgggaggctgaggcaggagaatggcgtgaacccgagaggcggagcttgcagtgagccgagatcgcgccactgcactccagtctgggtgacagagtgagactctgtctcaaaaaaaaaaaaaaaaaaaaattaaaaataaagcagattgaatctaataatctatgttatagggtggttggaggaaaatttgaaagcactttggtaagtcaacaaagaaatgaaggccagctgtggtggctcacgcctgtaaatcccaacactttgggaggttgaggcgggaggatcactttagcccaggaatttgagaccagcctgggtaacaaagctagacccttctctacaaaataatttttaaaaattagccaggcgtggtggcaccggcctatagtcccaactactcaggaaactgaggcaagaagatcccttaagcccaggagttcaaggttgcagtgagcgatgattacaccactacacttcatcctggttaacagagcaagcaagaccctgtcccccctccagaaaaatatggaaatgacatattttcattttataactcttagtggaaggagaatggttcagaaaaatcattgctaagagattttgagttctttattgtaattccctaaagctagagactcagaaatagcatgaaaatcaagagaaatgaattggcttctttttaatgattcatcaagaataaaaagaccatcttacttgggcatagtcttttaaatcgattttacttccaaatcttgatggcttccttgcacataatcagaatta

SEQ ID NO: 1242319 - DNA, 4001 bp, Homo sapiens
caaacctaacctttaaccccaaagtctcaagagattcaaatagtttcacatcatctcagataccttcggcaaaaggtatgctgtcatatactttttgtaatccaggcctcagttttgtatttgtaaaatgaactaagtaccctgaaagtactttccagtatggagggggagggtggataccaaaagtattcaccctatacagtagaatattctgagtcagaggagtaagagatgataagagtataacagcagactagttagtataacaagatttgcaaagtattgggaaagcaaagaaatctttcctgcttggtttagtcaatcattcttagcacccaatggcaaagacagaaacagtcaccatgcttaacactcttgaaactccaccctccacagtaaagctttaatagcaatggcttcttcctcagtggtaatgatctttgttcggcacactactgatggctaccttcccaattcaggagcagagaaagagcatcagagtgagagtgcattcactgaacaaaaaaagcatctactgtactctcttctcattgaaaaatgtaccctttatcttcgttgattaaaaaaaaaaaccggattccttccggactcaaccaataagcaattctttctaaccaaccctgaccctccaatatgttctgtccaagggcactacatgtttccgtatcttataataaatatttaatgtaaccaaaagagcacacaacttcctcccacccccaaccttttgggaaaggtatgtggctaactagggctcttcccttcctgttggatcctcccagcgttgcagcaggaagcaaccagttcatagagataaagcaagctagtatttgtgcagcgcacaacctttcctgctcaggaaccaggccttcaggtctggcaaggataacagccaccacccatccgcaacctcatctcgcgaaccgagtaaagagttatcccgggttgggtgccactgagtagggagggcaagaaaagaaaaggctaggtgggaagtaatgtcagcctgccgggtcactgcgacaagtgcgcgagtgggtgatgggcgatccctcttaccctccctcccaccacccaggtcgcaacggagacaagggagctctaaacacgatttggggagggaaggtagagagagttgccaaatggggagtgggagagggagcggtcagagaaggttaaggaccgcgagaaccgcggggcggagggtgggggcggaggcccttggcccgctcagattttacggggtcctggacccgggatgggagaagcttagaggggcggccgtccaagtggaggggagatacagaagagacgctcgctcgaggggggaaagagggcagataagaaaaagacctgtaatgggagtctgcaccgaaggcaaggccaagagggaagcgaagaacccgtcagaggggcttcgggagaggacgcgagctgggaagggtgtacgccgagggggagggggcgctacacccgaaaagagagatggtgggaggagcggcggggccgtagaacccggggaaaggaattcgacgatgtgggagaaggcagtccgccaggggaaggacacgcagggaggggctctgaggccagcgaaggcctatggagaggtcgctcagagagcggcatgtgatggggacccctgtctgagcgggggagaagaggctgagctgggtaggagacggaaccgcacaaaaaggaagggctgagggaggcctatatcagtgcaggggtggccggcacgagggtccaccgggagtggcccgggtccccgaacgaggactgtgtagagtgcgagagcccatggcctcacctttaaagaggtagtcgtactcgtcgtcgcgggtgcccattgcgcggccgaggagcgaaagggcgggagcagcagtggtatctgtgggaccagggggcgtcgctgcaggggtaacccgagcgccgagcttcaactgccggactgggtgaagagcccctccctgccgctgcgccatttccggcaggccccagcctttaaggggaagtacttccgggggcggcgccccgcccctgagcccaacaagggcggtgtgcgcgagagtcgagatgcgtggggcttcaagctttagtcgctaaaggaggctcaaaggggaaactgagtcctggaactcctagctaccatagtcttagtggccgcttgctcatttctcgagctaccgtgccggaagcggctcgctggaaccaggcgggaccgcctgtgagtggtgggtttgtggatgggggcggggttctctgaggattagacagccgaaggcagctacacatgcgtggcggttccatggtgtaatggttagcactctggactctgaatccagcgatccgagttcaaatctcggtggaacctgcattggtttttgtttttttaatcttgacaacatctttaattcacttttttggtcactaagtaattgaacaactatgacacatcttaagatggagatgtaaaatttaatccttgcctatgaagacctcacaaatttcccactgcatttcaggtgctatctgctacctggcggggggttgtcttaatgagcttcttcactgccttttttttaaccctgggctttcaagccttgattcaaaagcttcagtgaaacttgaaaattccttttgctggaattttctacctccagcttcatgcacgggtaggcgcttgtcactcactcctctccggaaatctcgcaatctatctcattttcatttagagtacttcgcccaccctcctcatcaagattcatcaagaacttgagtcctatttgtaggcctctaatctaagtccgtttacataagtatttcatttaacatgccaagcaaaggatggtaatttccattttagcggaagtttggatactaagactcaagtgatttgccagatatcatgtcgcagggcctccctgtatttgaagagaattttgtcattccagaaaagcctttatccaattattgtcacacctcctacctcctatatgcaaactctcgatttagacttgtgggcaagtatgcctataacaagcagaataatgccccctgccaatgatgtccacttcccaattcctggagactgaataggttaggttacatggcaaaggggaattgaggttacagatgaaattaaggttgcttatcagctgacattaaattagggatattatcctggattagttgggtgggcccagtgttgtcataaggtccttaaaagtagaaaatgggctgggcacggtggctcaggccttaattccagcactttgggaggccaaggtgggtggatcacctgaggtcaagagttcaagaccagcctggccaacaaggtgaaaccctgtcgctactaaaatacaaaaaattagtctggcgtggtggtgggtgcctgtagtcccagctactctggaggcttaggcatgagaattgctggaacccgggaagcggaggttgcagtgagctgataccacgccactgcactccagcctgggcaacagagagagactcgttctcaaaaaaaaaaaaaaaaaagtggaaaatggaggcagaagaggtcagagtgatgtgacttgaaaagacctcaatctgcccttgctggctttgaagatggaggaaagggcccaggagcctaggaatctggaggcttctagaagctgggaaaggcatggaaacagattcttccataaggcccccagaaggaacacagccctgctgacaacttgattttagcccaatgagacacttgtcagacctgtgacctacagaactttaagcaataaatttgtgttgttttatgtcaccaagtttgtggtaatttgttatagaagcaatagaaaacaaatacagtgccaatttccgtgctttctctactgctataaagtgatagtaagtttatctaaggtcctgtaatcccagctactcaggaggctgaggcaggagaattgcttgaaccaaggagatggaggttgcag

SEQ ID NO: 1242320 - DNA, 4001 bp, Homo sapiens
caatttcttcatctgtaaaatgagaagaatggactgggtgaatatgaagtccttccactctcttaatctatgcttatgggtgctcagagcacgggaacccttccaggtgtctcttgtggttaggctgtccatgtgtcaggaccctgattgtgctcccagggacacacaagtgtgagagtggctacaactcaatggaagcaataagtaaacacgtacacactcacaaagctagatccctatatttgattaaaccatgggttagtagacaggaaccatgtcttatgcatcttcacacactcaaaatccagcccagtccaggcactgggcttaacaaatgtttactgcatgcattttgaggcaaatctttaaaatgtcatattaagaagcttttcagacatgtcggttatggattgaattgtgtccccctaaaattcacatgttgaagccctaactcccagtacctcagaatacaatgttttttggagctaggacctttatagagggaatcaagttaaaaagaggtcattagggtgggtcctaatccaccctcatggtctcttcacaagaaaggaactgggatcacagacatgaacacagggaggatggcatgaagagacatagggagaagacagccatccacagctaagcagaaaggcctggaacggattctccctcacagtcctcaaaagggaccaaccccgctgacatcttgatcttagactttcaggctccagaactgtgaggcaataaatttctgtttttgaaatcacacagttttaaagccacccagtttatggtactttgttatggcagctctagtaaactaatacaatatccagaagtagaattatataatgaaatctcccatcacactcaccactcagatctttcactccggcatacttcatttcgtatttctaaaatatatggacatttccttacataacaatacccttatcaaacctaacagaattaacactaatttaaaagcagatttaattcccagaagaaataaaccttatactaaaacacacacttacattcctccattaaaactattaacacttttaggccgggcacggtggctcatgcctgtaatcccagcactttgggaggcccaggtgggaagatcacttgaggtcaggagttagaaagcaggctggccaacatggtgaaaccccatctctactaaaaatacaaaaattagccaggcatggtagcgtggggtcccagctactcaggatgctgaggcaggagaatcacttgatcctgggaggcagaggttgcagtgacccgagattgtaccactgcactcaagcctgggcgacagagcaagactctgtctcaaatttaaaaaacaaaacaaaacaaaacaaaagctattaatactatcaaaaacaaaacaccaataagcttgaatttttgtcaaacaaccctcagaggataagcaagactctcagaataattcaatttcctaatcagctctcatattcaacaatttcctgaaagtaaaaacctatgtttctttattcaagtacagaaaagaaaggaagaatgcggtcagtattcatacccactccgtggtcactgaaaatgcacttttcaaactaatcccaagaaatttagtagacatcattaagtctttagtttaaaaacagtacgtgcaatggtattgtatgttatattgcacataatttaagcgcatgaaaattgacatgacagagctcaaaaccactaccaaaaaaaaaaaagataaatacaaaaccatacctttacagggtagagaaccgcttgttatgattttctaaaacgttagagactggagttaccaatgcttcaacaattgacaacttccaatcacatgtcctcttcaggaaggttactttttgtctaatgttaagacaaagagaaatgttaaagtcagaatggcctacttaaaaagtttttcaaaagagtctttggaaaagcagttcgctccatcaactttcaaaacaggcatcgctgtaaaaacccacaatccagctaattagtctcagctgtttgtcatatggcactgcagaccagtcaagtgatttttgcccctttcaagcttaccaagttccagttcgactggccactcagagggcggctttattaacctcttctggtgttagaagactctgcacttcagctctttcttccgcccacctaccccgtgaatcaaaacagtagaacatttgttttcttgagaaagtgccttgtattctcaaggcccttaaaggttatattcatattgttgcttacaaatacaatgcctgatccaaacaaacaatatgggggatcaaatggaagtggcaggagggatggggctagattacttaccagaccttgcagctggcctccaatttcataagtaaaactgcctacaagggagtccacccagatatcttgctggcatctcaaatccagcatgtcccgtactcacctcctttgcttttctccacaaccttgcttcaaacccacttctcttcctgtgtcttgaatcacacaatcccaacacagccagaaatctgatggctctcattaactcctccctctctgcccctcccacttccaattggccaccaagtcctaaggatattcatcttcttgctcctactccaagtttttattatttcttagatggctataataaaccacttatttggttttctggtccccacgtattcttgactctgatccatcctccacaccacacccaaagtgatctttccaaaaggcaaatgagagtccatcactctcctgttaatggctccccacaatctccacaataaaatccctgctccttaagcttctgccttcagtatcaccgcctccttcctataagctgctagagtccagccatcagtacgttttataattcgctaagttaagtggttctcaaactgtggttccaagaccagtattatagcatcttctaggaacttattagatttgcacattcttgggcccacccagctgaatcagaaattctgaggatagggcacaggtgtctgtggttcaacaagcactccaggtgattctgatacacactaaagtgtgagagctgctgctgtaaatccaccaagttctgttcactaagagaatcagctccttggctccttgtgccagcaatgctgagctggatacaccttccctgtgcttactgtttctagaaatggtcacccctgtatgctaattattcaatttatttcttggtctttgctgttgctttgtgacaatcttgaagacaggggttgtatcttgttttttgttcattcaccccacaatcacttattgagcacttatgaattattgggtgaaatgtcggacatagaactaatcaatctatcccttgcctctaggagaagctacgctttcattatggcagctcaacgtgtgactgaagactcaatctgtccaatctaaaaaaaccaccaccggcctcaagaactgtgggcaactaagaaaagtctgagcacaaccagtctgacatctcttctcatggtaaatgaaatggaattttcgtttcacacctgacgaaaatctcatgaaaatgcacctctttcttttttatatcacacagcaacctcgagaattttgagaacaatttagtaagaaaatgtatccagatttttaaatcccagattaaaattcattagagttagcttcctttaattacaagttcatattagcacttctcaaccatcaggatatataggaatctcctagggatctttcaaaatgctaattctgattcaatattcctgtagggggagatcgagaccatcctggctaacacggtgaaaccccgtctctactaaaaatacaaaaaaattagccaggtgtggtggcgggcgcctgtagtcccagctacccgggaggctgaggcaggagaatgccgtgaacccgggaggcggagcttgcagtgggccgagatcgcaccaatgcactccagcttgggtgacagagtgagactccgt

SEQ ID NO: 1242321 - DNA, 4001 bp, Homo sapiens
aagaaaacagtattgtttggtcaccacactggaatggaagccaggatattctgaaggatgccttggcactaatacaaattagcaaatgactttagcacttctgagcctcaatttcttcatctgtaaaatgagaagaatggactgggtgaatatgaagtccttccactctcttaatctatgcttatgggtgctcagagcacgggaacccttccaggtgtctcttgtggttaggctgtccatgtgtcaggaccctgattgtgctcccagggacacacaagtgtgagagtggctacaactcaatggaagcaataagtaaacacgtacacactcacaaagctagatccctatatttgattaaaccatgggttagtagacaggaaccatgtcttatgcatcttcacacactcaaaatccagcccagtccaggcactgggcttaacaaatgtttactgcatgcattttgaggcaaatctttaaaatgtcatattaagaagcttttcagacatgtcggttatggattgaattgtgtccccctaaaattcacatgttgaagccctaactcccagtacctcagaatacaatgttttttggagctaggacctttatagagggaatcaagttaaaaagaggtcattagggtgggtcctaatccaccctcatggtctcttcacaagaaaggaactgggatcacagacatgaacacagggaggatggcatgaagagacatagggagaagacagccatccacagctaagcagaaaggcctggaacggattctccctcacagtcctcaaaagggaccaaccccgctgacatcttgatcttagactttcaggctccagaactgtgaggcaataaatttctgtttttgaaatcacacagttttaaagccacccagtttatggtactttgttatggcagctctagtaaactaatacaatatccagaagtagaattatataatgaaatctcccatcacactcaccactcagatctttcactccggcatacttcatttcgtatttctaaaatatatggacatttccttacataacaatacccttatcaaacctaacagaattaacactaatttaaaagcagatttaattcccagaagaaataaaccttatactaaaacacacacttacattcctccattaaaactattaacacttttaggccgggcacggtggctcatgcctgtaatcccagcactttgggaggcccaggtgggaagatcacttgaggtcaggagttagaaagcaggctggccaacatggtgaaaccccatctctactaaaaatacaaaaattagccaggcatggtagcgtggggtcccagctactcaggatgctgaggcaggagaatcacttgatcctgggaggcagaggttgcagtgacccgagattgtaccactgcactcaagcctgggcgacagagcaagactctgtctcaaatttaaaaaacaaaacaaaacaaaacaaaagctattaatactatcaaaaacaaaacaccaataagcttgaatttttgtcaaacaaccctcagaggataagcaagactctcagaataattcaatttcctaatcagctctcatattcaacaatttcctgaaagtaaaaacctatgtttctttattcaagtacagaaaagaaaggaagaatgcggtcagtattcatacccactccgtggtcactgaaaatgcacttttcaaactaatcccaagaaatttagtagacatcattaagtctttagtttaaaaacagtacgtgcaatggtattgtatgttatattgcacataatttaagcgcatgaaaattgacatgacagagctcaaaaccactaccaaaaaaaaaaaagataaatacaaaaccatacctttacagggtagagaaccgcttgttatgattttctaaaacgttagagactggagttaccaatgcttcaacaattgacaacttccaatcacatgtcctcttcaggaaggttactttttgtctaatgttaagacaaagagaaatgttaaagtcagaatggcctacttaaaaagtttttcaaaagagtctttggaaaagcagttcgctccatcaactttcaaaacaggcatcgctgtaaaaacccacaatccagctaattagtctcagctgtttgtcatatggcactgcagaccagtcaagtgatttttgcccctttcaagcttaccaagttccagttcgactggccactcagagggcggctttattaacctcttctggtgttagaagactctgcacttcagctctttcttccgcccacctaccccgtgaatcaaaacagtagaacatttgttttcttgagaaagtgccttgtattctcaaggcccttaaaggttatattcatattgttgcttacaaatacaatgcctgatccaaacaaacaatatgggggatcaaatggaagtggcaggagggatggggctagattacttaccagaccttgcagctggcctccaatttcataagtaaaactgcctacaagggagtccacccagatatcttgctggcatctcaaatccagcatgtcccgtactcacctcctttgcttttctccacaaccttgcttcaaacccacttctcttcctgtgtcttgaatcacacaatcccaacacagccagaaatctgatggctctcattaactcctccctctctgcccctcccacttccaattggccaccaagtcctaaggatattcatcttcttgctcctactccaagtttttattatttcttagatggctataataaaccacttatttggttttctggtccccacgtattcttgactctgatccatcctccacaccacacccaaagtgatctttccaaaaggcaaatgagagtccatcactctcctgttaatggctccccacaatctccacaataaaatccctgctccttaagcttctgccttcagtatcaccgcctccttcctataagctgctagagtccagccatcagtacgttttataattcgctaagttaagtggttctcaaactgtggttccaagaccagtattatagcatcttctaggaacttattagatttgcacattcttgggcccacccagctgaatcagaaattctgaggatagggcacaggtgtctgtggttcaacaagcactccaggtgattctgatacacactaaagtgtgagagctgctgctgtaaatccaccaagttctgttcactaagagaatcagctccttggctccttgtgccagcaatgctgagctggatacaccttccctgtgcttactgtttctagaaatggtcacccctgtatgctaattattcaatttatttcttggtctttgctgttgctttgtgacaatcttgaagacaggggttgtatcttgttttttgttcattcaccccacaatcacttattgagcacttatgaattattgggtgaaatgtcggacatagaactaatcaatctatcccttgcctctaggagaagctacgctttcattatggcagctcaacgtgtgactgaagactcaatctgtccaatctaaaaaaaccaccaccggcctcaagaactgtgggcaactaagaaaagtctgagcacaaccagtctgacatctcttctcatggtaaatgaaatggaattttcgtttcacacctgacgaaaatctcatgaaaatgcacctctttcttttttatatcacacagcaacctcgagaattttgagaacaatttagtaagaaaatgtatccagatttttaaatcccagattaaaattcattagagttagcttcctttaattacaagttcatattagcacttctcaaccatcaggatatataggaatctcctagggatctttcaaaatgctaattctgattcaatattcctgtagggggagatcgagaccatcctggctaacacggtgaaaccccgtctctactaaaaatacaaaaaaattagccaggtgtggtggcgggcgcctgtagtcccagct

SEQ ID NO: 1242322 - DNA, 4001 bp, Homo sapiens
aggttggaggactcacatatcctgatttcaaaacactatgtagctacaataatcaaggtagtatgatactagcctgaggacagacatacagatcaatggaatagaactgacagtccagaaataaacctttacattcatggtcaatttatctcaacagaggtgccaaaactattcaaagaggaacagtcttttaaacaaatggtgctgaaagaactggatatccacatgcaaaaagttgaagtcagaccccctgcctcacaccatatttaaaaattaacttaaaatgggtcaaagaatgaaatgtaagagctaaaaactataaaacttttagaagaaaacataagtataaatcttcatgatcttgaatttgacaatgttttcttaactttgacatcaaaagcacaaacaacaaaaggaaaaataggctcggtgcagtggctcaagcctataatcccagcactttgggaggctgacgcaggttgatcacttgaggtcaggagttcaagaccagcctggccaacatagcaaaaccccgcctctactaaaaatacaaaaattagccaagcatggtagcacacacctgtaattccagctactctggagtctgaagcaaaagaatcacttcaacccaggaagcggaggttgctgtgagccaagatcatgccaccgcattcctacctgggcgacagagtgagactctgtctcaaaagaaaaaaaaggaaaaatagattaaatatacttcaacgaaattaaaaatcaaggcacgtcacagaaattaaggaaggaagaaaaaagggagggagggaggaagagagaatggtagaaaggaaggaagaaaaaagtaggaatgaaaacataaaacaacataaaccaacataaaatacagaaaataatgatcctcagtcaagttccttcagcattatattaacctttcttcacttctaaccatctgcagaaactgttttccagattgtattttccctctaaagcaagtttttaaggccgaaaaaaaaaaaagaacaagaacagtgagtggagaatcaacaaatttaattagcaatgattacagaaaacttaaatagcacacacaactctataatccctctacccccaattccaacatctgactgatcaaccaaccataaaatgtgagaatccatccagaaggaaagaacagctgttaagctgtaggggtaaggaccctgtggcagaagaccctgaggccatgtgggcccaggtggccagcaggagcggaaaggctgggaaggctcctcagtccagggctcacaagactcccttcgcttcaggcctgactttgctgaactggtgatctattgggacagagacaggctttggcaatagttaccaaagcctgtcatcatatctgcaccaccaccagtcccgaccggagggcctggctgccaggtagttttcagtctaactgacaggagaagagagagcccctccctcgcagctagtctgcagtccagaccctcaccaaccggagggcaaccaggttaaacagttaaactgaaagcaaaagagggaggaatgaaccggggggcgtgcgggaggtcggggactttcctcctttccctcctggaaagtttcctacccctgatgggcatcctcccacctggatgcaacccggaggcgatctgagaccctggccggacctgggaccgcacctggccagcaccaggcagttgtcatcactggggtctgcgctgagggcctgggagagaagccactcttcaggcgggctcgggcgcctggaggcggggaggaagggcggcgcactcggaccccagccctaggacggccccagggggacgcctcgctcggccctcccggagggaccggacccgccgcgcgcctcccgctcctcaggccccctcacctggctcgccccgccgtcctgtccccgcctggctcgggtcctcgcgcgccgcgtccacccgccgccggccttttttgggtcgttggcgggtattttccgcctggccccacatcacttcccgtaaaggagagcgaggtggggcgggaccttctctcctccacctcccgccttctcctgtcacctcgggagcggcccccgcccggctggcggggggcggggtgctgtcgcgctctccccggcggccgcgcctccgaggggtcctctgtgagccccgaaaaggccccgctcgcctcctttgtcccaacactagtttccgctgccccattctggaaggcgctacaaaatataggagtgttttcgttttgggacacaggagggacatttacaaactgcaccaaggaccggtgcgcggcgaggtgtcgtttggggactctcccctattcacctccccaaaaagccatgttctaagggtgttttccacggcatcagttcgcggtcgccaccgtagcagccggaggtgccgggcgtactcacgccggccccgcccgaggttcccgagtccgcgcggctcctgaggcggcgtcccaggcccggccctgcccccggcttcccgcccctgcggctcctggcttaggtcggcctggacacggcgtttccggggcaagggaatgcccaggattcctggaaataacatgggagaaaaataagtaaaaaatttcgcaggaaaaaaatcaatgtaattccgggaggaaatggcaaacggagtctctgctcacactgtgtaattcaagaatataaaaccactgtaaatttctaagagtgttagagcaatgagtttaaaaagaagaaaactacagtatgttaaggaaccgcctctgtcggaagaaacctgcgcgcctttgctgccacccagcggctctcttctcccagcgccaacggtgtcgctccggcctgcggggtagtgaacctgggactgcgtagggggtcagacctcgtggttcccactcagaggcagccaagttcatccctctcagtggccaggaggtgtgaacagcagcccttgggcctgtccctatggagtctaaggcaaaggccctttgaaccaaatgtttccacttctaagcagagtaaaatgttgagaagccttagttcagcttcccttctgccttctaagccgtctcgctgacttgtgtctacctccaccgcaaattccagctgtcgcaggcccacccggtcaactccatcacctttccagtctgtagctactcacagttggcattacagcagttagcttctcaggtgggtccaatttacaaaatcacatataggatgaaccatatgaaattacaaacagttggcaatttcatacatttgatataacatttccaggcaaacataacacagtaaactcgggtttagagataacaaatgtcctaacaggttgataacttcaagagctcttcccgtgtgagagaagggccatcagactgttggtgaggttaagagagaaaaaggccgggttaggtggctcacgcctgtaatcccagcactttgggagcccgaggccggcagatcacgaagtcaggagatcgagaccatcctggctaacacggtgaaaccccgtctctactaaaaatacaaaaaattagcagggcgtcgtggcacgcgcctgtagtctcagctacttaggaggctgagggcaggagaatcgcttgaacccgagaggtggaggttgcaatgagccgagatggcgccactgcactccagcctgggcgaccgagcgagactctgtttcaaaaaaaaaaaaaaaaaaaaaaaaaaaaaaaaagggaaaaggtagcctcatgttcatgtccagaggaatagtcctgggaatcactgatcagctaaaatctgggaaaccaataatgtagtaattgctaatggctgatatggcacagggaaagcctgccttcagctttccccactcctgtggccaggcaaggctctcaccaggagtataccagacaggagatcagaaaacctaggatggtgctatggcccattcatcacccattcattcactcattcatcaagtcaggcaccctattagtaaacaagg

SEQ ID NO: 1242323 - DNA, 4001 bp, Homo sapiens
aaagaggtcattagggtgggtcctaatccaccctcatggtctcttcacaagaaaggaactgggatcacagacatgaacacagggaggatggcatgaagagacatagggagaagacagccatccacagctaagcagaaaggcctggaacggattctccctcacagtcctcaaaagggaccaaccccgctgacatcttgatcttagactttcaggctccagaactgtgaggcaataaatttctgtttttgaaatcacacagttttaaagccacccagtttatggtactttgttatggcagctctagtaaactaatacaatatccagaagtagaattatataatgaaatctcccatcacactcaccactcagatctttcactccggcatacttcatttcgtatttctaaaatatatggacatttccttacataacaatacccttatcaaacctaacagaattaacactaatttaaaagcagatttaattcccagaagaaataaaccttatactaaaacacacacttacattcctccattaaaactattaacacttttaggccgggcacggtggctcatgcctgtaatcccagcactttgggaggcccaggtgggaagatcacttgaggtcaggagttagaaagcaggctggccaacatggtgaaaccccatctctactaaaaatacaaaaattagccaggcatggtagcgtggggtcccagctactcaggatgctgaggcaggagaatcacttgatcctgggaggcagaggttgcagtgacccgagattgtaccactgcactcaagcctgggcgacagagcaagactctgtctcaaatttaaaaaacaaaacaaaacaaaacaaaagctattaatactatcaaaaacaaaacaccaataagcttgaatttttgtcaaacaaccctcagaggataagcaagactctcagaataattcaatttcctaatcagctctcatattcaacaatttcctgaaagtaaaaacctatgtttctttattcaagtacagaaaagaaaggaagaatgcggtcagtattcatacccactccgtggtcactgaaaatgcacttttcaaactaatcccaagaaatttagtagacatcattaagtctttagtttaaaaacagtacgtgcaatggtattgtatgttatattgcacataatttaagcgcatgaaaattgacatgacagagctcaaaaccactaccaaaaaaaaaaaagataaatacaaaaccatacctttacagggtagagaaccgcttgttatgattttctaaaacgttagagactggagttaccaatgcttcaacaattgacaacttccaatcacatgtcctcttcaggaaggttactttttgtctaatgttaagacaaagagaaatgttaaagtcagaatggcctacttaaaaagtttttcaaaagagtctttggaaaagcagttcgctccatcaactttcaaaacaggcatcgctgtaaaaacccacaatccagctaattagtctcagctgtttgtcatatggcactgcagaccagtcaagtgatttttgcccctttcaagcttaccaagttccagttcgactggccactcagagggcggctttattaacctcttctggtgttagaagactctgcacttcagctctttcttccgcccacctaccccgtgaatcaaaacagtagaacatttgttttcttgagaaagtgccttgtattctcaaggcccttaaaggttatattcatattgttgcttacaaatacaatgcctgatccaaacaaacaatatgggggatcaaatggaagtggcaggagggatggggctagattacttaccagaccttgcagctggcctccaatttcataagtaaaactgcctacaagggagtccacccagatatcttgctggcatctcaaatccagcatgtcccgtactcacctcctttgcttttctccacaaccttgcttcaaacccacttctcttcctgtgtcttgaatcacacaatcccaacacagccagaaatctgatggctctcattaactcctccctctctgcccctcccacttccaattggccaccaagtcctaaggatattcatcttcttgctcctactccaagtttttattatttcttagatggctataataaaccacttatttggttttctggtccccacgtattcttgactctgatccatcctccacaccacacccaaagtgatctttccaaaaggcaaatgagagtccatcactctcctgttaatggctccccacaatctccacaataaaatccctgctccttaagcttctgccttcagtatcaccgcctccttcctataagctgctagagtccagccatcagtacgttttataattcgctaagttaagtggttctcaaactgtggttccaagaccagtattatagcatcttctaggaacttattagatttgcacattcttgggcccacccagctgaatcagaaattctgaggatagggcacaggtgtctgtggttcaacaagcactccaggtgattctgatacacactaaagtgtgagagctgctgctgtaaatccaccaagttctgttcactaagagaatcagctccttggctccttgtgccagcaatgctgagctggatacaccttccctgtgcttactgtttctagaaatggtcacccctgtatgctaattattcaatttatttcttggtctttgctgttgctttgtgacaatcttgaagacaggggttgtatcttgttttttgttcattcaccccacaatcacttattgagcacttatgaattattgggtgaaatgtcggacatagaactaatcaatctatcccttgcctctaggagaagctacgctttcattatggcagctcaacgtgtgactgaagactcaatctgtccaatctaaaaaaaccaccaccggcctcaagaactgtgggcaactaagaaaagtctgagcacaaccagtctgacatctcttctcatggtaaatgaaatggaattttcgtttcacacctgacgaaaatctcatgaaaatgcacctctttcttttttatatcacacagcaacctcgagaattttgagaacaatttagtaagaaaatgtatccagatttttaaatcccagattaaaattcattagagttagcttcctttaattacaagttcatattagcacttctcaaccatcaggatatataggaatctcctagggatctttcaaaatgctaattctgattcaatattcctgtagggggagatcgagaccatcctggctaacacggtgaaaccccgtctctactaaaaatacaaaaaaattagccaggtgtggtggcgggcgcctgtagtcccagctacccgggaggctgaggcaggagaatgccgtgaacccgggaggcggagcttgcagtgggccgagatcgcaccaatgcactccagcttgggtgacagagtgagactccgtctcaaaaaaacaaaaacaaacaaaaaaaatcctgtagggggctcaggagtctgtatttctcctagtaagcacccaggtgatgcccaggtaatactaacattcctaactctggaactataatttgaatagcaagtaaaattatgacaataccaattttcatagtctgcttaaagcaacaaaaccttttttggatgcttttgtattgaaagctttctaaaatatctttcagacttcagaataaagatggcatgctcaacatgtacatgtggttctgctgcctcccaaaatctcactaatatagcaataaagaatgttttatttcttttagacataaactcacaaggacaaagatcaggtagtggaagcaacaaaatggtagaagctacagagtagatggactagaggtaactgattagcagacctcggaaagctgactctttatctgccagtagggaaatccaagaaggaactcatcacagaatctccagaaagtctcagggattcagaaccccaaa

SEQ ID NO: 1242324 - DNA, 4001 bp, Homo sapiens
aggaatatacttgagagatgacatttaaaatctgctttttcagaaaagaaaaagtcccactcaagactgactgccaagaacttgcaattcaaacttccctaagcccagacatcataacacccaggagattttagaccattcaatctatatgaaagaatccagaatgagcaaacaaaccatagcctttactaatacttaaagagtgttctataccaaatactctttttttaaaaaaagataaattatccttaaaaatacacaaatatttaaacacacgtattaccaaagcactagctctctattatttcccaacccagaaattcatggtgaaatatgctgtaagaaccatacgaaagatgactaaataagccactattagaggccagaaacatcaccaacacaaccaaaagctgaggtattcttaaggtacttaattaacctgcaactatttaacaggagaaatgatgttaaggtggtcacttctaaaacagcttaaaaccagctttgacttggtcttcagtttatgataagttaagagatcttattacctgaacacagtgtcttccagtacaaaagtagaaaggacagctcccagccaggatcagaaaaactcttgattcaattggaagtaactgagaggtatatcacatgttgtgattcacttaacaataattagaaccaaagcaaaatatacagggaggcaggtagaatgtaagttcatttccttggctgagaagctgttaaacattcaaaccgaaggatttaaaatactgagaagtcttgcttctcaggagatggtagtaaagaggtgaaccatattttcctgaccacatcatttccaaaagtcaccaattcccttaacatccattaacactcacagaacaaattaacgctctatagacattattccatcattagtcacattttgctttctcctgcacttgatccaaaggaagtgaagagaaaatggtaatcagttactatagcaagtcttgcgccccactactttccatttcctctcttttccatctcctctgtcttctctgctcaacctccctttactatgatgttgcttcctcttttcctttctgtctcacacccagatccctttactttctccatcaagtatcctcattctgccctctgatcccttgaactcttcttccacctacaattttcttctgtcccctcctacgacatctcagtccagacctcctgtggccagccgtccccttcttcctcacctcctgaccgctcattcccctgaattcccttccagttgcctggttctcacctctctgtcccttgtgtcctctgtccctttacttcacatccctctcattgcccccatccctcatttcccccttcacatttccttcctctcctgtcttttaatcattggcacgtccactatccccttctctctacatgagatttcctgagtcttccccccaacacattttgtccctcaaagacccctccctgtcagtctccgaaccctctcgttcccccaatacccctagtccttgttcctctgttccccttcccgttcctttgcccccaagttcccccttcgcccttagcctcacgttcccgctcgcctctctccctcacgccctcgcccctctccctcacgccctcgcccctctcagtgcccccgccaccttgcagtccccggggtctcctctcccgggctcccaagcgccccccgccctttccccgtcccctagtacccgccccccaattctctacccggtcccgggccgcggcccctccctcaccgatggtggagatgaaggtggtgttgaaggcgtcctctgagaagcggaacaggaggcaggtcttgcctacccccgagtcgccgatcagcaggagcttgaagagataatcgtacgtcttcgccatcttctcgctccggccctctgaccggggagccagaggaggcggtggagagaggcggggagggggccgcgggcgagggggcgtgcccgccaatccgccgctgctcgccccgccccacgccccgcccctcctctcggagaaggcctgcgcgccccgccccgtgcggccaatcggcgagggcttcgtcatcaccgcccgcgccccgggacttcatgggacttgtagttcctccggggagcctcgggcgtgccccgcgaggactgtccaggcggctccagcggataaaagacctgctatgggcggggtgacagggtggaggcgtttccacccgagctgggaagggaggccccgtttcgtactctgctggtcgagccgcgggaacttaactttgttatttctttgtgtgcagacgccttccaaatccaggacctcagaatcagagccccgtagttcccgcatctcttccgccgagacctggagcagagatgctttctttccttggcgctgctgtggcgcagcctacgggttatctgcagagggcattatccagcttctccccgaggccatgcccagcaccactataaccccctcccgcagcccctcagtcacagagctgagaaagaatggttaccatgctaactcgaacctcactcgtgcccccttcttcacgccacacagaccagagccaaatacaatgagtatttagagaatctgctacgctgatcgctcccctctcctcgcaggaggatggatttttaaatctgggaagtcttgtgctacaggtctgtgccccatgaaactgcaagcatcctgtgaggcgggccacgggaatttagagagtaagatttgaatttagtcttggctctgctgcaaaaccgctgtgacaagtcacacaggcactggacatttcagttttctcatctgtaaaatggatatgaaacaagatacttcatagggttccagtgaaacttaaatactaaatgtgaaagttctttgaaacccataaggcactgttagcagtgatggtaatattcattactcttcagtaggctctcacttaattgatgacgaatatagggaggaaacagcattctgttatactcaagttaatcctttattatttattgtcttaggctaattctctgttttgtggatgtattgttcagtcccctttcatttgctagtggcagaaacccaaccggattagctgttgtgaaaggggtgttgactggttcaggtaatgtggaagcaaaaggctaagaaggtgtgggactaggagtccaccctgccagggctctgtgtctctcatctgttgttctcccttcgaagttttaatttctaatatgtcaaataccgacaggtaaaacccacatgaaaaaaagcttcttggagtcttcaataagttttaagaggatgaaggggtcttgaaaccaaagtatttgagaaccactggtccagacatttaccttagctataaggaaacaccttctggaaggctagaggttattaagggaaccagtggactccaccattagtggaataagaaaagggggggggggaaaaaccgtggacagttagttgaacaaaccagcaggcttttctaaggacacatactgtgtgccttgtgactttaggaacagtgccactgataatccattctcagttgcattgtggcagaagacttagttggccctagaattggccttcattttctatgcgggtaaaagatgaaatgtgtcatcattaactgattgatcatacagtagccagagggctgctgctgctgctgctgctgcttacggaatgtctcattcctagagtccactagataggaacaaagctctaatgagttcaaagtcacagtgtctgcccctaatgaagaaggattctgccctctggcacaggctgagccctcttgcccaagccagtccttgagcaagcctctgaacgtggcttcagccatgatctgaacagtgtggattgttctatatcttcctcctcattcctggaaaagaaggggaaaaaattccgcaaagaccagtggaatttatttctttttaaaaatgtatatttatggccaggcgcggtggctcacgcct

SEQ ID NO: 1242325 - DNA, 4001 bp, Homo sapiens
tgcggtgagccaagattgtgccattgcactccagcctgggcaacaagagccaaactctgtctcaaaaggaaaaataaataaataaataaataataaaaaaataaattcagcacttctattcatcaaaggacaccactaagagagtgacaagtcaaaccacagtagagaaaacatttagcacaaacataactgagggctgataaccagtatataaagaacttcacatcagtaagaaaaagataatagaaaaataggcaagagatttgaacaagcacatcacagaagatatcaaaatgggcaaaaacatatgaacagatgtccaacatcattattaatcaggaaaattaaaatcacattaagacattactgtgtaaccagcagaatagttaaaatcaaaaaggctgaaaaatatcgtgttggcaagcatgtgaaacaacgaaacactcaacactcctgatgtatttttatataaaattcaaaaacaagcaacattagttcatctcattagaaaccagtatagcagttaccactgtaaaaaggggaaaatattaaatactacacaggaaggcttctgaggaccattctattaagtggtgattacataggtgtatattcattttgtcttgctctatcgcccaggttggagtgcagtggcctgatcacagctcactgcagcttatacctcccaggctagatcctcccttctcagcctcctgaatagctgggcctacaggtgcacgccaccatgcctagctaatttttcctatttgtagagatgcgggtctcactatcttgaccaggctgttctcgaactcttgggctcaatcgtcctcccgcctccacttcccaaagtgctgggactacagacgtgagacacgacgcccggccagtatattttgtaataattcacggagttgtatacagttgtgaatgtgaatttttctacatgtatattacattgcgctttagaagttaaaaacaaacaaacaaacaaaaaaacaggggccaggcgctgtggctcacggctgtaatcccagcactttgggaggcagaggcgggtggataacctgaggtcagaagttcgagaccagcctgaccaacatggtgaaaccccgtctctactaaaaatacaaaaatcagcctggcggcgtggtggtgggggcctgtaatcccagctcctcgggaggctgaggtaggagaatcgcttgaatccgggaggcggaggttgcagtgagccgagatcgcgccactacactccagcctgggcggaagagcgagactccatctcaaaaaaaaagttttaagaaaaccaaacctcacttcagatcattctctaggcatcatgtgaatggttttccgcattagatgatgaaaacactgttttggcaatcggagattggtactttctaagcacggtgtaatggaaagacagatcaggaatccggaagccctggctgtgatattaaacagctgtggctacaccgctctgatctcggacttctcgctcgaacccataaaataggtgttgcctataaaggctctaatgtttctcccctagttctaaagactgaggtccacttgtgttttcgccccagcagctgagggtcggtcgggcgcggacacgccctgccacgtccgggtttcacactgcgcgcggaggccccaactgccgctgagcactggaccggccaggacgcaggtgggcgaggacgagccgcggctctggagggcccagcctgcgcctcacacactcacctcggtccgcagcgctcctctctccagcaggccccgcgctccgacttcaccccgcgggcgtggcacgcgcccgacccgcacggcccccaacgcccctggcttacgctccacttctctactcgcttgccccagccttctgcgcacaacccagatgagttgcagttcccagctgcacgcctcgggaagcgccgcactctccttagggctcggtctctggccgctgcgcgcggtccgccagcggctttcagaattcccgccaaaccctctcgcccagggtcacgcccgcgtcgacgtaacgtatccccgcctcccggatccgccttctccccgcttccgccctgcgcgctaacccaagacgggagctcgagagcttgatcctgcgcgagtttacagactgccctcttccctttttgcgtaaggactaattcaaactttatgccgggggcggtggctcacgcgtgtagtcccagctgctcgggaggccgaggcgagagtatcgtctgagcctaggagttcgaggctaaccacggcaacgcccctactcctaccccagtccctcgcgggtggggcgagggatttcagggggcggtgggggaagacttaaccgagttgccgtcttctgtttaccagatcgaagaccacgactcccaagaggtaatgcgtcggcccgggactacatctcccggcatgcatcgccggcgggtccgcgagttctcaccatcgcagctggactattagcgggggccctagcgctcttgtggtttgtttcggcagtatctgaatgtcagcttttggcacttctggtcgctctgagcctcctactcgcattcctggagcaaggtgctttccaggcctcatggaggtggaggagctgaggaagctcgagaagatggatagaagtgggaaatggagctagcgtacgggagagggaaatggctggaatattcgtcaatctgtggtgctttactggagatttgcaggagttcagaggaagggggcattgaatttcataacctaaaccgtatcgtggtttaccagaaagttttgacccgtgattccggttttaaaggctgagtagggccgggcgcggtggttcacgccagtaatcccagcagtttaggaggccaaggcaggcggatcacctgaggtcaggggttggagataaacctggccaacgtggtgaaacctcgtctttagtaaaaaatacaaaaattagccaggttttgtggcacatgcctgtaatcctagctactcgaaaggctgaggcatgagaatcgcttgaactcaggaggaggttgcagccaaccgagatctcgccgctgtactccagcctgggcgacagagcgagactgtgtcaaaacaacaccacaagctagctgagtagggattcttgggcgaagtggaagacattataagcaaatagggtagtatgggcatggaaacgaactacatgattaaagattagtattatctggcgagggaggaaaagtgccagagcaagtgccgaaactggaaggttacatttagttcaggatatgaagatcatataaggcctgcacggtggctcacacctgtaatcccagcactttgggaagccaaggtgggggaggatcgcttgagctcaggagttggagaccagcctgggcaacatagtgggaccccatatctcaaaaaaaaaaaaaaaaaaaataagctgggcgtggtggcttgtgcctgtggtctcagctatcccggaggctgaggtgggaggactgcttgagctcaggacgtcaaggctgcagtgagctatgatgggccactgcactccagcctgggctacagagtgagaccttgtctcaaaagacaagcgacaacaacaaaacatgtaaggagaggccaggcgcggtggctcaagcctgtaatcccagaactttgggaggccaaggtgggcggatcacgaggtcaggagttcaagaccagcctggccaagatggcaaaaccccatctctactaaaactacaaaaattagccgggcgtggtggtgcatgcctgtaatcccagctctttgggaggctgaggcagagaagtgcttgaacccgggaggtggaggttgcagtgagcgagatcacgccactgcactccagcctgggcaacagagcaagactccgtctcaaaaaaaaaaaaaaaggtaaggagctttggtctctaggtactgaagaaatcattgaagtttttaagaagacaagtcatttggttagatctatttt

SEQ ID NO: 1242326 - DNA, 4001 bp, Homo sapiens
aaactctgtctcaaaaggaaaaataaataaataaataaataataaaaaaataaattcagcacttctattcatcaaaggacaccactaagagagtgacaagtcaaaccacagtagagaaaacatttagcacaaacataactgagggctgataaccagtatataaagaacttcacatcagtaagaaaaagataatagaaaaataggcaagagatttgaacaagcacatcacagaagatatcaaaatgggcaaaaacatatgaacagatgtccaacatcattattaatcaggaaaattaaaatcacattaagacattactgtgtaaccagcagaatagttaaaatcaaaaaggctgaaaaatatcgtgttggcaagcatgtgaaacaacgaaacactcaacactcctgatgtatttttatataaaattcaaaaacaagcaacattagttcatctcattagaaaccagtatagcagttaccactgtaaaaaggggaaaatattaaatactacacaggaaggcttctgaggaccattctattaagtggtgattacataggtgtatattcattttgtcttgctctatcgcccaggttggagtgcagtggcctgatcacagctcactgcagcttatacctcccaggctagatcctcccttctcagcctcctgaatagctgggcctacaggtgcacgccaccatgcctagctaatttttcctatttgtagagatgcgggtctcactatcttgaccaggctgttctcgaactcttgggctcaatcgtcctcccgcctccacttcccaaagtgctgggactacagacgtgagacacgacgcccggccagtatattttgtaataattcacggagttgtatacagttgtgaatgtgaatttttctacatgtatattacattgcgctttagaagttaaaaacaaacaaacaaacaaaaaaacaggggccaggcgctgtggctcacggctgtaatcccagcactttgggaggcagaggcgggtggataacctgaggtcagaagttcgagaccagcctgaccaacatggtgaaaccccgtctctactaaaaatacaaaaatcagcctggcggcgtggtggtgggggcctgtaatcccagctcctcgggaggctgaggtaggagaatcgcttgaatccgggaggcggaggttgcagtgagccgagatcgcgccactacactccagcctgggcggaagagcgagactccatctcaaaaaaaaagttttaagaaaaccaaacctcacttcagatcattctctaggcatcatgtgaatggttttccgcattagatgatgaaaacactgttttggcaatcggagattggtactttctaagcacggtgtaatggaaagacagatcaggaatccggaagccctggctgtgatattaaacagctgtggctacaccgctctgatctcggacttctcgctcgaacccataaaataggtgttgcctataaaggctctaatgtttctcccctagttctaaagactgaggtccacttgtgttttcgccccagcagctgagggtcggtcgggcgcggacacgccctgccacgtccgggtttcacactgcgcgcggaggccccaactgccgctgagcactggaccggccaggacgcaggtgggcgaggacgagccgcggctctggagggcccagcctgcgcctcacacactcacctcggtccgcagcgctcctctctccagcaggccccgcgctccgacttcaccccgcgggcgtggcacgcgcccgacccgcacggcccccaacgcccctggcttacgctccacttctctactcgcttgccccagccttctgcgcacaacccagatgagttgcagttcccagctgcacgcctcgggaagcgccgcactctccttagggctcggtctctggccgctgcgcgcggtccgccagcggctttcagaattcccgccaaaccctctcgcccagggtcacgcccgcgtcgacgtaacgtatccccgcctcccggatccgccttctccccgcttccgccctgcgcgctaacccaagacgggagctcgagagcttgatcctgcgcgagtttacagactgccctcttccctttttgcgtaaggactaattcaaactttatgccgggggcggtggctcacgcgtgtagtcccagctgctcgggaggccgaggcgagagtatcgtctgagcctaggagttcgaggctaaccacggcaacgcccctactcctaccccagtccctcgcgggtggggcgagggatttcagggggcggtgggggaagacttaaccgagttgccgtcttctgtttaccagatcgaagaccacgactcccaagaggtaatgcgtcggcccgggactacatctcccggcatgcatcgccggcgggtccgcgagttctcaccatcgcagctggactattagcgggggccctagcgctcttgtggtttgtttcggcagtatctgaatgtcagcttttggcacttctggtcgctctgagcctcctactcgcattcctggagcaaggtgctttccaggcctcatggaggtggaggagctgaggaagctcgagaagatggatagaagtgggaaatggagctagcgtacgggagagggaaatggctggaatattcgtcaatctgtggtgctttactggagatttgcaggagttcagaggaagggggcattgaatttcataacctaaaccgtatcgtggtttaccagaaagttttgacccgtgattccggttttaaaggctgagtagggccgggcgcggtggttcacgccagtaatcccagcagtttaggaggccaaggcaggcggatcacctgaggtcaggggttggagataaacctggccaacgtggtgaaacctcgtctttagtaaaaaatacaaaaattagccaggttttgtggcacatgcctgtaatcctagctactcgaaaggctgaggcatgagaatcgcttgaactcaggaggaggttgcagccaaccgagatctcgccgctgtactccagcctgggcgacagagcgagactgtgtcaaaacaacaccacaagctagctgagtagggattcttgggcgaagtggaagacattataagcaaatagggtagtatgggcatggaaacgaactacatgattaaagattagtattatctggcgagggaggaaaagtgccagagcaagtgccgaaactggaaggttacatttagttcaggatatgaagatcatataaggcctgcacggtggctcacacctgtaatcccagcactttgggaagccaaggtgggggaggatcgcttgagctcaggagttggagaccagcctgggcaacatagtgggaccccatatctcaaaaaaaaaaaaaaaaaaaataagctgggcgtggtggcttgtgcctgtggtctcagctatcccggaggctgaggtgggaggactgcttgagctcaggacgtcaaggctgcagtgagctatgatgggccactgcactccagcctgggctacagagtgagaccttgtctcaaaagacaagcgacaacaacaaaacatgtaaggagaggccaggcgcggtggctcaagcctgtaatcccagaactttgggaggccaaggtgggcggatcacgaggtcaggagttcaagaccagcctggccaagatggcaaaaccccatctctactaaaactacaaaaattagccgggcgtggtggtgcatgcctgtaatcccagctctttgggaggctgaggcagagaagtgcttgaacccgggaggtggaggttgcagtgagcgagatcacgccactgcactccagcctgggcaacagagcaagactccgtctcaaaaaaaaaaaaaaaggtaaggagctttggtctctaggtactgaagaaatcattgaagtttttaagaagacaagtcatttggttagatctattttccctccacttaccaatttatttttatttttatttatttatttatttattta

SEQ ID NO: 1242327 - DNA, 4001 bp, Homo sapiens
acatggcttgtcatccccagggacccaccctcaaaaattcctgtccacacttcccagtcctcagaaactatctcctaacacccattggctgaaggtagggaaggaagagatgtgctagagagactgagctcggatctctgtcctgacaattgggaggaagacttcaagcgatgcttttatttcaaccaattcaatcaccaccagtctgtgtcttcatgcagcagtggcttttgagatctcggttgtcttttcagaacattgggacggcctcaacaacttgcatgacgctgggcaagtgaatttctctctctgggcctcagtgtccccatctaggcaatcaccagccgttaggccctatggatggaaggttcctgcctgcagtggcattttaggatccactatcatctgctttatcttcctagtggcaagggactggaccagatgcttttggaaagcgcaccaagcttaaaggtggctctctctgcaggtgcccctcctcccttcacgccagaggctcacccccaccccgcccgggctccctgttagagccaggcctggctcttcagccttgcagctcaggaaaccagagcgcagcgctatagccgcgactgcggcggcggcggcggcgcagggggcgggggaggagagaagcgcccacttcgtcccgctgcctccgcagcagccctggccctagccccggcgcatcagagcggtccttgggaatctttgggcttgttgctccggcggccgccagctgggagcccaccaccgctcgatggtaccgaaccgacccgtgtagccccataaccccagcccaactccgaggagctagcgcagaccgctctccgccctcagctgcggcgaggcaagggctggcagcgctcggacgcctccgtcttgcccttcccatgcctaagcgcggggaattacacgttcccggtgtagaacagacgatcggggctattagggctgggcggtgggagtgggggttgggagcaccatttttggctggacgtgtgtccagactcatcgtctctggtccttaggaccccatcttcctctgcatctccaggtgtcggcccctctgtacccgcctcccacggggctcgtccggcgaagggcagccgcagcccacatctactccccgccctcaatccctgccccctctgcccgccgcagtcactcgcctggctgggagcaagcctcccctctcgctgagggtgcagagagcgcctagggcgccaagagtagaggggccaaagttcaagcgccatcagccagccgaaggccctgagcccccagggccgcggccgggacgcagggaggtcaggacgcgacgctcgcctcacctgtttctccagcggctccttggccgacagcgccggcttgggggagggcgcgcggtcgcagacgcagccctccagcaggtaaagccccgagggccgcgagctcgagtcgctctcgaagtagaagagcaggttctgcagcagcgcgaaccacttggtttgccattttgtgttgtccgaactccgcttgctcaggtagcctttgcgcgtgccgtccttgcgcgccagcagtcccagggacgcgacgtggccatcattcagccggatccccttctgcatggtgctcagaggccagcgagaccccacgcgcttacatcttctccgcgcagcagccccccgtccgtgcgcgctgcgcgctgcctctctctggcgctcgctcgctcgctccctctagctctcccctccccccaaatatctacactccaggatctggcgccgagccgcggcttcttgaatccagatataccattccccgctggaacctcttctccgctccgcagagccccagtacccggaagatgccgcccgaccctcctccggtgccgggcaaactgagggactggcgatctgcgcgctggcgaggggcaggcggagtcatgtgacgccgatccctcgaagagcccgtttcagcagcgcggacagggacacacgcacgcagccccgccgaggcgcagagccgcgcgcaggctgcaacttggtgcctcctccccctccccagacacacacacacgcacacgcacacgcacacactcaaaccctgccctccctcccctcatctccccttctctccctcggatgttaaaaagcaaatcagatcaattttcgtttaacccaatgaaaccccgaaggctcgccatcccgggagtttgcgtctttgcgccccaccgcggcgcactgtagacctggggttaagtgccagttgtcattttctcctccaaaggctcgccccccccccccactttatttctaatacgaggtggaaggaggaaggtgggtggcgaaatagagctgcaaaagcgtccagtcctagtctttgcatagtcagccgggtcacattgaattccagcatccggctgcactcccggcggcttccccagctacctgaggacagtacagggggtgagatggggtggtggttggtgaacgttggttactttattttatattattttattttgagagttgccataattaccggcgccaccccccgtgcaccctgaggtctggttggcgagccgctgctgggagttttctgcaaataccccccaaagcctgaaggcgggcttcaaacgcaggcgccggggaccatgggagccttcaaatagctgcgctggcgcaatgataccttaatgatagattttccgttcttatttttagctctcattcgcctacacagttacacggcatttatccgagaacgtcacagcgcccgcatgctgcaccgggagggcgcgcgggccgccgggcgagccgggagctggggcggggagcgcgcatcgctgtctgccgcagagggcagcgagctcgccccgacccggagcaagccgcgcctggcccgggcgctttgcagcggggatgggtgcccgcgcagccctgtgaaggaaagacaccatctttccgcacggaaactgcgtatacccctcccccgacacacacacacacacacacacacacacacacacacacacacaccccacactcacacacagcacacaccacacacgcacagatacacaccacacaccacacacccacacaccacacacaccacacacacacaccacacacaccacacacacacaccgcacacaccacacacaaaccatacaccacacacaccacacacgcacacacacacgccacacacaccgcatacacaaacaccacacaccacacacacacaccatacaccacacaccaacacaccacacacacaccacacacccaaacaccacacacaccaaacacacaccacacaccctacacacacaccactccccacacccccccacaccccaccacacacacgccacacacaccacacacagacaccacacacatgccacacaccacacacacaccacacacacaccacacaccacacacacaccacacacatgccacacaccacacacataccacatgccacatacacaccccccacactcccccacaccccccgccacacacacacacaacccacaccatacaaacaccacacactacacacaacacccccacactccccacaccacacaccacacaccacacacactacacacaccacacccacataccacacacacccctacacacccctacacaccacacacacccacacccacacatacaccacacaccagaccacacaccacacataccacacacaccatgcacaccacaccacacacaccacaccacacacacaccacataacacacccctcccacagaccaaacctgggctgcacacacacacgcatcacacctcacacaacacatgcagcacaccacacacacatacacacacacatacacacacacaccctagtttggagccctagggaagggcttggaaaccaggcagccctgtgtaggtcacggaagaatccacagagaagctctgctgtggaggaatggagctgcccctgtcctg

SEQ ID NO: 1242328 - DNA, 4001 bp, Homo sapiens
tatctgcctggtgggacccccaagcctctcccttccttccccatgggagcaggaagagcagccctgaggccttgctgggccaggctgagcctcagtggggctgggaggctggggggcagctccgacggcatggccactcactctgcttgctgagcgctgaagggtcttcgggcttctcaggggtcgtatcgccctcatctggaatcttgttggtgaagctgctggacacatagagcttgctggtgtccagcgtggccttgctgaagggtgacatggccgagtacatgctggtgtagccattggagttgcagctgagggcggccaggtccagggccttgccgccagtgatgatggggatgttcagggagagcttccgccggcggctcggtgacgatgtcttggtgatggacagaggtggcggcgaggagaacttgcgggtggcgcgcggggacttggggggttcaccgtacaggagcttattgttctggccactggcaaacaggagctccagcgacctgtggggagggcgggggtgaaaatgacagttagcgtaggcctgcctgcccgcctaggcctgggggccgtctccggtggggctcggagtggcagcaacggctccatcattcttaggatccctgaaacccatacttgagctgatcctctgagcagggacaatgcgattaaatggcctggggccaagggtcctgctctggatggtttgggcagaggatctggggcttctatgctccgcccccccaccccctcagggcagcagctgcagcatctgacctgaagtgctaagggtcccctgagctgcggactgtgcaaaacccccctccatcccacacagggcctgctcccgcctacactctctggcctcatccttagagaggtcctcaggcatgttttgtggaatgaggaagctgaggctcagagacaggaaatgactcatctgatgcctcctactctaaacgcagggtcctttccacctgctttggggcttgagcggccctatatgcaaacttagggggatgggaagctgaaagtggcccctaccatcctcatgacagggttccacctcaggccaggctggaaacaggttatacatccagaacattgcaaaccatagcttgtctcatcgaggctgtctgctccacgttgcacacaggataggattgatcttttaaccctcactgttgccccaggacgtaggcactcttattcctacaggataactgcaggaatgtcacaggtaggaaactgagtctcagaaaggttaagggactcagccaaggccatagggctgagagctggctctgaaccagcctctttgttctgcagggcactgctgctgggaaaggaaggacactgtctgctgggcccctgggaatgatctcagtgacttttagggggtaaatccatcctggatgggatgtttgcttctgttttctcagagccctgggaatctgatcattgaggtttcagaagttcagggcagagaggcaagatgtaccctgccccagtgaggcctgaggtgggggcaggaggagggaacagaagagggaacgggtgtattctgggtcgttgcgttgctctggcagcagaggtgtggattgggggaggaatggtgaggttcctggggagccctggggagccagtgtgattcaggagctctgctccaggcagccctagagctgaggctctggcataatgtcttgcctagggtgttttggggcagggcactcagagagcctctgagcctctgagggctgggatgggctgtccacaactgggatctgggtaggtggcctctcggaaaagataatcacctaccattcctggatgcagtgaagtccattaggggcctgagccaatccctgaacttggcctactgctggacagccttggccaagtccttcattgccccatgacttttgagaagcaaaggctaaggtggcctgcactccttatgttgactcaccccaagtaggccaaaaagggctccatcatttcttagagtaggaggtggtctaagcaaagcaggggtaagagtcctttctccctccctccctccctccctccctcccttccttccttcctctctccctttatttttctttctccctctccctctctccttctgtcctccttcccctcctcatttcctttctcttttttcaccaaaggaagcactgtcctttggtgacggtgggaccctgtgcttccaggagcggggctaagaggtgagagcaccctccacaccccaggatcctggcaggtggagatggaagcagctgagactgagcagtagcaccaggcaggtgagctgtccctgcctctctgcagagggaggcttggttcctggggagagggggcagtggcggtgtgtgtcccgcagcaccccaacacgttactgctgctcctccagggaccttccaggtcaccccccggccccgtgcaagctcagttttcctccaaggcttggaagctctccgggcatgggaggaggagggcacctcagccacctggcaggaatggcactgataggcttcttgtagatggtaatgagcttgtccaggaccacgatggcggtggtgaagacgcggtaggagtgcaggaaggtgttgaggaagtcgatgctcaggaagcgcaggtccgtcagcctctccagcagccgctccacactggcgtagcggatctgcagcactttgcaggagttcatggttttgctgaagcgaatgtcaacatcatcacaatataaggaggcgtcggacctgagaggggaggaaggatgcagaggtgatgtgggtctaaaggcatctgaatggcacccaccaggcctgctcatcactgcttcccccacacactgacaacacaggatggtcttattaagagaacaagcttgggaaggatgacactgaaggagggctacaacttctttttcccaatatcctaaaaactctccattataaaacccctagaaatactggagaagtattacaaatttaaaaacatttgttgttgagttcacaagacgtaaggaactctgtttacacaaatgtgtatgtggatggggtgcagtggctcacgcctgtaatcccagcactttgggaggctgaggtgggaggatcacttgaggtcaggagctcaagaccagcctgggcaacatggcgaaaccctgtctctcttaaaaatacaaaagttagctaggtgtggtggcccatacctgtaataccagttactagggaggctgaggcacaagaatcgcttgaaccctggagatggaggttgcagtgagccgagactgtgacactgccctccagcctgggtgacacagcgagactctgcctcaaaaaaaaatatgtgtacatgaatgttcttagcagcattatttgtaatagccccaaagtggaaactacccaggtgtccatcagctgatacatggaaaaacaaaatgtggtctatttgatctgctagcagctgtcaagatgtaaggacaggtgtccagtgcagttagccagaacaaaggggctaagatggggtgaacttgcaggggtcttgtttcagctgcttgtgaacttgaggtcagcagcctctacagggcatagtgggaaccagtggccctgaaggctgctgtaccacacagcgccctctggtgcttacgccactggaatcgtcttttattggtcatccaatgggagctattaggactcttgggcaactctgggttttcattttttggatgttgtgagtctttgtaatcatgttttactttttgttttgactaccaagaatcttagaatcaaatatagtgctcatttctttttatttacttctttattttttgtttgtccttattacttacatgctgatggccgtatctagttttttttttttttttttttaatgagataaggtctcatttgctcaggctggagtacagtgcggtggtgtgatcatggctcactgcagccttgctctcctgggctcaagtgatcctc

SEQ ID NO: 1242329 - DNA, 4001 bp, Homo sapiens
cctgccctgttttctaattctggtaaagtttcctagtgtcaccagtaagagaaaccgctttgtttcataagtggattcttgaaggttgatgcttttaccagaactagaagggatcagggtaaagtatagggtagtaaaagggaagaaagggtgacaaaagcaatctgggaagtatggagcccagagagactcagaggactaggccatgagagaacagggagaagagaaagtactaaaagccaaagtgcagcctcagagttctaagaagatggggattatctgcaccatagactaggaaacctggctttcttgctgtacagtctcttaactggttgccttgtgaaaaatcctcaaatcgttctgccttttctggtgaaatgggagtagacaaggatttataaaatgctctattataggcaggtcgaaggtgttttaacaatccatagaatgaatggcctctgagtctgtaaaggcatattttttaaaaaaatacagtagccaaatgttttcctgtaaatgaaaaaaccaaaaccccgagagaaacaaattaacttgaaggtgttttccaagcctaaaagtaaccaaagccccataggtttgctgaaggagaccgtcaaaactctaaactggtttaggtgaaatcctctccaggcataggtatctcagtggaggtcagtttcaggctgagctttttatgaaatccgcctagaaaagtaagagatgaaatggagcaagggaactggaacttccacaactttctttgcagtggaaggtgactctcttgacttctagtatggattccttccagtcccgtcctcttccccttacaatactcaatttaatgtactgaactcctccttctgaatctagtgcaaagtacagtggtggaccctcaggggatacctggatggggagaggcagggcgtgcatacagggccaagaatccttcgttcctgggattataagcacgggaagtccagcatcgcaagcttcctgccgctactgggtatggtggtgcaaggcacagtcccatcagtgtcgatgtgaatggagttgtgaagtgcacaacttgtccagcccctacgccgaggccaggcctttgttcatgcagttgcctagttctggtcctttggctacaaactcaaagctgcctggccaagagccctttcactcactgtccctctttcttcaacttctgttatccaagaccctctatagaatcatagtgagggggagaggagtgcagcttcccatacggaaggcgatatgtttccctgacccacggatctggaaacttccgtggggcaggggcaaccgaggggtgccacctctgcgggctccctgcaagctcctcggccgttctgggcagggccgggaggggccaccaggtggcgcagccggagcccagcgccccagcaggtgcgggcagcgcggaaagtccgcgagtgggagtcccgatgccgggcgtggagatgtgggggaggaagtcggcgggcgggcgccggctccgcgaagagcttcggccctagcagatctcaccggacgagctctggcctcgcggccgcccctctaccacccctcagccccagctccctccccgaaaccccgggcgcagcgcgccgggcgttctggacacgtccgcccgtcgcgctggtgtcccgggactccggccgaccccggcccccctccgccctcaacttccctcggggtgttggggcgacgggcaggggcctctttcccaagaaaggacacaggcgctcccgagggccacggccgcctctactcaccgcggagcctctctcgccttgcccagggtgcccatggccgcggcccgcgctcccggtgccggctcacctagcgcggccgggcgcggcgcatcgcccccgccaccaccgccgccgcctgccggctctctcccccccgggcctcgtagccccggcgcccgccagccctcgagcccggcgagcccgaccgaggtgcaccgcaggcacaaactttgtgcgagcgcgccccctctgcctcgcgcgcgcgctcacacccgcctggcaaccacctgacacgctgatgctggcggctgcaggaaacgtgcggcgccccgccgctcttccccgaaacctgccccctttccgcgggtgccccggcctgcgcctcgcgcggttctctcacccctgcccgccttcgacctctcttggccaaagggttaagtctcaggggagttggagaggagcgggctcccggctaccacgcccgcgccttgcagggcacctgtgcccgtcgacctccacctcagctcgggaaacgggctgcgcctagcggctcccatgggaccccctttcccgcagccgacccgcagcttccacgcctcttcctgcggccgctgctcggagcactgcagtgaggacgccttctcccctccagggcctctcctgtatatatcagagcgcggagtccggcaggggaaaggaacggaaagacagttgtgaagttgccttaacctgtgccctggggtctctaggtagccgtctgcaggactgggccgtagacatgtgccctgtgccctgcgccctgcaccttggacgagggctgcctgtgtggaggtgcgctccacaggcgtgatccatatctggcccagacgcggccgcctggcgtcggtgggtgtaggagatgtggggacaactttcatacaacgtcagtgcgcacagaagacctggccaagaggggcggcccatccgctgcttgtccaggtgatagtgctgataatctcaatagctaatgattgagtgcggttgtgctaagtgctttctatacattacctcatttaatccactctccctgatacaaagagatcactgttgtaaagatgagaaaatgaaggtttagagaatgctatgccttagatcatacaactaataaacagcagagagacctctgacttggactgaggtctgtctgactccctgtaatcactgctggactgccctaataacacactcattatcacggccacagaccataactctagccacagtcatagttgtcttcctggccatagtgttctggactttaaagccttcctctgtttcatttatatatttccttatatttatatgctaccttgtccttaaaacagaattcgagatagcttacaagagcacataacctacaaaaagaagtgtgtgaaatgaaaaatgaggcacacaagatggagccaaaaatgaacatcatttgaaataaatgcatctcatagagtcaaatacccttgctacaggtgggaccaaaatttgtctcctgcatttctagcagtcaagtttaaagagaggccttgtctaaagttcaattcctatcacatgcaagaccaaaaacaaaattgctcaagagaagatccccctttcttgatactgagaccagcaagaaatttctccagagaatcctcatgaacactgggtgatataaagaaccaagtcctcagtcacagccacagatgcagaaggggcaggtgaatgtcaggagaatattaaatgatgacactctttctcactcactgggtctaaggctcaaacatttttagagttatctattatacacccttcctcatgtaagccctacaacctaaacaaccaagttggcggatgtctgaggatggtaaagatttgtatctatatatgaatctatctgactatctcccaacagtcctaagtttgcagtcttagactttgttcacagagatcttctcttattaccaggtgaacaattacttttcactgacccctctactacagaatgagctctttaccctacttaaatctataatatttacactttcaattgccacataatattctgtgtccctgtcttacctccacagctaaactgtaaattgtccgaggtcaagaatcaggtcttatgcttctttagcttccacagctgccaacttgaggcagtacctgtgggacattactaatgaactgctgtggatttgattttgaaaagcaaaatgtgct

SEQ ID NO: 1242330 - DNA, 4001 bp, Homo sapiens
aagagaagagaagagtagagaagagagagaataaaagaaagagaaggaaagagaaagaaagaagaaagagagagaaagaagaaagaaaaaaaagaaagaagaagagagggatgaagggaaggagggagggagggaaaagagaaagagaaaaaggaaggaagaaaagagaaagaaacaaagacagaaagatagaaagaaagaaagaaaaagaaaaaagaaagaaagaaaagtaatgggatgcctgtaattccagtgctttgggattgagaccagcctgggcaatgcagtgacactgttatctctaaaaaaattgaaaaattaaccaggcatggtggtatgcctgtagtcctagctactcaggaggctgagagggaagatcacttgagctcaggagtttgaggctatagtgagtcatgatcgcgccattgtactccagcctgagtgacagagacactgtcttaaaaaaaaaaaagtgacattgtgaataaaatccttaaaattctttcctaggattcctaacggtgtcagtttgcaaactaatacccagggaatacatattttaaaatttaaattctttcttttatgtagtcactggctaaacggtaccggttacagagctacggataacaatctgattttcaaagggcaaatctttcaaaggaagagggtaatcccttctgtaggaaaaccagattcagagtcccctctctgggggtggggctggcttcaaaatcagagagtaggcccccagtgagtcttacagaacactctggggaggaaacccacagccagctgagcttgggttggccatcactaacggctaaaactggaaaaacagccagtggaggaccccttctgccctccctccttcagccagccaggagtggcatagttcagtgttgacacaaattatctcaatggaagcccaagatcttggctcatcaaggacaatcccatgcacctggaaccataacccaatgtgtttccagaaagttgagaggggtctggcttgaaacgaacacatttgataagaatgcacaacttgtcccagaatcccagggaatgggggtgggagtgggggagtggaccttccctgagaaatctcaacagctagtgacttcaccagctcccttctacggggagggggtgtggagggggaggggttggacgggaagtcttcccccaagcctaatcagggagtagcaaggctgcgactaagctcaaagaggcgccttgggtagggggatcagtgcccaacaggtccctttgaagccagtcgccaggactgactgctggccccagggtaggtcataggggtgggggttggaaggttggtggcaggggagaccgaccagtaaaggactccgagacacacaagagagaggggagagacagcaggggtcactgatacggaggacagagacagtgggaagacacaaagggaagaggcaggcagggaacagaagacagagatggtggagctgagcacaaagccgagagaagagaaagcccggcaacagggaaactgaggcaaagaaaatcacggtgtcttgtgcgaccctcctgggtgaaggaagctccccaagccagtggaagaacctgcccccaagagcacagcccactgtccccccacccacgcccagctccgcacttggcggctcaggctccccggcgccactcaccagacttgccagccccgcggcgccccaggatggccaggttgacctcgaggggcgcgctctgaggcccgctgcccgcgcggggttttccaaacaccgaggacatggcgacgccctggacggccacgcaggtctgcggccggtgggccccgcgcagtgcgcccgcccgtcggggcccaggggagcgggatgcaggcttccctggagcgcgcggccccggacccgtcggcgtccgcgccctcggccccgcgtccagcgggctgccaccccgcggggaggaggggccggtggagcctggcgggcggggccaccccaagcgccaccaaattccttgtaagggctgcggagccccccgcggggcgcgctcagccggctcctggagcagggagggagctcctgccggccgcgcccccaccgccgggctgggcctcgaggaccctgccgtcaccctcccgagcgcccccaaacccggccgggaaggagcagagaaggagccccagggctagggggagagaggggaaggatgtttgcactcttccctgaacctcccactcaatctcttttcaccagcaagaaaatccacccctccctttgttctaccaagccagccccgcctcctcctccaggaagcttcctgggttcaattccaagccttgccctttctttagctcagccttggcactctatatccccaatcacattattctgccctttgctgtggagactctagaggcctcactgcagaacccattcggaacccaggcttctgggagagggggcggggcggagagaacccctcactaagatttcagggccaatatgggttcagcttcaagaaacctaatccattctgaattactgtctctccctaatgggagctaatgagttgcatgtgtttgtggcctgttgtgtaaatggggtgtttgttctaaaacctggcactgcctcttgcctacagcaattctgggattggtggtgagcctggcaggggtcccctggtcattccccttgggactcagggtaaatctggtcataccaaagacagggcaaagggcccacaccacgaacctggacacttaggatctagtgctagctcctgccctagagtaatcttgggcaagtcaccttgcttctttgggcttcggtgtccccatatataaatactgaaggaaggggaaaatgaagcaaaatagagagtgacagaatcagccctgggctccaggcctgcgtacattctagaaccctgtgaggcatctcttctggagtacgctccaggttagagcagggaaaggcatgggagcctcagagacctctcacggcagcccttctccttccccttcccgcagatggttaactcatctacccacccacccacagaggaaccatggaaaaccaggtgtgcaggcagggcccagggtcagagctggatggtaataacgactcttcaaagaagaacaattattttcctggccaggacatgaatattgactcagcctagttgtgttttggggaaatcatggtaaaccagctgtgttattaaggtagtgggtggaatttgtttagattacactctcaggccagaattagtcacacagctaatggccaagggttttcctttgagttgtaggagttgagaaagtgggagccaagttccagtcacatccctgggctggccccattctgtgaagacagactggttccagatggggcctttggggatagaaccaatctcaatggacaactgctggaggcagggctaactgtgggcctgcacgggcccaactgcatgtaaacttaagctctgctacttctcagcttgtgtgatgctgggatgttacttgacctctatgtggtctgtttcctcatctttaaaacttgaccaaccaggagatgggagctgcaagattctagctcagtctgagggtgaactctgtaaccatctgactgtccatagttagaagggactgtctttggtggaactcaacccctctcccctgacactggcagcaaccaagggagtgaccacgtcaaggaagtgttagagaagagacgccttcatgactcgaatgttgcagtaagatgacccttaattctcttccagttcagagattatttgagctggtggccacctggttactggggccctcaactgtgacagctcattgctcaaagtctgccccttctctgaggcttgggaggaaaacagtgcccacctcatggctgcgacctatccttttctccatccccagtttcctcacccaggggctgctactgtcagaccctggaataaactactttgcccttctgggtctctgttcctca

SEQ ID NO: 1242331 - DNA, 4001 bp, Homo sapiens
cttttttcaagacttagaatggccacatgggtcacccttctcacccaacagcagtgggtctgagggtttgcccagtaccagcctcttgggcagtgtgaagtccccactgaagtagaccctttagcagaagtggggttctgggtccccattcagctttataggagacatgctctcccccagtttcagcccacagcagggggccaagcagagactccaagtacgctagcaaccctgtcaccctccccaactgtcaagggagattctaacagccaggtagagtcaggatgggggcaagatccccaaagccaagggccttttggcatcaaggtacaaggagggcaaggcctctggagcccaaacaaatccaccacacttaagtcattagtggacagatgtcacagttgtatattcttcccttccccttccgccaaaaagtggagatccaaacctagattgtcatcgactggggctggctgaaggtctctgaatagccgagtgggagctggcggcgctgagcccagcccagccgagggccaccggcgccattctgcaccaacccccagcacaaggggaggaggcaacaccagtccacaccaggggctctgcggtttctcccccaggccaaggggaagggcgcccaaggtggataaccagcccttggtttcctgggcgagaacatgccagggcaggggcaggaaggctctctcacccctagaatgacgcagcagaggccagaggccctgcgaagcctgtccccttctactccagttcttgtctccgccagcctagctcctcgtccctattcactgatatctttgaggcttttatccagcaccccaccccgcacacacatcctccctaccatccattaaccacccagctgctggtggttccacggagccgccttacactccctccctttcgcacatggccggtggacgagatgatttcgcccctcctggcaggatcccacccaggccagctttggggtcctggcttggttgccaggacaaacccagagagaggagaaggacgaactgagtgtctttagtcatcttccaaactaattaaattgtgggctcacctctgccaaagcccaggttctggggctgtgaagaaagcccgcccacccccatgacaacagctcgcaggaaccgaggagccggccggcccaggcctccaaggtcacggggagggggtcagggcggaaaaggcagtggagtgagggtgccgccctcgggccgtgctaatcccgctccgctccgtgccgccgaggcggggtcctggccacgcaggaggtgcgcctcggaggagggcggcgagcggctacggggtggggagcaaggggcgcgcgggcggcaggcatggaacggacgcggcgcatctcgcccaccgcgggacgcccggacggcggccggcgcgcgcggcccgcctcgagcccgagagggcggggagacaatgcctgtccggcggggcagtccaggccgcacgctcccgcccgcggacacgggccgctcctacccgggcgagagggcagcggcgggaaggcgccgggagcgatggccaccccggccccgcgaggcgcggcaggccccgctcgccctctcccgcgcccgcctggcgtgcgcttcacccggcaagtcccggggccacagacccacctcctcctccagggcgccgccggagcccgcgccggagccggtgccggtgctgccgccgtgctcgccgtccggcttcaggttgctcatggtgcgggggagggggcggcgggaaggaacgcgagggcgagcgcggcgccggccccgcgggaagtgggaaggggcgcggggagcggtgcgctcgcgggtgcggagcgggtggcgggggacccacggggcagtgagaggggcagcctccgcgtcgggccagggtcacatcaagtttggcgggtgcggaaggtggggagggggtgcggcgggggaggcagtgggagccggaggggccgccgcctccgccttttcactgcgaccggcgagtgcgccgcggcggcggcggcggcggcagcggcggcggggggcgggcgccgggggagggggcgggcgccggcggcggggggcggggccggaaccggcctcagctggggcccggccagccccctcccccgcccgccgcgcggtctccgggggaacgcgcagccaatccccaccgcccaccgtgggctcgccccggccccggccgcggggcgccggcctccggccgggcctttcccctctctctcgcctgggtcagcgctctccctctctcctcttcccccgcgcccttctccacggcgagtttttaaactttgatgaactcgcccggcgaactttcttaaaggggccgcgcgctgcgcgccccagcccgcgggaggtggagccccgtgccccgcacccagcgccccggtccctgggcggccctgcccgggcggcctcgcgcttagggcacccgcagcgaggtttccgggccgtcgactccccttgtatcttgatctagggttttggggttcccgacgcactcattctgcccctaaatccagtcgcgcagacctcagctccgggggaccgagttctgggggtgatggccggggggagggggttgggagacacctgagctttggcccgggctgggcgctgttttgctgagtgaccttgaggaaatcacttcccctctctggcctcaggctcccagcccagagggtgggacttaggatctcaaactcccttcccactcccagtcactatctgaataggacttaggtggggattcgagtgttgggaccccaatggtcattagcgagggctgcctcgaatgaccaagaaggttctgttgcccaccttgccctcaacacgcctggctttcgggtcttctcgctcctcccccgacctcagtgcccctcacacctttccctgcctcctattctgagcccgaaggctggggacggatgtaatagcctagaggctgggggaggtgggggaggtcgtcgtgactccccccgcacccccgcgcaggtcagtagggcgcggcctctgggtcggttttctcttctatttgaaaacccagccgatgggggcccgccctgctgccacagtagaaacccgcacccacctcggggagcgctggaagcgctgcagcctgaatccggcagagccgcgggagaactgggtccctcctcagtgccccttctcctggacggggcggaggttgcggtgacccgagatcttgccattgcactccagccagggcaacaagagcgaaactccgtctcaaaaaaagaaaagaaaaaagaaaagctggatttgcagtcacggactggttaggatcccagaccgtggacaagtgcctgagcccccagaacctctgtgtgtcgacctcctgaattaggtaggactagcaccacaggatcactgtgctgtggcttagtcttcccagtaaattataatctccatcctgacctgccatctcacagataaattgaggcctagagatgggcaatgtctttccaatgatatactcattcctttagtaaataattattgagcacctactgtgggctggggaccattttctgctggtggcaaggccaagagcaccctggtttcccatcagccctgttgccaacacttggctcaggccctatgaagagggagctgctgcctgtaggagccagacctttacccagagtttttaagatgcctccagcctcaggcatctccagatagaaccaaccttgggaaccctcagatacccctaccatcctccacaggcctcagtccaatctggctgtgggcttgatcaccatcccctcccctagaataggtcttcctatcaggtttgtctctaactttggcccaggaatactcttcctcttcctcttcctcccccgctccccctaatcaatccaaaatcttcccttccctcaagatcctgcctttcccatgctttttccaggagaaggagcctggccagatttctgaactcagcca

SEQ ID NO: 1242332 - DNA, 4001 bp, Homo sapiens
agctcgcgctcacgcggcagatgtcgacgcccgcccgcagcggactggggctgtgcacctggcgcccgcgtccggagcccagctcctgcccgaagccgcagaaaccgaagccgaaccaggcccccggccgctcctccgccatgcccgagcagcgccctctgccggccgccgcctggctgcggcgggcccggggggattcttgcgaagagcccgctagtgggacactggcaagtctctggccttccaggggctggagctgccttatctgtaaaatggagaaactatcattctcccgaccacaaaggcagagtccgtgccacgaaggttcgctgagcaggcgccctgactaatgccctaccggatttacaaagatgctcaaatatttagaggcactttccctgtcctcccttttggctcaagctcagcgtgccacaaagtgggtacgaagtggcctgtcctttaggcattggactaggatccgagcgcccccgacacccccaccccgtcccgcagcttcccagcatctggcactttatcccatgtaatcttgggaaccaaaatggtcgttttacagaggagattctgagacaaagtaacccttacacactcatacagccagacagagaggggcagagcgctgaaatcaggtcccaccaactccacacacagtgctctgcccctctccccacagcggaacgcagaagagcgtttgggaggcagtgcctctgcaactcagcggggccttgggaccgcagccaatccacctgagtccaactgcgtttcttcagtttacaaagggaggtgggggcggtgctgtttgaaccttcctcacagaattgtaataaatgcaaataaagggtttggtgcgagtacatgccatgataaacacacagtattagcttactgaatccagtatttagtgttgacaaaaaaattatccctggacatcttactggttttgagaaacttatacagacagaatttcaactgtaccttatctagccatttattcgtccagcgagcatttactgagcgctcctcctctgccagtgaggacagctgtctgctcccaaggagctaaccgttaaatggggagacaaacagtctggtggttacaacagcaacgccaacttcaagcagattcggctggagcgggtttgtttttttttttttttaatataatagagacaggggtctcgctatgctgcccaggctggtctcaaattcctgggctcgagtgatccgcccgcctcggcctcccaaagcgttgggattacaggcgtgagccgctgcacccgggctgaagcagaattgcatgggcattttcaggcctcttaagtcagatcctgggtctctcctgagaccccagttcctgggctcctaaccccttccgtgtcctctcccaacccaagggggcctctgaccttgatcttgaccctatgccctctaccctctcgggcaggtccttctggtgggcagccttggaggaaacgccgaggcgcagagcggccgcctccggaaaggcctcccgcccagcgggcgccgacagccacggggagaaaaggtttgaagggcgcgcggcgcgaggcggccaatcaccagcaagggcggtgacgtcgccgcccggggcgcggcggccgcagccctgttcaactccccttgagggcctctccggtcccgaggcctacgccggggccctgcggcccggtctgtgaaatgggctgaaacctccgaggggcgttggaccaaggccctggaggaaaccgggggcgttggaccaaggcagaggttgggccaggtggtcccgcccctgcaggaacccgtggggctggagctcggattagaaccacagagaggacattcattaagacttgagctaaaggtttggcgaggagtgacgcccaagacgggcggaccccgccacccacctcagtcccgggaccgcggcagctcaaaacccgacacgcgccggactcatgccccaacaggaagcagcttttaccttccacggattggctcaggacccgtcacgtgcctctgtcgagccaacgagcctcacgctgggcttagccctcctcgaacgtgctggggtggtgggcggggcccaagccgcccttcaaccaggctcagctggccaccaaccccaacccccgccccagcgccctcagcggaggccacagaggactcccaatataaagacaaacgtactgaaggcccagcatatgggagtctctaccctaaacgacttatttcttgggatagtttaatattttttgagatagggtctcgctgtgtcgcccaggcgacactttgggaggctgcgctctgggctcactgcaaccttcgcctaccgagtagctgggattacaggtgcatgccgccacactctgctctttttttttttttttttttttttttggtatttttatagagaaagagttttgcttgttgcccaggctggtctcgaacccctgacttcaagtgatccacctgcctcagcctcccaaagcgctgggattacaagcttgaggcaccgcacctggtgagtttcttattgattagcttcctaggcttaccctttgtccctccagtaggattaagaagcaactcagtgggccctggttggggaatccattggattccttccatggaggtgggtctgccactgtgaagctccgttgcacactcacccacgcccagctcacacccatactcacccacactcacccactcagagactcccactcacagcagccctccctgcccaaggacagggcacacagtggagttctacacacttttattggaggggcaggcctgatagcaggctcacagctggtgaggctgctgatgtgtgcgcccttccagatgccccaggatccacaggctgtgttgggatgcaccttccccattcccagctgactacagtagtacagaaaaagggcccctctgagtgaggctgcaggcagtgctggccaagcagggctgtgtgactgaacgtggccgctgactcagaacagaggacatcctagggcagcaagcgaggatgggcaagagtattgggcatgccagccaccaccagccaaagctgcttccgtccttactctccgtgccacaataggtagcgtgtgcatgagccttgggcccagggacaaccccctcactctccatcttggttgggttggataagcccatattccactgctttgtccaggcaggctgcagcagcccttgtgacagggctgtggtcacccttagctagcactgacaagatctccatcatctcactctccatcagggtgctggcaatctccctcgaggcctccaccatgttcagcaccaccacagcaccccggtgctgcagctcctggttggagctcagaagcagggcctgcaggatctccagccagtgtgtggtctgtgagaaaaacagggtagatatgacccctgggcaacaggctcaaccttggcaagggacacacccacacaccctaggactgcccccttcagctgctgctgggagttcctggtccgtccctcctcccccactgagaagaggcactgaccacttggggaatgcggctgcagagcgtgggccgcatggaggtaagcatggccaagcccccggcagctgcccgctgtagcagctcatcatcctctccactgtacagcaccagcagcttcagtcggtcattgccctgggcttcgaagaggtcctgcacctgtggccagatgtgaggagtggaccaagtcagttgggtgtaaagcccagccagggcacaggtacctctgcatccccgcctgtcatgagcacccagaccaaccctcacctccttgctcatggccaagttacacatgcactccgtggctgcccggcggatcatctcatgctcctcaaacatgtagccttctatcatgggcacagccttctccttcaggatcttctgcctgcagggccacaggaggaagcagcagggatacggtttggatgttttcccttc

SEQ ID NO: 1242333 - DNA, 4001 bp, Homo sapiens
tggactaaaacttttctaagtttaaacttcttaaaaccttactattaaatatttgaacatatctaggtcttgacagataggtaccacgcagtcttccaaatcaacgtgttgtgttctttgattactctagtataaccaaagattgacttattcttagattggataatcagagaccaaaggtcttgttattattgtctaactaagtggaagaaaaaagcccttaatcttccagagggttccaatgtgaatatgtcattgacagcacatcttaaatttaccagtttttaattgtctccagcaacttaattccttgatggtgaacagcatttaaatgagagttacagaaaaacagctaacttaagagtcacaataacaacctgaatttttctgaggacccacttggaacgctgacagggaacatcatttgaattgaacaatggggagagacaactgcacagcaatttatttagaacattcttttaatagtctgtgcatttcatttctgactagagaatttacctgagagcatcagatttttttttttaactgaaggatattaaaacctgaattaagagcaggatacctggattctagtccagctttgccacttatttgtagaaggcacttatccctgtgcttcatttcttcatctctacaaagtgatgtggacaagatgatcccaaggcccctaccagctctaacattttggtataatgttataataaacgtaattcacaggcaacaggtctttttctacttgcttaaaaaaagaagcaaattcctaaaatttaaatgaagcatatatcaaaagagcgataaatcatttactgccttaaagttttggggcatatttctctaaaataaatcatattgttgacactaacaaaagtcacgtgagaaagagggtgtctcaaggtgtgacttccacatagagtacagggtcaatgatgtttatatataactggagaaagcaccgagttttacttggttctcagtgtctaaagatttgtaagtataaagcctattctccatgtccttttctccttctcacaggacttccaacttgggacactagcaatctatacattcagcagacaccgctgcttaacatatttgtgtttgtctccattgttagtcgtgtagggcagtccttactttcagtgagaaagccatctgagtccaagtcgattttctttatgatcgcctgcagtcttttttgctgctcttcgtggccgagtttaacatattcatccacatcttcctttagggggaagcgacacacaggagggccaagcattactatcagtggggcaaaatggtggagaaaaacagggctactagaagacccccttgccaaagggtttcggggtgacccgcacctgcacttcaaggcccctaccccctacacaccctccatgatctgaggggtagaagggatccagctcttgggccgtgctatctcctcaggctttccaggccccaggacccccagagagcgagtgccgcgccgcccggcccccattgtcaggccgcccctgccaggcctcgcccggccgcccccctttgtcccgggacaaagcccgcggcagccgcggtgcgaggcccggccctcccagcaccggcctggccgcctcacctggacgcccagcagcgcctcgcggtcgtagtcgctgcggcgctcgcccagcgggtagtgcagctcctcggccttgccggcgccggccgcggcggcgcacagcagcagcagccccaacgccgcggtcctcgggcccagccgcatcgcgccggcccgcggaggacaccgagggacgcgaggagggaggctggcgggggcccgggccggctgcgatgctccgcgggcggctacagagaggcggtgcgacgtacgttgagggcggagggaacgggaggcggaacctgcggtggcggccacaacgcccatggacgggctgggggccggtccaccaatgcggtgcggaggcgcgccaggaggaggcctatatggccggcgcggagtggcggggcaccaggccgcgccgctgattgggcagcgcggcgctgggggcgggccgccgcgatgtcggggtcagcggccgcccagagagctccaggagccatgctgggactgcagagagggtagacctctacgacccgcgccttgtcgttcccccgaaacgcttctaaaagcacgcccccaccccactcctgcccactcctggtccactccatgtgcccctcctaccgtccatcaatgagagaggctggaggtttctgagacaacaatacaatatcgaaaaaattattgcctgaggaatcggccaacagtattctttctcagtcttcaatgtatctattttatgagagtaggacgtacaaactcaggaagtgcagccagatgcttgtatctgatgctcaatttcgtgatttacaagttaatgtgaacttgctcaaatttcttgacccctgaaaacttgtttgctcatctataaaatgagcatagtaataagactaccttaaagaattgtcgtgaagattaaataatgtaatgggtttagaacaatagctggcacataaggtgaagtgttcagtgaaggtaggctttcatccatacaagtagaaaaacgaaagatgattgcacagaaggaatagcttagtaagtacctagcaaaacctttagggacagaatgcatatacacatggcttctattccatgtctattcacaggtttatgtaatttctccacctcaacctgaacacattaaactctaagaaatttgtaggctgcaccttgaacccttttctttattgattgcgccacttaggatcaggcctttcacagagaagaaaaggctttctgggtcctctttcatttctctcagtctctatttggattgggagcaagaattctgttccaaactgcaaaactgggtgggcacaagtcgcagaaatttcctgggtcgggttgaaatttatggtttggtcacaaaccattgaaagattcacagagcaaagtgtaagttcaatctttccaatgttataaagatcaacgaagaacaaagttttaaatttcagaatataaataaaagcaaattttagagttgatttcattaaactaaaaagaaaaccctttattgctggattttaattttcacttccattctcggttttgaggaaaaaaagagaaaaatgtcccaatttaatataagaaactctgctttgtacctgttgttctccaataagtaaaaggtaaactttgaccagcttccggcgtgactccagttataaaaggtaggctacaaggtactgtggaagttcttctaaactcaggggatccacagatgggagttttgggggccaagggaacttaatgatatctaaagagacagtggagtaagcagtatcagaaggctgggttctgtcttcagcccctaaacaggctgttttcgctccctgggtctattgctttcatctggaggaaaaggattgtgttatctcagtggatcttaatttgagatctttgggttcctaagtggtccctgcatggttttcagtggtgtgtttatcccaaaatcttggtgcatgtgtatatttccagggaggaagtctatagctttgcttttatcagagtttcaaaggatccatgtggcagaaaaagttaagagtccctgaagaaggctctgagcaactttttgactcttaaaatcaacgattttattgggattgtttggaagcagattacagtaaaggcctatgcttaaaagaggcaagactgatccaatgtcattacttgtaattaatccattctactcggggaaaaataaatatctaaaataagtagcctgtttaaaaaaatgtgttatgagaatccaaagatcaattttcttgacctataaaagcccatagcatatagcaaaattggttttatttatatttttattgaggtataatttacctaaagtacacaaatgttaagtatacagttcaatcatttttttagattt

SEQ ID NO: 1242334 - DNA, 4001 bp, Homo sapiens
atgctcatttaccattctgaaagtcctagggcccttaggaactgtactaaatctactctgcctgtgctctataaatagaacaacaaagcctggatgatagcacatttgtttatagcatggtttactgaatattttaagcccactgttgagaccaactcctcagaaaaaaagattcttgtcaaaatattattgttcattgacaaggcacctggtcacccaagagcttggttagagatgtacaaagagatgaatgttgtttgcatgcctgctaacacaacattcattctgcagcccatgatcaaggagtaattgtctgctttcaagtcttattatttaagaaatatattttataaggctatagcttctgtagatagtgattcctctgatggatctgggcagttaatagaaaacatctgaaaaggattcaccattctagataccattaagaacatttgtgattcatggacggaggtcaacatatcaacattaacaggaatttggaagaagttgattccaaccctcacggatgacttttgaggagttcaagatttcaatggaggaagggactgcagatgtgttgaaagagcaagagaactagaattggaagtgaagcctgaagatgggactgaattgctataattttacgataaaacttgaagagatgacgagttgctttttatggatgagcaaagaaagtggtttcctaagatggcatctactcctggtgaagatgccgtgaacattgctgaaatgacagcaaagtatttagaatatcacataaacttagttgataaagcagcagcaaaatgtgagaggattaactccaattttgaaaggagttctactgtgggtaaaaatgccattaaacagcattgcatgctacagagcaatctttcctgaaagttagaggcaatccatgtgacaaactgcattgttgtcttattttaagaaattgccacagcaaccccaatcttgggaaaccaccactctgatcagtcagcagccaccagcatgaagcaagaccctccagcagcaaaaagactgacctgctgaaggctcaggtgagtgttagcattttttagcaataaagtattctcgaatcaaggtgggtacgttgttcttttagacataattgttttagacaagttaatagactacagtacagtgcaaacacaggttttatatgcactgagaagccaaaaaggtcgtaacttgctttattgtgatggtctggaaccgaatcccaatatttctgagggcctgtactattatattattatctctattttaagacaaagtaaataaggtacagagaggttaagtaactaaagcaaggtcccagaaattcactggcaacgcgaggattcaaatttagtcctgtgtgaatgcttggttacgggatgactcagttgtcccttctgtaattagttatttggataaatagtatatcctccactaaactaaaaacatcaataagggtggggagcgtttatatcttgctcactgctccatccctagcaccctgaatagagtctagcacatacttgacgctcaataaatacacattgaatatatgaatgtttactactcccttgcataattattttgagactgtaaagggttccaaccatgtctcctactgctatgtatgtatttcctatcttagttgtcggcctgtccattccccaacaggcctggcagtcactcggtgtcccctcggcattgctttcggggcactggcccagtgtattcgcggagcctcccctcctgagggctgtgggcacctcagggatattcctgccttcgggcctcaccttccatgtggggcagggggctgtcccagcttccaggcatggcccaggtgggtctctggtgtttgagggtatgcagcgggcgtaccgctgcagaggccactctgccgcttctcctccggtaagcccgaggctcaagggcacttttcctgcctccgccatgtcctgcctcaccacacgcactgccggcggggacctgccaatctggcatcgaaccaatcagtaagcggagcgccccagggcccaccctcccgttcagcagaagccaatgggcaggctccgaagattcccgcttagggcatttccgggcttcggtgtctctcttgaccttgggcaccgagatggttgcttctacgttgaagggcggttgtgacccttattagtggaagttgatgtcgcacttgcacagcattcgggcccacaccttccctcaggcagcccatgtcaacttctgaagctctgagtctgagaagtttcccaaactgcctgactccctgtagcgtacaccctgggactaggctggtagtcgaggctgcctggacacaggcttttcccttcctcatagcggcctttcagaagacaatgtccccgcttcacctaacacccaccacaacaaagccccagtgccacacgccattcaggagacatggttgcttcttcatcatccatcctgccgcccgctcgacattccctgccacccgacagtcaatttttcaccgaaagaggagcagatgggtgggggctgccagcagcaaaagatgtgcctgcatttaacagcagatgcaatgaaacgacatttctgggtgatttataggcggcaaagcacttacacatctgttatttcctttatcctcccaacaaacttgcagtgaattaaagaagtaaagcagggattattacccccatctaatagatggaggcaaaataaggtccagtgaccaggcgcagtggctcatgcctgtaatcccagcactttgggacgccgaggtgggcgggtcgcctgagctcaggagttcgagaccaccctgggcaatatggtgaaccccatcgctactaaaatacaaaaaattagccaggcatggtggcaggctcctgtaaccccagctacttgggaggctgaggcacaagaattgcttgagccccggaggcggaggttgcagtgagccgagattgtcgcactgcactccagctggggctacagagtaagactctgtctcataaaataaaataaaataaataaaataatccagagagtagatgtggtttgtccaaggttacacagccagtgaacggcagagccagagtagagctgtggactccacaatctccacgtgtccacctcatttgcaaagaatttagatattcatacaatctatgtcaagttagaagcaaagtatacagagggtagagactatgctaaccaaatacataaaatagaattaaaacgcaaacaatgtttaaagctatgcataccaaaggatattcaattcatagacaatggttggagaggtggtaatgtattcactctacaaagtatcaattaaatatctacaatgggcaaacagctatgctagtcaccataggggctacagaaacggataaggcatgtatctaaccttctgggatcacaggatctaataaggaaaacaagcaagatgcaaatatacccatgacacctgacagttaatgccacaggaaaggtacaaaccatgtactctcagggttcaaatgaagtaaaaatcttcccaatagggagtggcagtggtatttgagtgaggacttgaagggtgagaaaaatttcccgagggaagatggaaggaactgttgttccatacgaaggagaagttgaggagtaaagttgtggaaatgaggataatgacatgaccagctagaatgcgaagttgttttttaaggaaaatgaggctacagaggtgagttggggcaaaagagcattgaacagcagctaaggaatgtgaattttacttggtaggtgatgaggaatatgaaaaatttgcatgggagaatgacactatcctagtagtggtccaggcaggttaatatctcggaagcatatgggataaattggataaaaggcaagcggggcctgctacttatctttccagcagtccagtaaagcttactgaaggggtcaggtttcagaaattgcttctgaagatccataaatgacac

SEQ ID NO: 1242335 - DNA, 4001 bp, Homo sapiens
aaattaaatttacacattatttgccaaaaagtgcactcgactatcatcattattcaaacatttcagtcagttgcctccacaactcacttattttaaaactataaagtgaagattcctttcccctcttgttctcataatcaattaaaatatacattactcattcaacttttaaaatttgtctctcttaaaagattttagtccattaacttggatttcccacatctgaatgtaaaaccaaggtgcttaattcaatttaatgatgatttcagaaacacaaagttacgtcacgttactagaggttaaaaacacacacacatacacactggttttgtgaaaaccttgatggcaagcaagatattcaccatctcttcttttaaattatagctttaaaaagggggtgagggtatccattgaagaataaagcctgctttctgtcacacacacacacacacaccccaatcatatctatcagacctattcaagttgccacaacatgactattgtcaaagccaaaaaaattctcctttaaaatatttaaacttcattttaaaattaaaactgaaagcaagatactcaactgccaactactgttgatgaaactattaaagcctgcactgacctacttcatatcagcatcatgacggcatggatgcatgccaagaaaataatgaaaattactatataactaacctaaatcttgtatttaaaaattgtcactttaaaaatgtgcaaatactgttcatgcaacgccagttgctttacgatatgttttcaaaatgagaaaatgagttttgatattttagtactcatattcaatgatggccctgcaaagatttcatttccattttcaaaatcaaggctttttaaaataccatataaaattctttttaaacttctattaaaagcaatcttagaccaaattccaaatattactttccatttaaaaaatattgctacacttaaaaaaggcagttaatgaagcatcctacaaaacaatgcaagttcatgttcaaagaatattgcaatggctctaacagtggatggacttagtgtatttaattattaaaagattcccactagactttaggagtttaatgctgaaatattggaaattttcatacaagaaagtaaaatagcgaaagatattccatcaatggtttcttttaaaaagacatacaaatggcaagacatttgattccctatattttaatttaaaaaaaaaccactttgttgtaaactaccatcttaaaatattttatactaaaaaagcactttcttcacaatcaatgcaaagaataaactccctgaaaaagaaatttaatattaggataagggaggcaaaaacattcagaaatagcagctaacccaactgaaaggaagagacacattaggttttgtgctgcatattaatattcttacgcacagtatctgtttggtgaaaattcacaatacacttcttcctccttctatggctgcaaaaaggagtaaacacatttcacattctccagttccaaattcatgccaccatcatgcaatatgacttaatttcgacccatatttctgttacaatgagtgaaaaaataaaaccaaaaaacttgtttatctgcactcacaattgaggaaggggtaaaagcattttttagctaagaagacaggggctgattgatgcaaagtccgcacacctccagagatcctacaaatgtgcacccgactggggaaagccacattcaatgaatgcatcagcctcctcctccgctccccccgcccgccgccccccacccactttgcagcagaaatgtgcctgggctttttcacgcgagcgatggaggatcctcttaccagatggagttcttgatcttgtgttgcagcgcgctggcctctgtccctggcagcccgggcacaagggctggcagggccacccccgagttgggggcgctggggggaagctgctgatgggcatcaggctgctgtggtggcggctgttgttgttcctctgccatcgctgcagaggggtgggagggagggagggaaagatgggggcgcggggaagggtgagggaagagaccgggaggggaggacgaaggggggagaggaggagggggagggggaggggaagaggaggaggaggaggaaggaagctggataagctaggcctttaccccagggctcgagtgagtcgctttcgcctgccgcctggggaacatcaccggggagaccagcggctcctcacggccggggcgcttcaccgcgggagaggcatggcggcgcccctcagccccccgctggcgccgccgcctcctcccgtcagcggccggggctgtgggggggtgagatgggggcgtttgaagacgaagtggggggggcaggctccccccaaaatccaagaagaacggttgctcagggatttggcggccaagccttccttccttgtccccggggctttctactgccgggtccccgtgctgctgcagccccaggcaccgctccacgccactccccacgccgccgccgccgccgccgctcgctcccggccccgccgccgccgcggccgccgctgccctgccagccccggaggcagcccagtgcgcgcagccgcactgcggcccggcgcagaccgcacaacacctaccgctccgccggggggcgtggaccagggtgtgcgggccgcgggcgcgacgggccgggatgggggcgcacggcgcggagggcggcgcgggccagcgggccagggaagcgcgccgctgggggccgggaggagtccggcccggctggtggagagcaggaaaacgtgggggaggtgctggcgagagaaagagaacttgcgtgaggaggaggaggagaaaccaaatttaataatatttggcgtggaaatgggatttgggcgggggaggcatcttcaaagcaagtaaagagaaatcaacattatcccccttcccctgcacatgcatgtgaggattacttcctccctgagtaaatgaagagaactgaagcaggtaagacgataaactgacttttcagaagcccccaaagaagaacacccgttggaattaaccaccctttaggtaattcggtcttgaacggaaatcgcgagtcaggagctgggttgagtgctcctcggtcgggcattcaaagccctccaaatctggccccactttaactatccaatcatagcggcctccatccccctgcaagaactcccggctccaatcagggaagtctccatgccatcctcaacgcgcagcagattcattcttccttcgtgcctttgctcatgctgttcccctccacctccccaccccaccccaccccctttccaggaatgccctccctcctttataccgctcccaattccacccaggctctaaagcatagctcaagtcgcggcttgtcagggtccctgcagccaaggccactgcctgcctctgaaagaaacgcatgtagtactcacaacatggaggctcaggcgtcagccacgagctccttcctttggagcccgttgaacacccgccctccccccgcagactccgcaccattcccccccttcccattcatacctaaatgatagctttgccacaaataagtcagtctcctttaagagcagaagaattggcttttctaggtggggctgatcagggaggctgcgtggatgtagaatacaacagccaaggcctctggcaccaaatggaacagctgttcagctcacactgacctttctttgggcccgtgggtgttatgagcccttcagctttaacttttctgatagagtgtctatcaggtttctacctgttagatcctctggccactttcctgctgtgtgtggactttgggctgtggggctctgccaccttttagactcctagtggatggtgaatctgattggcttgggttgcctggcctttgagttctcagttccctgccttggcctgaaaccctcttgcttttgtccactgtgccctctctcctggcccacagacttaaggcccagactcacactgaatgct

SEQ ID NO: 1242336 - DNA, 4001 bp, Homo sapiens
ggtataaagggcttaactggcgttttctggctgtgagcagcatatggcaaaaatgaaataaagttttatgaaacatcataaagaaaacaggccggggatttaagttgcatgcctcccccctccccccgaaaggaaaaaaagtaaagaaactggagcgtttgggaaggaacaaatgcttctctgtggagttggtctcccttcccccaacaaaaacaagaggtccgggctcggaggaatttgaaagcagcgatctgccaaaaacattgtgaaaaactatgggggattcattggaaacagatgggctttttcagctttaattctgaaattctctccttttctgacacaataaaaacaaacagggggcgacgcagaaagttatcaaacaggaacaccagctcatttgagccgagtccgtgggtgtccccgcgtggccaaatgggtggaaacgagacgaggtctccggggagggggctgtcgggaactcggctgggacctcaggggcgaccctggctccacccctgggcacccggcaggtttgcaaactgctgggcgaggagctgaagaaagtgtccccagcaccgagggcgtgcctccccttctccccctcttcccgagcccctaggaggcacgttcccagccaccccctttctcggaaaaagggaagggagtgaggcaccccggcccctgcgccctccccacacggctccatctcacggcaactcgggcagggtgcccctctccgggtccccaagggcaggcatcgcacccacgacggggtgcgggagaaacaaaagacccgtggaaataggaggcggggtccggaggaggtccggagaacttgagcccggactcactcgcgcacatctggcccagcattgaggggcggcccagggacccggccccgcgcgcccggccggcagtgccttacctgcggggaagctgcagagaaggaaggcgagggtcggccagaatcccagggctgaacgtcctgcccctctccccatacccatccatccagctcggcctgttaccactagcctctccctggaagaagagttcagaaaaaaagaagaaaataaatcacgctgcgaagaaagggcagcctcgctccgccggcgggagcagcgagccgggaggctccgtccacctcggccgcgggcgcccggcgcgctccccttcccgcgccgccccccgcgcgcccctccctcgccatccatcactcggttctccgccaatgtcgacgcggccccgcgccccagccgcctgcgcaccgccccctcgcgctcgggtttcagcgaggccggcgaggtagccggaggcggccgggcggggacccaggctgcccggccgcagcgctcgccgtgaggacctcggaaaaccacggccctagatcagagggcgcgccacgctccccgaccctcgcgccatctccagcccgcggctgtccttgcaaaccaggcccagcacccttgggaggccgcagggcatgaggcggggcaggacgcccccttaatcccctccacgaatatccaatccaagtagaaaaactgtccttggaggcaaatcccagccctactttccaaccagactgccgaccccaagcttccaccgacgccccctggctcatcagtcgcactcagacgcgacaccggtgcaggaggctgaaaaacccacttccgagttgtctaggtctgggcaggatggctctctgcatctcagctactaacgcacctcgaggttcccgcccgtcgtggccccaggccacccatcctgactgggtttggcctgcctccagcacccccttcaagcacctcgctgcttcctgaagacttgccccggctgcgcccccgtgctgagggcctgcgggcctaaccttgccaccttggcacagctgccactccagagagatggctatgccggtccgcgtggcgcgcagggccggatggtttggcgctctctgcgaggcccgcaaggctgcacttgggagggcttcagtatggtgacctttcctaactctgtcgcttatttttctgggaaagaaacatctccttcccaaggttccctgggccctgcagttctgctgccgttgtgatatttaagggactggtaacttcccctgagagacatcttttggatgaaacacaaatagtcctgagcaagtgttcttagtcaaaccaactcctcccgccaccctcctcacctcactcccaagcctgcccatctggttctttggggaaaaacacctctgggtttttatccaatttggaggtttctcttaagcactatcacagtccttacctgctgcaaaggccacacaggcttgtgcaaggctgcagggctgcagctgcatttggggttccggctgccaggtcgggagtgtggagaggagcaagtttgaagggaggggagaaggccctatggctgtgaagacacaaccccagcagcaagacttatgaatctggcttccacaaaacaggtacacaaggggaccatacctcagccagctgtgcaacagggcaacacgaagctgctcttcccttaggtggaaatgccagacacaactcttctttacgagggggtgtcactgtgtttccctgaaatattgaggtctcagatcgacaagctctaaatatttttcccccaaaccagggttcatttcaggacgggtctgcaaaatgctacggttttcccagtgaaagcccaccatcgaaaatgctcttcctttcaagcttggccagtcctggggcccgacccaacaatttattctgcagcatcaccgaacggcagcccattccagcggccaccggggcacgctaagcaggcactgtgccaggctgcacagaggtgaccaagtggcctttccactaattaacaccatttgctagagtctgcctttcacgagctagttctagagtctctcgccaatgagaagggatcactggcattccaagtcacctggacagtaattaaccaccgtcactgctgcagcatgtccaggttggagaccagggctcaggatccagaggaggccatgcagcccgcagaagcccagaaatcacgcccttctggggctgcccttgcccaagaatggacttttcacagcaggactttttttttttttttcaatgagaacagaaaaaagaaatcttcaactatgttacaatttaaaagcaggaaaaaaaaaaggagtttctccctcccacgtcaggaaatgtcatccaatattcttaaagaaaggataactaaataaaatacatgtgcagcatattctgcaattccattacatacagtagtttttttttccaaagctattttaagtattgttaatataaagcagttgcacaaaaagcaaaggtgctttgacaaacaggtgtatgcactgattcctttttaggaacagtatctaaaaagaacccgtcgtccacactgccccaaaaaagacaaagattcatacagacacattgggatatatgtacaacataatgaaccccatcctaaagaagcaactgagataacccccagagaatacagaatcagaattgtgaaaaatcatagtgaagtttgcttgctgtaaagcctgagaattttttttttttcagttggttcttctcgcagcaggacttttaacctctacatttcagtttcttcatctgtaaggatcgggctgataatattgtcactccaagactacaactgaatagaactcggaagaggccccaggccatgggagttccagtgtccctgccgggagacgggtactggctgcctttttaggaggagaccccagtcttgcgacatgagcaaataatttgggaaaggggcacaaaaggctttttttccccccctttcttgaggagaaatgtctgaggctgaatttggacatcttcaaagtggggacttggccatcacacagtttagactatcatgagaaatctagccccagctagagcagtatggcgttgtgttgaccttgaggaatctagctatactggctaaaccaa

SEQ ID NO: 1242337 - DNA, 4001 bp, Homo sapiens
caacccatctgataaaacttccaatgggcttgatctttatctagaccaaaccaagaacacaaattgcaaactcctgcttttccaaaacgttgacttcttcttaaatagggtgatttttattttaattttgaattcttgggaggaaaccaaattgggctgttcaaccagactcttaagtaggtggagaaactgccttttaaatacactgggggtgaggagagggcaccctgctgtttgatcccctgcggaggttttgacattccaagctgagtactttttggggataccaagatccctcacccgacatcttgtccttggccaggcctccctatggaacctaggtctggagagcaggttgcggctctctgcgacccttctggggtgcgcagtggttgagtaagccggacgcacaagtctgagctggcgctgggggccaggagcagggctgggactagggggtaaactgatccctcgctccctactgttcactgtctgcgtggtccgcccattgggagccccaactcacagccaggccgagccagacctgcccagttttgccagttccttgaaacccagttggcggaagagcaaatcaaaataacccaatccgagtctaaactcaagtcctttcttgcaaagctcagtagtgcgcgggggctgcggctctacgcctggctgtggtgcgaaacaagatgaaattttttcaaaaagacacctctgaaccccgcaaacacaatggaaacggctgggagatcccgccttgcgccgggggggccatttggcccgtgacattgtgtttatttgtatttttagcaagaaaaaaaatgggtataaagggcttaactggcgttttctggctgtgagcagcatatggcaaaaatgaaataaagttttatgaaacatcataaagaaaacaggccggggatttaagttgcatgcctcccccctccccccgaaaggaaaaaaagtaaagaaactggagcgtttgggaaggaacaaatgcttctctgtggagttggtctcccttcccccaacaaaaacaagaggtccgggctcggaggaatttgaaagcagcgatctgccaaaaacattgtgaaaaactatgggggattcattggaaacagatgggctttttcagctttaattctgaaattctctccttttctgacacaataaaaacaaacagggggcgacgcagaaagttatcaaacaggaacaccagctcatttgagccgagtccgtgggtgtccccgcgtggccaaatgggtggaaacgagacgaggtctccggggagggggctgtcgggaactcggctgggacctcaggggcgaccctggctccacccctgggcacccggcaggtttgcaaactgctgggcgaggagctgaagaaagtgtccccagcaccgagggcgtgcctccccttctccccctcttcccgagcccctaggaggcacgttcccagccaccccctttctcggaaaaagggaagggagtgaggcaccccggcccctgcgccctccccacacggctccatctcacggcaactcgggcagggtgcccctctccgggtccccaagggcaggcatcgcacccacgacggggtgcgggagaaacaaaagacccgtggaaataggaggcggggtccggaggaggtccggagaacttgagcccggactcactcgcgcacatctggcccagcattgaggggcggcccagggacccggccccgcgcgcccggccggcagtgccttacctgcggggaagctgcagagaaggaaggcgagggtcggccagaatcccagggctgaacgtcctgcccctctccccatacccatccatccagctcggcctgttaccactagcctctccctggaagaagagttcagaaaaaaagaagaaaataaatcacgctgcgaagaaagggcagcctcgctccgccggcgggagcagcgagccgggaggctccgtccacctcggccgcgggcgcccggcgcgctccccttcccgcgccgccccccgcgcgcccctccctcgccatccatcactcggttctccgccaatgtcgacgcggccccgcgccccagccgcctgcgcaccgccccctcgcgctcgggtttcagcgaggccggcgaggtagccggaggcggccgggcggggacccaggctgcccggccgcagcgctcgccgtgaggacctcggaaaaccacggccctagatcagagggcgcgccacgctccccgaccctcgcgccatctccagcccgcggctgtccttgcaaaccaggcccagcacccttgggaggccgcagggcatgaggcggggcaggacgcccccttaatcccctccacgaatatccaatccaagtagaaaaactgtccttggaggcaaatcccagccctactttccaaccagactgccgaccccaagcttccaccgacgccccctggctcatcagtcgcactcagacgcgacaccggtgcaggaggctgaaaaacccacttccgagttgtctaggtctgggcaggatggctctctgcatctcagctactaacgcacctcgaggttcccgcccgtcgtggccccaggccacccatcctgactgggtttggcctgcctccagcacccccttcaagcacctcgctgcttcctgaagacttgccccggctgcgcccccgtgctgagggcctgcgggcctaaccttgccaccttggcacagctgccactccagagagatggctatgccggtccgcgtggcgcgcagggccggatggtttggcgctctctgcgaggcccgcaaggctgcacttgggagggcttcagtatggtgacctttcctaactctgtcgcttatttttctgggaaagaaacatctccttcccaaggttccctgggccctgcagttctgctgccgttgtgatatttaagggactggtaacttcccctgagagacatcttttggatgaaacacaaatagtcctgagcaagtgttcttagtcaaaccaactcctcccgccaccctcctcacctcactcccaagcctgcccatctggttctttggggaaaaacacctctgggtttttatccaatttggaggtttctcttaagcactatcacagtccttacctgctgcaaaggccacacaggcttgtgcaaggctgcagggctgcagctgcatttggggttccggctgccaggtcgggagtgtggagaggagcaagtttgaagggaggggagaaggccctatggctgtgaagacacaaccccagcagcaagacttatgaatctggcttccacaaaacaggtacacaaggggaccatacctcagccagctgtgcaacagggcaacacgaagctgctcttcccttaggtggaaatgccagacacaactcttctttacgagggggtgtcactgtgtttccctgaaatattgaggtctcagatcgacaagctctaaatatttttcccccaaaccagggttcatttcaggacgggtctgcaaaatgctacggttttcccagtgaaagcccaccatcgaaaatgctcttcctttcaagcttggccagtcctggggcccgacccaacaatttattctgcagcatcaccgaacggcagcccattccagcggccaccggggcacgctaagcaggcactgtgccaggctgcacagaggtgaccaagtggcctttccactaattaacaccatttgctagagtctgcctttcacgagctagttctagagtctctcgccaatgagaagggatcactggcattccaagtcacctggacagtaattaaccaccgtcactgctgcagcatgtccaggttggagaccagggctcaggatccagaggaggccatgcagcccgcagaagcccagaaatcacgcccttctggggctgcccttgcccaagaatggacttttcacagcaggactttttttttttttttcaatgagaacagaaaaaagaaatcttcaactatgttacaatttaaaagcag

SEQ ID NO: 1242338 - DNA, 4001 bp, Homo sapiens
ggggaaaaacgcactttagactcacagaacactggccatatcccttctgctttctggccatcagtttcttctgagaaactgaaaataccagcacccattcctgcctgcttcctgggagcagcaagcatccctggaagaatggctgaaaaactccctgtcccagtgtcagggatgctcagtccctatttatttcattttgcaactgctcgtctaagaattcttgggcttggcttctcacagggctgctgaagagcaagggattgtattaaaaaggagattcttgtgcctttattgtctattattacatacactgggaagcagcaagttattccttggaggaggtttgtaaaaagagaaagcaggcagaggtttcttagcaaaagtcaaaggtgccctccttgaatgagatgccaagctattctaagacctcgtctgtcacaagtctcatgatgacataaatacctaccaatggagacacagtttgagacagcatgacggggcagaccagccacccaccatttcatatgtctattggagaatgtaagcaactgtctgacacctgggagggaaataatggaagcagggtacttgaaaaaaggaggctaagacctctttcactaccagcacagcccagagagtctcaagggggtactacagtagaccactacactgctctacaaggggccagggtgcccttcagaaccgggtgagcccagctcactgctaatatattatctggcctggaaggtggcagcaaaaaccagccacagagaacgtggagcccgcctggatgtgtgggtgccccacccagagcctttgtctgcagaacttgccatccagccacgtctgccccagttgttaattggagatcatgtccctgtaaagggggcttgcttgtcacttgctgtggtaacagcaagaaaccccttctttgtatgtgcaaaaaaaaaaaaaaaaaaaaccacaaaacccagtttgggtacactattctgttcctgcacaaatgggcaggaggccctctcccagttctcctcctgttgcccttcggagcacagttactctcttttctaggggtcatggctcaaaatccacccaagaaatcacccgtttgtgatgcacaggagaagacagaggtttgtgcattggttttcaagatctctgcaccagatacctgcggaaggggcatcttcttacagcagttaacattttatattacgtttttgctggaagagtctaaaaccaaacagagaaggtgatggagctcctttaggtgacagcatgccactcaacacgacccgcaatttcgtcccctgagctcaatgtgctgagcatgggaggtcggggttctccctggtaccgtcgatactcagagagcttctgtagcctccttcctggaggcgagggctggttcccgcctctccaccttgtgcgggagactactttgagaacacccaacaacttcgcagcctaagaggaatgcacagctcaccacttccgctagatggcgctacttcccctactccgcccgcgagacacccaatttataaaataaatacaacccaacacctcccaaaaccacaccacataatagcagctcacaggctcccattagaaatctcaatttgggagaactgattctacctccgagcaagtctaatacaattacattaataagacgcaatcccgaattgcacccgagcgtcccccacacccgccctcccattgaatacacctgtcccccatgcccgggcttgtaccctgggttgagctgcggcgcgagccggcgctgaatcgtcgccgtgccctcccgtccacttaggaaagccggggcggcttggcaatgggcatcctcggccctcaatccaaggtccgcaccttcccgtacgccggcgcgccgaggcaaagggccgccgggacgcgagcccacgcggtgcactgcgccgacatccccgagggcaggagatggccaggcagctccgcagccgggcgtcgagcgggaggcgggggcccgggcggcgcgggccaatgggggttcacggcgggacagtcgggtggccggctccgtccggggctccgcgagccgggctgagggaaggagctcccagcccgcacacggtgtaagggacgtgtgccgggtctgcccaaccacgcgcgctggcggctgcccgggggagagtattttaggaaaaaagaacaaacaccaaaccacaaaaactttcctgctgccaacagctaaagcgatagaggcgcagcaaagctccaaatgtgggcaagatgggagcaagatgagacgcggggctaaggaagaccaaagcagcgccgtggccccggcatgtgtcggcggcgcctcggagatgtcagagccgggtctgcccggctcccgacccgcgcttaccttggcggctgcatgagcccctgcggcccgcggggggtggcgctggcggggctgcgggagaagagggggtgtcggggcgccgctcgtctgccccggggcaaggtgggaggggctccgctggcgctggtccccgccgccccggccggctcagcagcggcccggggagcgcctcctgctcccgggctgcatgcctgcgagcgcctggcggagccggcccgggagcgaacggccagtgcttccccggcccagcggctcgggcggcgcagccagcgctcgggagacaactgcagagtggggcggccgggaccagccccctccctcgcccggcccccgcccgccgccgagcgcggcgtcgcgaggttcgtttgcgcgccgaggggagggggcgggccgggcgcccgggccgcgggcggggggcgcgcgcgggcggggccggcagggaggggcggggaggagcggggtgcgggctcgcgttgccccgccccgccgcggccccaccctcccgcatcagcaccggctgggtgggtgcggagtgcgccagcggccaagtcaagactccttgaatgctcaggttagggggcgcgggcggcaagtgcggcgactccccggggcgcctccaactttccgaatcgcccgcagggttgcggtggagcgcacggtgtccttcagttaggcggtggtcgaggggagttcctctgagatttctggagaaggcggttacatccaagacaaatgctgttgcgctctgcggagacgcacctttgttctatagagattttgttgttgtttaagaatcttcctgaaaaaactaatacatatgtattacatgctaacacacgcatacattcttgcgtagaattgtacataactcaggagtgtctagagtgaaaagaccgtatcgcactccctcccacggccgcggctctcccacggccgcggctcccccgcggtaaccttcggtcagggtgtgctctgccgcggttctttccagtctctgcgcttttacatgcacacgcacagattgcgagtggaatctcctgggcttttcaaaagaatgttttcaacattaagcgcatgcacacagtggcttgaacacggccacgtcgggagcagtaaatccccagaggctccgggagcccagggaaggacccttgctgtgaaacagcaaagagccacccaatcgccatgtgtggatctgaaaccccagctggagcgtgaagtcggtctggttacacagctcaggcccaaattagcactgcacggttagagagatttgccagtacattctagacagggttatgaccttccccttcttacagaacaaactgtcttgaattttgatatgatgagaactctggatttgcaaaatgaaaaggtatcgtccgcattaaaacacgatcgttatttatgcgtgtggtcttcagagatgtggttttaactcaatattctccgttttatttgtcaagtgtatttgtataatctatagctgggatataaataaaattaagtggtttagcaggaagggattggggatgggtttctagaattagctctgaccttcggcaagtcatctagctctgctgggcctcagtttcctcatctatga

SEQ ID NO: 1242339 - DNA, 4001 bp, Homo sapiens
agttttgccagttccttgaaacccagttggcggaagagcaaatcaaaataacccaatccgagtctaaactcaagtcctttcttgcaaagctcagtagtgcgcgggggctgcggctctacgcctggctgtggtgcgaaacaagatgaaattttttcaaaaagacacctctgaaccccgcaaacacaatggaaacggctgggagatcccgccttgcgccgggggggccatttggcccgtgacattgtgtttatttgtatttttagcaagaaaaaaaatgggtataaagggcttaactggcgttttctggctgtgagcagcatatggcaaaaatgaaataaagttttatgaaacatcataaagaaaacaggccggggatttaagttgcatgcctcccccctccccccgaaaggaaaaaaagtaaagaaactggagcgtttgggaaggaacaaatgcttctctgtggagttggtctcccttcccccaacaaaaacaagaggtccgggctcggaggaatttgaaagcagcgatctgccaaaaacattgtgaaaaactatgggggattcattggaaacagatgggctttttcagctttaattctgaaattctctccttttctgacacaataaaaacaaacagggggcgacgcagaaagttatcaaacaggaacaccagctcatttgagccgagtccgtgggtgtccccgcgtggccaaatgggtggaaacgagacgaggtctccggggagggggctgtcgggaactcggctgggacctcaggggcgaccctggctccacccctgggcacccggcaggtttgcaaactgctgggcgaggagctgaagaaagtgtccccagcaccgagggcgtgcctccccttctccccctcttcccgagcccctaggaggcacgttcccagccaccccctttctcggaaaaagggaagggagtgaggcaccccggcccctgcgccctccccacacggctccatctcacggcaactcgggcagggtgcccctctccgggtccccaagggcaggcatcgcacccacgacggggtgcgggagaaacaaaagacccgtggaaataggaggcggggtccggaggaggtccggagaacttgagcccggactcactcgcgcacatctggcccagcattgaggggcggcccagggacccggccccgcgcgcccggccggcagtgccttacctgcggggaagctgcagagaaggaaggcgagggtcggccagaatcccagggctgaacgtcctgcccctctccccatacccatccatccagctcggcctgttaccactagcctctccctggaagaagagttcagaaaaaaagaagaaaataaatcacgctgcgaagaaagggcagcctcgctccgccggcgggagcagcgagccgggaggctccgtccacctcggccgcgggcgcccggcgcgctccccttcccgcgccgccccccgcgcgcccctccctcgccatccatcactcggttctccgccaatgtcgacgcggccccgcgccccagccgcctgcgcaccgccccctcgcgctcgggtttcagcgaggccggcgaggtagccggaggcggccgggcggggacccaggctgcccggccgcagcgctcgccgtgaggacctcggaaaaccacggccctagatcagagggcgcgccacgctccccgaccctcgcgccatctccagcccgcggctgtccttgcaaaccaggcccagcacccttgggaggccgcagggcatgaggcggggcaggacgcccccttaatcccctccacgaatatccaatccaagtagaaaaactgtccttggaggcaaatcccagccctactttccaaccagactgccgaccccaagcttccaccgacgccccctggctcatcagtcgcactcagacgcgacaccggtgcaggaggctgaaaaacccacttccgagttgtctaggtctgggcaggatggctctctgcatctcagctactaacgcacctcgaggttcccgcccgtcgtggccccaggccacccatcctgactgggtttggcctgcctccagcacccccttcaagcacctcgctgcttcctgaagacttgccccggctgcgcccccgtgctgagggcctgcgggcctaaccttgccaccttggcacagctgccactccagagagatggctatgccggtccgcgtggcgcgcagggccggatggtttggcgctctctgcgaggcccgcaaggctgcacttgggagggcttcagtatggtgacctttcctaactctgtcgcttatttttctgggaaagaaacatctccttcccaaggttccctgggccctgcagttctgctgccgttgtgatatttaagggactggtaacttcccctgagagacatcttttggatgaaacacaaatagtcctgagcaagtgttcttagtcaaaccaactcctcccgccaccctcctcacctcactcccaagcctgcccatctggttctttggggaaaaacacctctgggtttttatccaatttggaggtttctcttaagcactatcacagtccttacctgctgcaaaggccacacaggcttgtgcaaggctgcagggctgcagctgcatttggggttccggctgccaggtcgggagtgtggagaggagcaagtttgaagggaggggagaaggccctatggctgtgaagacacaaccccagcagcaagacttatgaatctggcttccacaaaacaggtacacaaggggaccatacctcagccagctgtgcaacagggcaacacgaagctgctcttcccttaggtggaaatgccagacacaactcttctttacgagggggtgtcactgtgtttccctgaaatattgaggtctcagatcgacaagctctaaatatttttcccccaaaccagggttcatttcaggacgggtctgcaaaatgctacggttttcccagtgaaagcccaccatcgaaaatgctcttcctttcaagcttggccagtcctggggcccgacccaacaatttattctgcagcatcaccgaacggcagcccattccagcggccaccggggcacgctaagcaggcactgtgccaggctgcacagaggtgaccaagtggcctttccactaattaacaccatttgctagagtctgcctttcacgagctagttctagagtctctcgccaatgagaagggatcactggcattccaagtcacctggacagtaattaaccaccgtcactgctgcagcatgtccaggttggagaccagggctcaggatccagaggaggccatgcagcccgcagaagcccagaaatcacgcccttctggggctgcccttgcccaagaatggacttttcacagcaggactttttttttttttttcaatgagaacagaaaaaagaaatcttcaactatgttacaatttaaaagcaggaaaaaaaaaaggagtttctccctcccacgtcaggaaatgtcatccaatattcttaaagaaaggataactaaataaaatacatgtgcagcatattctgcaattccattacatacagtagtttttttttccaaagctattttaagtattgttaatataaagcagttgcacaaaaagcaaaggtgctttgacaaacaggtgtatgcactgattcctttttaggaacagtatctaaaaagaacccgtcgtccacactgccccaaaaaagacaaagattcatacagacacattgggatatatgtacaacataatgaaccccatcctaaagaagcaactgagataacccccagagaatacagaatcagaattgtgaaaaatcatagtgaagtttgcttgctgtaaagcctgagaattttttttttttcagttggttcttctcgcagcaggacttttaacctctacatttcagtttcttcatctgtaaggatcgggctgataatattgtcactccaagactacaactgaatagaactcggaagaggccccaggcca

SEQ ID NO: 1242340 - DNA, 4001 bp, Homo sapiens
gcccttcagaaccgggtgagcccagctcactgctaatatattatctggcctggaaggtggcagcaaaaaccagccacagagaacgtggagcccgcctggatgtgtgggtgccccacccagagcctttgtctgcagaacttgccatccagccacgtctgccccagttgttaattggagatcatgtccctgtaaagggggcttgcttgtcacttgctgtggtaacagcaagaaaccccttctttgtatgtgcaaaaaaaaaaaaaaaaaaaaccacaaaacccagtttgggtacactattctgttcctgcacaaatgggcaggaggccctctcccagttctcctcctgttgcccttcggagcacagttactctcttttctaggggtcatggctcaaaatccacccaagaaatcacccgtttgtgatgcacaggagaagacagaggtttgtgcattggttttcaagatctctgcaccagatacctgcggaaggggcatcttcttacagcagttaacattttatattacgtttttgctggaagagtctaaaaccaaacagagaaggtgatggagctcctttaggtgacagcatgccactcaacacgacccgcaatttcgtcccctgagctcaatgtgctgagcatgggaggtcggggttctccctggtaccgtcgatactcagagagcttctgtagcctccttcctggaggcgagggctggttcccgcctctccaccttgtgcgggagactactttgagaacacccaacaacttcgcagcctaagaggaatgcacagctcaccacttccgctagatggcgctacttcccctactccgcccgcgagacacccaatttataaaataaatacaacccaacacctcccaaaaccacaccacataatagcagctcacaggctcccattagaaatctcaatttgggagaactgattctacctccgagcaagtctaatacaattacattaataagacgcaatcccgaattgcacccgagcgtcccccacacccgccctcccattgaatacacctgtcccccatgcccgggcttgtaccctgggttgagctgcggcgcgagccggcgctgaatcgtcgccgtgccctcccgtccacttaggaaagccggggcggcttggcaatgggcatcctcggccctcaatccaaggtccgcaccttcccgtacgccggcgcgccgaggcaaagggccgccgggacgcgagcccacgcggtgcactgcgccgacatccccgagggcaggagatggccaggcagctccgcagccgggcgtcgagcgggaggcgggggcccgggcggcgcgggccaatgggggttcacggcgggacagtcgggtggccggctccgtccggggctccgcgagccgggctgagggaaggagctcccagcccgcacacggtgtaagggacgtgtgccgggtctgcccaaccacgcgcgctggcggctgcccgggggagagtattttaggaaaaaagaacaaacaccaaaccacaaaaactttcctgctgccaacagctaaagcgatagaggcgcagcaaagctccaaatgtgggcaagatgggagcaagatgagacgcggggctaaggaagaccaaagcagcgccgtggccccggcatgtgtcggcggcgcctcggagatgtcagagccgggtctgcccggctcccgacccgcgcttaccttggcggctgcatgagcccctgcggcccgcggggggtggcgctggcggggctgcgggagaagagggggtgtcggggcgccgctcgtctgccccggggcaaggtgggaggggctccgctggcgctggtccccgccgccccggccggctcagcagcggcccggggagcgcctcctgctcccgggctgcatgcctgcgagcgcctggcggagccggcccgggagcgaacggccagtgcttccccggcccagcggctcgggcggcgcagccagcgctcgggagacaactgcagagtggggcggccgggaccagccccctccctcgcccggcccccgcccgccgccgagcgcggcgtcgcgaggttcgtttgcgcgccgaggggagggggcgggccgggcgcccgggccgcgggcggggggcgcgcgcgggcggggccggcagggaggggcggggaggagcggggtgcgggctcgcgttgccccgccccgccgcggccccaccctcccgcatcagcaccggctgggtgggtgcggagtgcgccagcggccaagtcaagactccttgaatgctcaggttagggggcgcgggcggcaagtgcggcgactccccggggcgcctccaactttccgaatcgcccgcagggttgcggtggagcgcacggtgtccttcagttaggcggtggtcgaggggagttcctctgagatttctggagaaggcggttacatccaagacaaatgctgttgcgctctgcggagacgcacctttgttctatagagattttgttgttgtttaagaatcttcctgaaaaaactaatacatatgtattacatgctaacacacgcatacattcttgcgtagaattgtacataactcaggagtgtctagagtgaaaagaccgtatcgcactccctcccacggccgcggctctcccacggccgcggctcccccgcggtaaccttcggtcagggtgtgctctgccgcggttctttccagtctctgcgcttttacatgcacacgcacagattgcgagtggaatctcctgggcttttcaaaagaatgttttcaacattaagcgcatgcacacagtggcttgaacacggccacgtcgggagcagtaaatccccagaggctccgggagcccagggaaggacccttgctgtgaaacagcaaagagccacccaatcgccatgtgtggatctgaaaccccagctggagcgtgaagtcggtctggttacacagctcaggcccaaattagcactgcacggttagagagatttgccagtacattctagacagggttatgaccttccccttcttacagaacaaactgtcttgaattttgatatgatgagaactctggatttgcaaaatgaaaaggtatcgtccgcattaaaacacgatcgttatttatgcgtgtggtcttcagagatgtggttttaactcaatattctccgttttatttgtcaagtgtatttgtataatctatagctgggatataaataaaattaagtggtttagcaggaagggattggggatgggtttctagaattagctctgaccttcggcaagtcatctagctctgctgggcctcagtttcctcatctatgaatagtagggtgtgtgtgtgtgtgtgtgtgtgtgtgtgtgtgtgtgtgtgtgtggtcttcctgccctgacattctgtgccctgacattcagtgaataaccaatttcttcatctttcatagctcagctccaacatcttccccaccctctagggagtcctcacatccgtgcctttccttcctaacactgagctcactcggtaattaggcgctcattagagtgacctttccctacatgttggcctctcccaccgtaccataagcatcatgagggcaggaaccaggactccttggagtcatcattgcattcctagcacttaatatggtgcctggcacactacaagaatctctgaatgactgtcacgcagatagtagatttcttactgttcttccaaattgcctggcatttttaaaaggtctgtaagtggaaacgtgtctttttaaaatgaggcctttggaaagtaaccagcagggttttcccatggtgggggacaaacaatccactgtctagataaggacagacaattctcagctcaatcaagggccgtggaggtagccggtaactatttaccttgatgagtgcaggcacccgtggagaagacaacgaatattaatgctactcgttaagtacttggttaagttagaaccctgcataggcagttggaatacacagagtgctcagatttaaatgaagc

SEQ ID NO: 1242341 - DNA, 4001 bp, Homo sapiens
tctctctctctctcatttctttcttttttttttttttgaaagggagagagatagagattcactctgtcacctaggctggagtgcagtggtgctgtcatagctcactgtagcttcaaactcccaagctcaagcgatcctcccacctcagcctcccaaagtatgctgggattacaggtgtgagccatcgcacccagcctatttaaggtcttgaggtcctccactccccagacacattgaggacctgtgaacgcccatgggagttcttgccccttatgctctggggtcaagtgggaagcaagtgcgggagggagggagaagaacaggtaaaggagggtctcaagcttgcctgcctcactgtttgctggaaagtcccccccttgaggagaggaaaggtggacaatgtgaacagtggatttggagcctgaatcccaaggctgcagctgtctaagatatcttttaaaaaacagccctaaatggagcccaggagaaactgtggtctccccagcagggggcgcaccccttatctgttacttcccttctaggcaccaagtaactattaaatgcagcccatgatagccctaactttttggcagccacttaatatggctggctcccaccaagcctgcagccccccaaacgcagtcttttttcatgcaggctgccattctgaaagtgtgcagttgttttcttggagatagagaatcccctgttgccgagaatgtctaaggtgtggagggaataccagttgatataggcggctgctggagaggggctttagggtccctttcaaagctaacagtcaatgactacatgaacaccaccggctagaataattttcattggctgatggcggatggagtggaaaatcagaaagtacaagggcattctgattttgggaagagccccaggctgggagtccagaggtcgggcagctcagagtgaccttgggctagctctccctgctcctgagtcctagggcacctgtgtttggtgctcttgtagcaattgctccattatgaagaaaggatcccaccccaactctgccagagctttacatgcacttcctcgccacagcctcaccccaacccctgtgaaggaggtcctaccattatcttcattctgtagatgaggaaattgaggtttaggaaggttggcatttgcctgaggccagccacctggtttgtggcaagagccacgagagcatgagagaaagggaggtgtgtgattgtagggtcatgctcttaaccacagcaccgctgacaccagaagattcaggggcgcttgttttccctctccaagctaaaagggggtgggtgtcctggcctcctggcccaccagtggtcccacaacacctctgcccacagcagggctggcgcttatttggagtaagcgctcctctggacaagggagccaggtcatccactggttggtaatggggcgagaggactcggatcttcttagtataccaagcagggctctctgacagggatgttggggggctctgacggctgggagggcggtcaaataaaaacctcatcccggtgttttccctactagtttttcacggggaaaaggagtttgtgcacatctgacaatttcccacgcatgccctgcagaggccggcgagatgcggagtccgcggctgcagggtagatcccctcctctgcccagctctgggccgagcccttggccaggtggggaccggcgcggatatgcctccgctgggcctgcaggcggcgagacttacttgggtagcgatagtagaattcgttctccatgtcgctcaagttcttgtgcgtcctctctgaccaccagtgggcgtcggcctcgaagtcgtagcgcacgaacaccccgaagagaatcaccataatcacctgcaggagcaggcaggtgagcggcagccgccagcggaggttggtgttccaggccatgctgcaggggtgcctggccgggctggcagcgggcggttcggacgctcggaggccggcggggcttttgagacccgggcaggggggcggggcggccacgtggggcacggagcagctgactcgggcaccgcccgcgcgctcgcccaactggcaggggcccaacccaagccgagggccccaaaagattccccgcgtcgggctgggggacagcggcaggagcagaggctaaggcagtgggcaggaggatcagggtgccccaaattctgtgtgtcccgttgatactggggcctttctccttttgttctgctgaacagagaaacacggggatcattggcctcccagtgagatcagaaggaattcccagacctaagtcatcatcatcaacatcatcatcatctgccatcatcatctgcatcatcatctgtcctttctttttctgattatgaaattcatacagggcacatgagaaacaaggaatgtttgggacactgtcacacaacagagcggcctggggagacatctgtgatgtgctaccccagacttgaccctggaacagaaaaaggatgttaattggaaaactggtaaaatccaaataaagcctgaaaattagttaatagtgacgttcccatgttgttttcttagttgggacaaatgtcatggttatgtaaaatgttaacagtaggataaactgagtaagggctatatggggactgtctttgccacttttctgtaaatctaaaattattccaaaatacaagggttttaagaaaaaaaacacgtataaaggattgtaagaacaatttaagagtttttcacaagttcattggtccatagtcaggaactgtcttctggttaagatctgtgatcttgacatgagttaaccataatatttaggtctgggaattccttctgatctcactgggaggccaatgatccccatgtttctctgttcagcagtataacagtctgtatattgtctgcttagtctgtatattgtcaaaataaatttgattttctaatttttctttaaaaatacagagataattgtagagatttggaaaatacagaaaaacacaaagaagaaagtaaaaatcactcataatcccaccacccagaggcaatactaatattttggtgtatgtactctagtcttttcctagctcattgaagaggggctggaggggagcagggggagtgtttcaaacgatcatactaatttatagcgtttttaactcctttcatattttgtaaacaccttcccatattatacttctacaactttttttctttttctttttcttttttatttatttatttttttgagatagggtcttgctctgatgcccaggctggagggcagtggcttgatcatggttcactgctgccttgacctcctgggctcaagtgatcctcccacttcagcctcccaattagctgaaaccacaggcatgtgccaccaggcccacctaattttttttttttttttttttttttttttgagacaggtctcgctctgttgcccaggctggagtgcagtggggtgatctcggctcactgcaagctccgcctcccgggttcacaccattctctggcctcagcctcctgagtagctgggactataggcgtgcgccaccgcgcccggctaagttttttttttttgtagagatggggtctccctatcttgcccagggtggtcttgaacttatgggctcaagtgatcctcccacctcagcctctcaaaatgctgggattacaggcatgagccaccacacccagcctgccacaacataacttttatagcaggatatactgtgctttatctagacaatccctagtgttaggtgacgagcgatgaggtcattttttatttgtttagtattacaaatcatgctgtcatgaacatccagatatgtaagtctttgcacaactttctgtgaattcctggaggcagagctgtttcaatacatatctctagatgttcccctagaaagattttacgagacaaagcatgcaccctgtgagccaggggtcagtgacttttcccatgcactcttgccaatgctggctttaaaa

SEQ ID NO: 1242342 - DNA, 4001 bp, Homo sapiens
gatccccaacccggtcctccttcaggttctaatttgcagctcctccccctccttttgctgggccttgactctcacttcctgccccactcctggctcagccagtttgggcagtgcctagggagcccagagacccagttcttcccaggggccagccccgccctccctggccttggggattgagggcagcccaggtgtcagcctgctcctcatccaccccacttccctctctcctcctcctcgtcatcttctttccaggccttatccaccatcagtcccaggctccaagacctcttttcctgctcgctctctcaatctctcgcccactccatcccaaacttctctccaaatcggggttgagccccttccagccctccataatgccaagcgttccccaagctctttctcacccctgtgccaaggaagggtcctaattcagccaggctgacctgagggcccaggacaagaaactgggttcccaaactgctcggaggtgactgaccctgttaggaccatcccatgaaaatcaaagtgccaggtttttttctgtgagctttgactggagaaatccaaatcagagccttccctcctaggctcacccaggcatatcagagtgggcagttagaggcccatgtcccccgagtgttcagaagggaactgagtcctatgaggtggccaggccctgccagtagctgccgcaaaggcccgggtgccccaggtctcagaagtctttggcctcctgcctactacttgctatgcagccatagctgctcaaacgaagcagaagaacttcttccagcggcagcgggagagggtgcgcacacctttggcattcagtttcttctccagccgggctttgtgctcaatggcactgagaatagccgagtcaaatacttccttcaagttcttctgcgtcaaggctgagcactcaaggtagcagcaggctcggatcttctcggccagaccctgagcctggggttggggcacggggccctcccggcccccctggtccagctgaattagtacgttgacatcgtccctcaggtcggcctgggtgcccaccagcagcacaggcgcctgggggttgtgcgtgcggatctcgggcagccatttctctgtgatgttttgaaaggagctgggctgcaccacgctgaagcacgccaggaagacatcggtatccgggtagcaaagggaacgaagtcggtcaaaatcctcctggggtgggaaggccaggtggtaaggattagccccccgacacatggaatccatttctcacccggggctggaaacctgagactccaagagcccaaggctttctccatttgctccatatggggtcctcccagcctccagcccatctccccgcagaccagtagaggccgcgcccagcttctcacctgtcccgctgtgtcccagagctcaatgcgcaccggagctccatccaccaggacttgcactgcaggggcggggcggggagagcctgagttaggaagagcgtcctgggccgcaccagcgccacctcggggcctgctccagtctcctccccggggtcctctgcgccctcccgccgagacgcccgccccagctccccggtgcacagccccgccgcagccacgcggccgcacgggcgattgaacgtacgtaccagagaaggtgtccagcgcagtgggccggtagcgcgcggggtacccattgcaggtgtagctgacgatgaggctgctcttgcccacggcgccgtcgcccaccagcacgcacttgatgcccagctctgggggcgcgctacgccgccgcgggggaggggtcggggcccggagcgggggcggctcggcctcgctcagctcccgcggcggcatggcccgctccgggggcagcagaggggccagcccgggtctcggcttcgctgcgctcggtgaagcaggtcccgctggctgcctctgactgaatgggtccaggctgggcgagtcggcccagcgctaccagcgggtttgtgtagggccccgcccatctcatctacatgtttcaggcggccccggaccccacccatcggcgaagatctcccgcggccaggcaccctgcgaggccaggcgaggaggaggaaaaccccgggaggaggaaaggcaggcagaaagctggagctccaagagtcacgcaggtacaaggacaaagaatcgtcaaatgagaataccaagaagagatagacatccatgatttattgttaggaggaagaagcaagttgcagaacatataatacagtatgttcaggttaaacaagtgtgcaaattaaaccttgttcaacttacaagaaacaactctatgcatatgtttgcatgagtattaaaaagttgggataattttattaatgaaagaattacttttttaaatattgaggctgagagcagtggctcatgcctgtaattccagcgttctgggaggctaagccaggaggatcacttgaccccaggagttcaaggttacagtgagctataatagtgccattgcacttcagcatgtgtgacagatcctaaaaacaaacaaacaaacaaaaaacctgttgacccctgaacaaagcgggaattatgggcgagaaaccctgtgcagtcagccgaaaatccctatataacttttgactaccccaaaatttaactattaatagcctgctgttgctgggctccgtggctcacgcctgtaatcccagcactttgggaggccgaggtgggtggatcacctgaggtcaggagttcgagaccagcctggccaacatggtgaaaccccgtctctattaaaaatacaaaaaattagccaggtgtggtggcgggtgccagtaatcctagctactcaggaggctgaggcaggagaatcacttggacctggcaggtggaggttgcagtgagccaagattgggccactccactccagcctgggtgacagagcaagactctctcttaaaaaacaaaaacaaaaaaccccccaaaaaaagtagccaagcatggtggtgtgcatctgtaatcccagctactcggaggctgaggtgggaggatggcttgaacctgggaggtggaggttgcagtgagctgagatcatgccattgcactccagcctgggcaacagagccagactttgtctcaaaaataaataaataaataaataaaaaataggctgggcgcagtggctcacacctgtaatcccagcattttgggaggctgaggcgggcagatcacatcacgaggtcgggagatccagaccatcctggctaacacggtgaaaccccgtctctactaaaaatacagaaaattagccgggcatggtggtgggcgcctgtagtcccagctactcgggaggctgaggcaggagaatggcgtgaacccaggaggcggagcttgagtgggccgagattgcgccactgtactccaatctgggagacgcagcaagacgccatctcaaaaaaaaaataaaaataaaaaaataaaaaaggccgggcgaggtggctcacacctgtaatcccagctaatttttgtatttttagtggagacgaggtttcaccatgttggccaggctggtcttgaactcttgacctcaggtgatccatctgcctcggcctcccaaagtgctaggattacaggtatgagccaccacgcccaggaggcttatcatattttcaaacttttttcttctgacctgtatcagaaagttagaatcatcgtaaaggtctgcacccttgtggtctccagttgggtaggctgaggagaaggaggaaaaggagttggtcttgctgcgtcaggggtggcagaggtggagaaggtggaaggggaggcaggaaaggcaggcacacttggtataacttttatctatttttagagatgtggtcttgatctgttgcacagtctggagtgcaatgacgcgagcatagctcactgcagcgtccaaactcctggcctcaagcaatcccgccccagccttccaagtagctgggattacaggcatgcacccccaggccaggctacatt

SEQ ID NO: 1242343 - DNA, 4001 bp, Homo sapiens
ccaaggtaacacagccaaaaaatagccagggatcagtactcagacccaagttgtgacttcctgtcaggaccaagaggcagcctgctgtggcgcaaaagttggacctgggttcaagttcttctcttccacttgcaggctgtgagatttaaccccagtcttggttgttccctgtaaagtaggatggaagtgttatgaaatgtaatggacacataagcaatgcttggttaccagaacaggtcccattcatggcccacatgacaacctgcttccccagtgggtatttttggagacagctcttctgtttccaggttttctctcctgcctaaatgtcctgcctaagtgccttcaagaacccttcaccatcctgctcctgcatgtgaccaggttccatggtcagttcaatcacctagtcacagttggtaagtgacagagttgggacttgaacctatgcctgcctgacaccaagtctttttttgacacctagagccaagacatctgaagacaaactccctaggagagctggcgtcatagaaaccttaaaggttagggagacctgggtttgaatcaggctttgtcagttatgacttgtgtgaccctagcaagttatttaacctttctgggtctcagtttcctcatctgcaaactgaggataataacagtacctaccaaaaagaactgtcgtgaaaaccatataatttctgcaatgctcctggcacagtgtcctgttctaaagcatagttccccttctctttcttagctccatattgattattaccctaacttgcacaaagagacttggaggacccccatagagtatcggagggtcccccatttcctgctctttccactccacacccccagcaagcacagggaagttctgggggccataatccacccacaggaaccaaatctaagccacctttctggctggtagacatccaggtatgtgggcacagaggtagacaggctgaaatgctgctgtgctatcagttgggttttgctggaacaggaatggaaatggagaggctgacagaactgccctggggagcccaggcaagagggacagtggctggacacccccagccagttgtgcagaccatcagaacaagatcctagattttaggaatacagggttcaagtccgtgcggcaactcttttctaaatatgcccaagccattaactttgagttttaaaaatactgatttacaagctgtacacaatgaaaaaatgcctatccctcacaccatgctgatgctgttccctgccatctcagattaccaattaaatacagaatgcccagttaaatgtgaactttttttttttttttttttttgagatggagttttgttcttgtcgcccaggctagagtgcaatggtgcgatctcagctcactgcaacctctgcctcccaggttcaagcaattctcctgccttagcctcctgagtagctggaactacaggtgcccaccagcacgcctggctaatttttggtatttttagtggagatggggtttcaccatgttggccaggctggtctcgaactcctgacctcaggtgatctgcctgcctcggcctcccaaagtgctgggattacaggcgtgagcctaaatgtgaacttttttaatactaaaaaagtatttgctgttcatctgaaattcacatttaactgggtgtcctgtatttttatttgctaaatctgccatcaaattggtctggctcaacctggagaatggccaggtggtttcagttttacaggcatcttgggacgtggtctccctgctcccctgagtcctcaccccagtcctgggctccctggcccaggcaagccccaggtattgacttacctgccaggtcggcagctcctccttggggctacctggtacctgaatgtcctggagctctagaggttccctccgctggaggcgtggtccggtcagcaggttgggattagtgtgtcataaggaacttctcaccgcccacagtttccgttaaatcgggctcacaggaggccctcagtggggcaaaggaagacccagagagaaaggggagaggggagaggcctgggcctggctggaggcgcatcaaagccctcctttgtgtgctcctgctctggagttcctgctcggccatgtggaagcccggctgtggggctgggatctgggccagtcccattccctcttttctctgccctctttctcctcaagatcccggggtggggttgctgagagagcacccccccccccccaccaccaccaccagggtaataagaggtgaagggaaatcgtaaatatgactacatctacagtggcagctctggcaaatccaggcctattgcccacccctcccccagccagcaggacctggcatggtagttttcacctctgcagtgagtggggtcagttgagaaatgtggctggttaaggccaagcagggagaggacaagacaggctgagcctccttctgggcagtgtggtgcagtggcatgccctggaaccagactgcccgcctgtaaagcctcgctcgagcatcttctggccgggaaacatgacttcaaaactcatcggctcagtttcctcctctaagaagtgtagaaaactagaggaccaggctcatgactttagtgcggatgaaatggcagtaaagtgcttagttcaggggtttagctgcctgacaataagtcctctggaaaggtcagttactccaaatacagtatcaataggtgcctaactggagggaacttattattcaatcctttgtacaggaagaaacccctctgcagcctctcaacaggtaacttcccagcctctgttttgctattccactggatgaggaggaggtaattcctgtagaacattttctgtctaggattccaagggcgggaagctccctgtttccattactggggagctctccttgtttaaaacctcattgttggtttgagccccaagcagcttcctataatgaccacccttggtcctggttttgcctcctagaggtgcccaggagaaggtcaagctcccctgcacaggtcgctctccagaatccaaccccagaagtgcttttttattttccctggacatagttcttgcttttccacccattcctactttggcaggtttgggatttcttcccaccaccccatctcctgccgaccccttcctccagagcaggctgcaatgcctggtgcttagatcttggggtgcatttgagtcaccttgagctctttgtttccaaaagccctttccctgggctcctactctggctgctgtctgggtcttgggctgtttctgtcccaagtcctctgtggagctggggatccttcatttatgtcattcttcttcctggtggtctagtcctatgctgtcttatatagtagccgctagccccatgtagcttttcagcattcgaaatggggtaatgctagagattgggtctcactataaaaaaaatttttataaatagggtaatacgacccaagaactaaatttttgtgggagtctggcaggggacagagtctcgctctgtcacccaggcgggagtgcagtggtgcgatctcagcttattgcaacctccgcctcccaggtgcaagtgattctcatgcctcagcctcccaagtagctgggattacaggcacgcaccaccatgcccggctaattttagtatttttagtagagacagggtttcacatgttggccaggctagtctcgaactcctgagctcaagtgatcaccccgccttggcctcccaaagtgctgggattacaagcgtgagccattgtgcccagccttacatttttaattttatttgattttaattaacttaaatttaaatttaaaaactaatactggattcagtgttttgaaaacttttaagtaggtttagaacaatttatatgtgtgatcctatttttttaactgtaaattttgtgaagtatttctcataagaatttagagtcccaagtgagatgtgctataaagtatctaaagacttagtacaaacaaa

SEQ ID NO: 1242344 - DNA, 4001 bp, Homo sapiens
ggctcacgcctgtaatcccagcactttaggaggccgaggccaggagttggagaccagcctggccaacatggggaaaccccatctttactaaaaatacaaaaattagctgggcatggtggcacgcacctgtgatcccagctactcgggaggctgaggcacgagaatcacttgaacccagggaggcggaggttgcagtgagccaagatcatgccactgcactccagcctgggcaacagagcgagactccatctcaaaaaaaagaaaagaaaagaaaaaagaaaagaaaagaaaaaaaacactcctcttgcacaaagatggtagtagtttgaaccagccctagatcctttgctcaaatgaattgacaaatctgcaagaactactcatttcagctgtacaggctgccagccacattcagcttcaattgcattaagcgtgctcctagccctatgccgtagaaagtccactggaccaggtgaccaggcccaaccttgccacttaatctgtgacagcctcaggaaagttataccatctttttgaatcttggtttcctcataggagggataaaaagaaaaaaaaacttgaatgagatagttgccaagttgtcttgatagttgccaagttgtcttcaaattctaatatatgatttaatacataagcctcaagacttttaatccctacaagattattctttttgccctcttttggactcttcctctacttattacacacctcacccaacactaagcaagtgcctttaatacccacatagcactattgtggccagaactaaaagtgaaagttaaacagtctttttgaaatatactttcttgtgagtacaggcgaaagagtagagaaaaccacgactgctttttttttttttttttttttgagacagagtcccactctgtcacccaggctggagtgcagtggcgcaacctcagctcactgcggcctccgcctaccaggttcaagcgattctcgtgcctcagcctccccagtagctgggactacaggccgcgccaccacgcccggctaatttttgtatttttagtagagatggggtttcaccatgttgacatctggttgaacgttggccaggctggtcttgaactcctgacctcaggtgatccgcccgcctcggcctcccaaagtgctgggattacaggcgtgagccaccgcgcccagcccgacgactgctttttcaacaagcttccaaaaaagtgaaaccctaaagcacttctctccgttaccctgtcccacagtctccaccgaaagcagcccagacctcaggcccattagtctgcagtgaccgcggtctcaggagacgggctcctaccgtggcgtccgggatctgaagtctgcgtatagtccagggagttgggcaggctctggctgcggccatgacgctgggtccgtttccatcgctggctgtaaaggaggcacaggaatccaaggccggcggcggtacccagcaacagtcccagcccggcacgggcaccacccagggctcccagtctagacatgctgcacctgcggccagcagaagtcaccgggagcaggcaggcgggcgggcgggcgggggtaaggagagagagagattcgtgaacccggtaaacccaccctcaaggctgaaccccggcaggtatccccttgcccaaaccctgagctctcgactacgtgcaccccagtctgaaccctaaggcttcctccagcctcctgggccccactgcctctcttctcacccagcctggacgtagccgcccctccagtacaccccccgacccgggtcacagagtccggcttctgggccttcaacccccacctcagcctcacgacactgcagaccacaaacccggcgccctggctgcaaactcctggccttccgccgcggcccccgaaggcgctctggcctggcaggagatccactcagacccttacccggccgccagccaccatggcagcagccgccgcgggctcacgctgtcagtgaccgtgacgtcaggcaggcggcgccaggtgctcggcgccctgcgggaaggcgcagagagatgaccgcgccggccccgccccttgtctgtttccctcaggggcggggccacgggcgccgccggaggggcggagtcagcacagagcgcgaaaggaaagcaagaaggggcccaagacaggggaaaggcgggaaggcagggagacttcttgggcggacgctcgcgcagtcaccctcaccgtccggcagccaggcctccatttccctccggtcacaccggcttaacttgctgctcccggaatacgctcagcatattcacactttctacctgcgcttctgcctggacctcccctctgtacctggaaaacgtcacgctctccccacattttatttttatttttattttgtagagactgggtcccgctctcctggtctctcaaagtgcgatccgcccgcctcgggctcccaaagtgcgtgagccgccgcacccggccataaatcttaaacctaacgtgctgtcttataattctgttttactcttgtaattgtatgcaacttcttataattgtggcaactaaaaagaccgattttatggactatgataacaattttattgtgaacatttcttaagagttaaaatttagtttagtgaaagaaatatctaggccagtcctcccaatacccttgactagatcttatatttatttaccctttaattgtgagatattgtatacatataagaatacaggaggccggccgtggtggcacgtgactgtagtcacagatactctgggggctgagatgggaggatcacttgagcccaggtcgtcgaggctgcagtgagccatgatcactctgggcaacagaagtcaggatatcgaggccacccaggccaacctggcgaaactccgtctctactaaaagtacaaaaattagctgggcatggtggtgcacgcctgtaatcccagctactcgggaggctgaggcaggagaattgcttgaacccaggaggcagaggttgcagtgagccgagatctcgccactgtactccagcttgggcaacagagtgaggcctcctctcaaaacaaataaacaaaaacaacaacaacaaaaaatatatttatatatatataaagtatatatatatatatacactttattttggaggaaataaaaatttcctctggaaaccttcccagatcaccaccttggtgaaattaagcttttcaccctgctttgctcctgtggctctattgcctccattatactttttttttttttttagacggagtttcgctcttttcgcccatgctggaatgcagtggtgcgatctcggctcactgcaacctcctcccccgcccctgggttcaagcaattctcctgcctcagcctccggagtagctggaattacaggcttgcacccccacgcctggctactttttgtattttcagtagataccggatttctacatgttggtcaggctggtctcgaactcctcacctcaagtaatctgcttgcctcagtctcccaaagtgctgggattacaggcgtgagccaccgcaccagacccattacactctgttctgtgattatttgctttctactctgtctacaccactggactgcccactcttccaggatggggttcactcctgattcatcccaggtcccctgtgcctggcacagctctaatgcaaaagcatccataaaagctgaatggaggaaggaagaaaagaaggcgtgaccgacagcacgccctgccactttgacagtgtgttctcagctgtggcagaaaactcagtggcagaacaataatttctcctctctacgggggggaggcagctctgtgagataaacggattgtgatgagaggctaggccaaatgggcagaccaagcaggggaattcatttccccctggatattaaagatgttatctggcaggcacgtgtctgccagggcaatcagcagtgtggtgggtggctctggacagagctctttatcttgtgctgcatctg

SEQ ID NO: 1242345 - DNA, 4001 bp, Homo sapiens
tctgctgtaatgcatttttcaccaaaatgaagtcactttgtttatacctttctttaaaaaccagttctatgtctggtgaaataactagcaaacaagtggccaacagacaccaaacaaaagttaagaagtgacagaaggatctgcacatgatatagcacccgtgataaacaaggagactcattcttcctactttttcctaaaatattatttagatttataaacaccctcaccaattcttagaatactgttgtgaatctttggtcacaaacaaatgagcaggagagagatgataaagtcatttgtccaaggttaaatggcaagaaagtgtccaaaataagataaatcaaggctttagaaacaatcaatttaaaatgattgtaaaagtaaaagggcttccttcttatccatctgtttcacctcacaaatataaccagactagggtgaaacaatgtggcttatactgacatgaagatttttacaaaaatacatatagtaataaactatcaaaagatgtatctttactgtaataaagctaagtccagcgttacagaagttgtgtatggtaatctcaaaatcacattcaagcatttacaaccatcacacacacacacaacaaaaatgggaaaggaaatggaaccttagcttatgtttttcccagtttgttctttttagttcaagaggcccctaaaacaagaaaattatagataaaataccaaatgaaataaagtttagattaagtcacattcaaaagctacaggaaatcctacaaaacgtagtctatgtcagctggcatcttaccattcaagagaattctaaattaatgccgcacataaatcaagaaacaggaaagcttacaacaacacaatggagtcaccccacaacacacacacgaacaaattaaatgaatacctcatactttctggtattttttgaataatcaaaacttaggttgagaaatacccatctgtaaagatctatctactataacctatttaagaactgttgtaacaaatctatttctgctgcactgaacagatattcccactatagcactgacactgactctgataaattatcgaaggacaatagtaaaaacatcagtttctttttaaatgaccaacaagccaactccatacaaaatctgacgcgtctgtatttcagctgttccgcggactacgtttccttgatcacagcagcagcaggcgactccctagccgtcagggctgacttagcgccctccaactccccgggtccgggttaccttcatcactccattgtcaaatcgcactcccacgcctcggtcctcagcccccatcctgagactctagggagagtcggaagtgggagagaaatcccctcacccacactccctcactgtaggctgtgggtgtgtcggtagacgaatgccttgcccaaacacaaatcgtctgcggagacccagaccctaagtcaccaccgagccagagataaccggccggtcaccgaccccagccttccgcggccgcagcccttcctctttctcccctccaggccggcccctcccccgttgcgcgcacgcgcggcctccaatggatcccctccccccccgttcccctcaccttaatcattagccaccctcttctcttccagggtccgggaatcactgacccaggaaggaagacagaaatgtaaggcgtaaagagtaatgcgtcgagagccagcgatctgcgcctcagacgtcggcctaataggcccctagagtcaagaacagtgtctgtcaccgccaccaaaactgtacgtgcggcagcgcctggactcggcccagctaagccggcgtgggttcagaatgcctaatttggtcccacaagaactccttctctgaagctgcgggcgtttctacgctgcgcaaaccgaacacctcctcgccgtcgccgccactgccgctgctcccctacagccgccgccgccgcttcgccgccgccgccgcctaaccaattcctcccctaccgaggagagcacgacactagggctctttacgacagttcggaaagtgagagcgcagtagccttcacgcctccattaacatctgtttgtttctgcgcttgctcgattcccgtttctcaccgtcccgccccctcggtcccggccctccccctttgtactggttttatcagtctgttggcgaactgaaaggtgtcacaaagctcattatttaattttctttggtgattatgcgttcaacatttaagccaaatcttgactacatcttggttcattttttcgtaactaaaaattaaccaactacagaattgatacatttacagatatacgtaaacaaaaacatcatgggttagtgtctttcacaacaaatgatacccatatcatatgcgctaatgacataaagatcacggcacctcactgttaaagtgaatttgcttccggaatcagatcaaaagtggtcacatatctcctgcgaactcgggctgtacaatcgcataagcctccttgtttattttataaaagtcagtagataacaaatgcgtcattatatgcattaggaggatagagagaggatgagcttcagagtccatcaggcagacttcctttcaaagtccagtggtgccacttaagagttctctgattgatgagatccttataaatcttagtttcctcctctataaattgggataacgtatttacctcaaaaggttcttgttagattaaatgagacaatttatataatgctctgaacattacttgccaattaagtgttcactaaacattaattccctccctttgccatcaactcatctttttcaatactttttttgttcactcatattttccgtatcattcagtaagcaaatgattttggccgggcacggtggctcacgcctgtaatcccagcactttgggaggcctaggcgggtggactacctgagatcaggagttcaagaccagcctggccaacatggtgaaactccttctccactaaaaatacaaaaactagctgggcgtggtggcggacgcctgtaatcccagctactcggcaggctgaggcaggagaatcgcttgagccagggtggccgaggttgcagtgagccatgatcaagccattgcaccccagcccgggtgacagggagactccgtctccaagaaaaaaaaaaaaaaggctgggcgcggtggctcacgcctgtaatcccagcacttttggaggccaaggcgggcggatcatgaggtcaggagatggagaccatcctggctaacacggtgaaacgctgtctctactaaaaatacaaaaaattagccgggcgtagtggcgggcgcctgtaaccccagctactcgggaggctgacacaggagaattgctaggacccgggaggcagaggttgtagtgagtgcgagattgtgccactgcactccagcctgggcgacagagtgagattccgtctcaaaacaaacaaacaaacaaacaaacaaaacacacacacacacacacacacaaatgattttaaaattacaataatgatcaaggatagcagattgtgtgggaaaactaaaagagcattcgactaggattttcctcaatcctcctattttctcactcttaaacatagaattttgcccggactatcttatcttctcccttgattttaactgttactatctcatgacttctcaaacctgtatttccagctctaaccttttttctgaagcttttgacctgtgttcttcaattaggtagacaccagccatatgtggctgctgagcacttaaaatgtggctagactccctcctcttctccctctcccctccccttttccttttccgtctccctaaaaaaataaataaataaaaataattgagaagtgctttaagtgaaaaatacacatcgaatttcaaaggtacaatacaaaaaaagactgaaaaatctcagtactttttaatatttattatatgttgaaataatattttggatatattgggttaaatcagtggttctgaagctgggatgatttagc

SEQ ID NO: 1242346 - DNA, 4001 bp, Homo sapiens
cggagatctaatgtatagcaagcaaagatagatctaaaatctagatctcctgtccttagccctatattatttcataagataacgttacccatagaacggtaatgtcaagttataacatattttaactgctatcatttttcagatggtctcttttatttcctactgaagtcttggcccaaaaggggagaaaaagtcaaaagaagggcacataagtatgcctcaagtaaagcatgatacagaaacctctctttaaactataacaaaaaaaaaaagaaggaaacatctaaaaatctaaatggtttgattcaattagtttcctttatattttttattttaaagtaaaataactaggagtatctgctaaatgactgcaccttagctttatacaagcaaggtgcttttctcttaaacatcacaacagctctctctcaataatctgtagaaatggagtaccaaagtgaaattcgttaagatgtaacctctgctgtaatgcatttttcaccaaaatgaagtcactttgtttatacctttctttaaaaaccagttctatgtctggtgaaataactagcaaacaagtggccaacagacaccaaacaaaagttaagaagtgacagaaggatctgcacatgatatagcacccgtgataaacaaggagactcattcttcctactttttcctaaaatattatttagatttataaacaccctcaccaattcttagaatactgttgtgaatctttggtcacaaacaaatgagcaggagagagatgataaagtcatttgtccaaggttaaatggcaagaaagtgtccaaaataagataaatcaaggctttagaaacaatcaatttaaaatgattgtaaaagtaaaagggcttccttcttatccatctgtttcacctcacaaatataaccagactagggtgaaacaatgtggcttatactgacatgaagatttttacaaaaatacatatagtaataaactatcaaaagatgtatctttactgtaataaagctaagtccagcgttacagaagttgtgtatggtaatctcaaaatcacattcaagcatttacaaccatcacacacacacacaacaaaaatgggaaaggaaatggaaccttagcttatgtttttcccagtttgttctttttagttcaagaggcccctaaaacaagaaaattatagataaaataccaaatgaaataaagtttagattaagtcacattcaaaagctacaggaaatcctacaaaacgtagtctatgtcagctggcatcttaccattcaagagaattctaaattaatgccgcacataaatcaagaaacaggaaagcttacaacaacacaatggagtcaccccacaacacacacacgaacaaattaaatgaatacctcatactttctggtattttttgaataatcaaaacttaggttgagaaatacccatctgtaaagatctatctactataacctatttaagaactgttgtaacaaatctatttctgctgcactgaacagatattcccactatagcactgacactgactctgataaattatcgaaggacaatagtaaaaacatcagtttctttttaaatgaccaacaagccaactccatacaaaatctgacgcgtctgtatttcagctgttccgcggactacgtttccttgatcacagcagcagcaggcgactccctagccgtcagggctgacttagcgccctccaactccccgggtccgggttaccttcatcactccattgtcaaatcgcactcccacgcctcggtcctcagcccccatcctgagactctagggagagtcggaagtgggagagaaatcccctcacccacactccctcactgtaggctgtgggtgtgtcggtagacgaatgccttgcccaaacacaaatcgtctgcggagacccagaccctaagtcaccaccgagccagagataaccggccggtcaccgaccccagccttccgcggccgcagcccttcctctttctcccctccaggccggcccctcccccgttgcgcgcacgcgcggcctccaatggatcccctccccccccgttcccctcaccttaatcattagccaccctcttctcttccagggtccgggaatcactgacccaggaaggaagacagaaatgtaaggcgtaaagagtaatgcgtcgagagccagcgatctgcgcctcagacgtcggcctaataggcccctagagtcaagaacagtgtctgtcaccgccaccaaaactgtacgtgcggcagcgcctggactcggcccagctaagccggcgtgggttcagaatgcctaatttggtcccacaagaactccttctctgaagctgcgggcgtttctacgctgcgcaaaccgaacacctcctcgccgtcgccgccactgccgctgctcccctacagccgccgccgccgcttcgccgccgccgccgcctaaccaattcctcccctaccgaggagagcacgacactagggctctttacgacagttcggaaagtgagagcgcagtagccttcacgcctccattaacatctgtttgtttctgcgcttgctcgattcccgtttctcaccgtcccgccccctcggtcccggccctccccctttgtactggttttatcagtctgttggcgaactgaaaggtgtcacaaagctcattatttaattttctttggtgattatgcgttcaacatttaagccaaatcttgactacatcttggttcattttttcgtaactaaaaattaaccaactacagaattgatacatttacagatatacgtaaacaaaaacatcatgggttagtgtctttcacaacaaatgatacccatatcatatgcgctaatgacataaagatcacggcacctcactgttaaagtgaatttgcttccggaatcagatcaaaagtggtcacatatctcctgcgaactcgggctgtacaatcgcataagcctccttgtttattttataaaagtcagtagataacaaatgcgtcattatatgcattaggaggatagagagaggatgagcttcagagtccatcaggcagacttcctttcaaagtccagtggtgccacttaagagttctctgattgatgagatccttataaatcttagtttcctcctctataaattgggataacgtatttacctcaaaaggttcttgttagattaaatgagacaatttatataatgctctgaacattacttgccaattaagtgttcactaaacattaattccctccctttgccatcaactcatctttttcaatactttttttgttcactcatattttccgtatcattcagtaagcaaatgattttggccgggcacggtggctcacgcctgtaatcccagcactttgggaggcctaggcgggtggactacctgagatcaggagttcaagaccagcctggccaacatggtgaaactccttctccactaaaaatacaaaaactagctgggcgtggtggcggacgcctgtaatcccagctactcggcaggctgaggcaggagaatcgcttgagccagggtggccgaggttgcagtgagccatgatcaagccattgcaccccagcccgggtgacagggagactccgtctccaagaaaaaaaaaaaaaaggctgggcgcggtggctcacgcctgtaatcccagcacttttggaggccaaggcgggcggatcatgaggtcaggagatggagaccatcctggctaacacggtgaaacgctgtctctactaaaaatacaaaaaattagccgggcgtagtggcgggcgcctgtaaccccagctactcgggaggctgacacaggagaattgctaggacccgggaggcagaggttgtagtgagtgcgagattgtgccactgcactccagcctgggcgacagagtgagattccgtctcaaaacaaacaaacaaacaaacaaacaaaacacacacacacacacacacacaaatgattttaaaattacaataatgatcaaggatagcag

SEQ ID NO: 1242347 - DNA, 4001 bp, Homo sapiens
tatttgcaaagcctgaaaacaaattaaaaatttattaggggattaaataacgtctggtgtatcattaaaatggaatatcatacagttgttaaaaagaacaaggaaattgtgtacgaaattgctatggaattatctctaaagatgtggcgtgaattgaaaaaatcaagatgcagacagtgtgtacaaacagatatatttgaatatgtatgtttgaattcatcatgctaacatatttatagaatggattttcggaaggctgcataagaaattggtaactgtggctaaggcataaggcttacacctctaactttacatcctttcgtaccttttgaatattgtatcatgtacctatgtgtcctattcagaaaacaaaataatgctaatggtgtatgaaaccactgattaaacaacaaagtgaaaatatgagctttgtaacattttctagggatgggggtcgacaagttgtgtcttcagagctcccacgttcttccttcctcagcagggacaggcttctcagcacgctgctgcctcagggagcccaaagggacaccaggaatgctcagcctgtgttagctcacgactatttccctgcctctaacttctctagttccccacagttcaacccagggtgggtagcctggtgtctgtttgagctcaacctccccaaaccaggaagcccacaagctgcaccagtcactgtcaaacagctagctgagcatacagggaattcccctcttggaactgacagggaaaatgatccctagggattagggcctccactgggctgtgtcaaacatatttcatagttcctgcaactctgaccagggatcgttttgaaattcgggttttgttgttgttgttgtcgttgttgttgttgttgcaaggaacaaagactcaccaaactaaagggtgattcttgcaagaatgcacatggagtaatatgagtagccgcgttctcatggaatttaataagaattataaaacaacaacctcaaaaatatcattgatgaactacttagctgcccagcatggtgctcagtgctttgcgtggattgtctcctgtcaaccccatcataaacccatgaggctgtcgctgttattacccccatttgataggacatttgggcttgtagaggtcactgtcaccagagtgggtgggccgcacagaaacaggatcgggaaaatctgctgctctcttgctgtccctctcgtgggcagaacagtttctctgccttaaggttactgcctttccctggatgtttgcctctcagttctgatagtaactgactcactcactcactcaccaccattgggctcattcatagactttgcttacttataacagcaccttctacagagggattcacgaccttctccacctcaaatctctgtgcttcagctgctgcctacctgcctcctcctgttcagatttccccaagagaggacttgagagatcacccttctgttggaggccagccacttcactggtcacctcctgacctttggcttgggcatcccacctcgggttcccattttgattcattcctctgtggctgaagggtaacagtcctcatgggcttcatcttttccttcactcgtcagatattcttggagaactgactttaagccagacattgggttgtgggtggtggggggagggtacacagtgatcagcagagcaaagaacttgctctcagtggctcttaccttctggctccttcacctgcaggtgtgggtgtggcagacattctggcctgtccagttcgaagacaatgacccatgattgaccacggcactcttgcctcagtctctaagtcactgtctcctggggccccctcattcatgccttttcctggttacccatctgcctccagaaactggggctgtgctttgccccagtgtactatggagtccaaggtgatcagacagatggctccaacagctgggtggagaatgatggggaggagtatgggggataatgctcagaggccctgtgaatctgctgccatgggcagtggaatcccagccacaaagaatgaggtacttacaattctcccataattgttgactaaattccaaagctgggctcctctcttttcttttctttcttcccttttttcaataccaaatagtttgaaaaaattccaggctttgtcaaatgccctttcctaggctcaaattaaccttttccaagcgtctttcacattcttcaaactcttattaatccctcaaaacccagctccaggcattgccctcctcagtgatttcttctctaaatttgagataatcatgccttcatatggactacttttgtacttggcatacatttttattgttacccttatcatactgagttgcaaatatttgtttagatgtgtgtctcctctcctggagtataagcttatagagagcagggaacatgtcttaattatttatttattttttaatttaaataaactattttaggatagttttagagctacagaaatttgtaaaaatagtacagataatgcctgtatactttattatctggttaacgtattgctttactatggtgtgtttgttacaactaaggaatcaacattggtatgttactgattatttcgctagtttttacctggtgtcctcttcctgttgcaggatcccatccgatctcacattatgtttagctgtcatgtctcttttgcctcctctggtctgtgacagtttctcgaactttccttgtttttgatgatcttgccagttttgaggagtactggtcagcagtgttgtagaatatcccttaatgggtttgtgtgatgtttttctcatggttagactggggtttgtttattttatgtatttattcttttggagatggggtcttgctttgtcacccaggctgcagcgctgtggcactgtcataaatcgctgctgcctcaaactcctgggctcaagggatcctcctgcctcagcctctgaagtagctaggaccataggtatgtttactgcacccagctaatttttacatttttttaaatacagacagggtcttgccatcttgccaggcttggttatttttaaacaccagcactgaattaaatacccagcaggtaccacctagcacagaccaggcatttaattaatgtttattgaactgaatagaattcaagtatttcttcagcatcttccacataaatagaagcctgactgatgcccttggagaggtgaagaaaggaactcaagtcccgtaaagatcttccacacagctgaataataaaagacggtatgcacccaaatgtcaagtaaggagaacccagagaatgacctattgcagctcaagagatgaattaatcagaatgagcaggtgaagtcagcatctgtgtgaaagaggtgtctggaaagggggtgggtttagagaggcccgttttagttctcaagcacaaggagcttttccctgagctaggatctgctcacatgctgagcctgaagtccacaggtatttctacccctcttctctcatggctggcaggcttctcattcttgaggccttggcttaaatgtgacctctgcagacctacactatctaagataggctccacctgccactctgtctcacagcactccgattgttttcttcatagcttttcgatgtttataaggattgactgtttattcttttttttttttttttttgaaacagagtcttgctctgttgccaggctggagtgcagtggtgtgatctcggctcactgcaacctccgcctcctgggttcaagcgattctcctgcctcagtctcccaagtagctgggattataggcatgcaccaccacgcccagctaatttttgcatttttagtagatacgaggttttgccatgttggccaggatgactgtttattctttattgtctgtctttctcattagagtctaagctccttgagggcaagtactgcgttttgttattcactctggcagagcacatagtggttctcaaattgtcttgctgtatcaatgaatgg

SEQ ID NO: 1242348 - DNA, 4001 bp, Homo sapiens
caccgtctcagggtctaaatatactctttgcagccaaaagctccccgcacacaaactcaccgagctagcggcaggtccaggcccccagccctcatccccttcccttttgtcccagccctcgccgcccccctcccgctgaaaccgcggttcgccgcggtcaccctttggaaatcgcctttaattaaatgtttttcgcgtgtgtcatcctgatggcttttactgtactcgaattccgtgaatgggaaagcgcctggacagggggtgtggctaaggtggggggggggatactgtaaaacagccagcacatgatcagccatattcctacctccaactacaacatcgagaggaagggagcagttcctggggcccccattcgcctctacccagccctccccaaccgccgccagaagccgagtgcaagaggagggggcgcgctgggccggtacccaagccggggctggagaaatcctctccgtccccagctccaggcggctcgcgcgagcacgcttcctccggagtgacaggcgcgatttatacattatttacaacagtaattaaagctgtagcttcctcctgttctttgcaaactccaggcgcattcaaataaataatcccccactctcgagaaaaacacacatcaggttccaataccttcaagaaagagtgagctttcctcaacagctcactttaggaaaggagggagcaactgagtcccccccatcccccccaacacacgcagacacagaccaaacaccaaaatgaagagtaaaaatcgccaggggaggagaaaacattgcttgcactatccaaccagcatacaacttgcactgaccatccccaggttcctgcagaaatgcttggaacctccgagagggaaggattcccagagcagaaataagtttcggtgcttgcttttgtagacgctccctccggatgcgcgtggagcgccccacaggaccgccgccctctgcgcgttggcgcgcacacgccccccgccagcctgggcgccgggctccgaacccccggtctgcaaacttgcgcatctcccctcgccgcgcccgccagacaacttggcgaacagctcgcccgcccgcaccccgcttccttcggcccttccttcaaatcccaaacgcaccgccgtgctccaaagaaggtgtccacgtcgcccccagaccccggagcgccccctctccacccccgggacttcccaggtcgctcactcctcccgccccccgcccagatctgagagggaccgaaaacacacccccgactcgggcagccagggccgaaactgtcaagaggagaaaaggtaaagcggaaggagggtggccataaacagatttttttgccccttcttaaaaggacactgccgctttaaaagtttctttcccgggcccccactccccgcatctccgtattttgggggagcgtatttaattgaggcaacgcagctttcctccagtgtttgcagaaaaatcaaagccaggggggtgagcccgccggctgtcaaccttcccgccgcctcccccgccccactctgctcccgcaagccgagaacgggctgcaaaagtttgcaacatttctggggggcggaggggggaggggaggggggtcctccgggctcggggcgccgccgcaggctcgcgcgcggccgccggaccccgcgccccgggcgcccgctcccggccgccccccgctccgcgcccgggctcccgccgccccctccccagcccctctccagcctcctacctctgctggtgctggaatagctctgtctgcgcaccggggcaggcggctcgctcttgcgggcggattcctggttcagcggggtctccctggagccggcggccgcgtccgcgccgctgctgcctggctcgctggcggcggggtcgggggctgccggagctgactccatgttttttcccaatgtagagatcgctggagatggcgagctccgagactccctctatcttctgttttcagagcaactctatggtaccaaaaaaaaaaaaaaaaaaaaaaaaaaaaaaaaaaaaaaaaaaagaaggagaaggcgaccggcgaaagcaggagggaaaaagcaggcggcggcgggcgggcaagcaaaagcgcgagggagcgcgcggagtgtctgggtggacgtgtgtgtgcgcccgaaaggggacaagaggcgggtctggccacaggcagcgctagcgagagcttctccagccggcccccacacccacattccccaccctccagaccccagaccgagagccacagactggctgccaattttgggaggtggggaaaagaggggaggaggagaacagagcctcccgcgccccaatcctcccctctccccagcccagggacagaaattaaaatcggtgagatgattccgtgcctacttctgagactctctcgggaacagaactcgtccccatccgctgccagcttgggtagagacaaatccgattgtccacgtccacgttgggaaatcgcaggtagccccctgccagccctgccgagggctgaggagaaactaaaaaggaattagaacggggctgacatcccaaggaaggcggaggatgggaggacgtggcactttttactttgggatgggacggccagtgggtttccaatcttggttaaagacatctgtgtctaaaacagattttgtgaatctagaagcgccatggacagtttctggcatggttgaaagaggtcgctttcagctcctttgctgtttgtccgcgaaggatccagaaaccatttggcagggcattttctactgaagaaaactttggcctgtttggtcgacaactatctaagctggataaaacatgccacgctgcatctagctcaagcgtggctgctaattgtcaattcccactggtacttttcctattaaatgtacagtctcatccataaaaggtagatatactggagaggcattactaatgcccggataacattcagataattaacagctcctaataattcgtattattataggcatcattctacaccctcctcccattgaaatacattcatcccctagtaggtacctaaaactccaggaaagcagataattgcatcatcgttaccttgactgcaaactccaagatgaaggaacaatacaaattgaaagaatggaaaatactccaatggtagtagcctgatttgtctgccttcatactcaatctaccactttcttttgcctgcgaagacactgtggaaatacgccccaccttcctttcaaaaggatccaaaattttgacaataaataatattattagaggccagaaggtggcataaatatatgtgcttcagaacgtggggtaggcggagggaattgggggacatttttcttttgctaacttcctggtttggaaaaatgctttaaaaaatagtaagtgcgggaaacccagttagctaatccttcagaggaaccgccatatgccaaatttcacacatagtttctgttactgttactgatcttgatcttatttcaaatacacaatgccctttgccatagtctgtgtactaatcagcaaaacctgtggtccactcttcggggtgatgtaaatgagatgtgaacagtcctgataccttaatcctgtctctgcaaggatccctggctttagcctgtctgttggcgcctacaaacaatgcacaattgtctcctccatcccaaatcagacgtgtgggtttccccatacgtgaaagcacagatttccagagtagccttcacaacatttaccattggttagcctgttagtaatgttcttgatgcaattgacctagcttgttacacttgacttttctaaggaaacaaatatatcaaagtgtacagtttaagaaacaacttcctctgggacagtgagcatctcagaatacattggctgcctcatgtttattttagaatactttaaaaaatactcgtcacattaaatttcaccagtaattctatctgggacgcaagtgacttaaaaagtatccctggtttcctttta

SEQ ID NO: 1242349 - DNA, 4001 bp, Homo sapiens
cctctcgcctttcctccaatcaacacaaagtatattagacaaagtggataaagactggcattgacatcttccaaatagcaaaatcaattttataatttaaagacaaaaaatgctttaactgcagagggcatttaagacgtttcacacttacagggctaatgaaatgcaggactagcataaaagttttttgggggggtgggggagaatagattttttaacataagaagtcgataagaaatcttaataatttttcctcccaaataattttaagtgcttaagagcgcggatcacgggaggtttcctctcttttacttatatgaattacatattctaaaaatgattaaatcccattcccctcaagccacaggggaaaagagaaaatttgctgtgggcacattatatagaaagatttcatctcaagcagctcatcttaacgtccagtacgtttcggcctgttaataattaataaaagagatgccacccaatctctagtgaagaaaggcaaagctcggtgatccgaaagtaaacccagcgcagataccgaactggtgtccttcattccagattgcaacacaaccccaaactagcaaacgtttaacaggcgcttggcacccgcaccggtggctaggacccgcaggacagtctgggtctgcacaattgctgcgcattagggaagccgcgtccgccgcaaacagatggggctctaaatccccaagcctggcggccgggcctgcgaagcagctcgggcagattatccacggcgaggaacctgcgggcgcacaagcgggcggcgggcggcgggcggcgtgctgcgggctgagtttctccggagctgtttgcaaccgtcccaagagcgagtctcggtttctccggcagcacgggcgacttcctgaacacctccaaactttagctttcccatcagaaagttccctgacttgccacggtttctctccttctcacctgagaggacctagagccagtcctccctccaaccaaatccccctcccctcccgcccccggcccggctacggagtcctgatgagggcggaaggccgggccgcccggcaggattggccgcgactaacccgcgcccgtcggccctcaccacggtctaacctccgcccctgcccgcggatcccgtgggctgccgagttcctccccacctccatccaccagccaaagtgtcaagcggggtgcgccgcggctccctgggccgcccagagcgtcttggcacgctcgaggcgcccgtctcgctccggcccgcgcgctttcggaagtggccgcggcgggacacagcgcgggacacagcgcggacctgcggcacttgcccggccggcggccgctgaggcgctcggggacgcaggggcagggcgcaaggcctggggcgctgaccagtccccggggatgacatcgcgacaacgcgcacgcacggccctgcccggccgcggcgcctccccgacctaggccggagctgtcccgggtgcgggccctggggaccggccgcgggcgtccccggcttcctctgaactccgcagaccctccccttcctttccgaagcgcggcgactcccggcaaactttcttttgggagacccgcccggtgccaagcggacccaagagactgacaggagccggagggggcagcagagggggatccaccccgtgcgcctttgccccccaatcggaggcaggccgatcccgtggccgggctcaggtggcgccgcggcggtggcccagaaggccctggcagggcccccgcgccgagccccgggcagtacgtgcgttcgggcaggcgcgcccacccctccccctgcgcgccctcctccccgccccccggagccgccagcccacccggccccggcggggcgcccgggctcacctttcatcgctgcgatcacaaaatacatcatttaagccgcggtgcggagagcgcagggagagcggatggtccgaccccggagccccctctgccgccgccgcgccgccgccgcccgagccacagcagcagctgccgcagctgcccgcccgccgagagccatcccgagccataagaggctccatgtgaccggctgacatcacggccgccgctctgtttacaccgcgcccctccgcttcctcccggggcgggaggcgggaggcgggaggcgggaggcaggcgcgccccagcgccgcgccccgccccgcccccgcgggcaggtgagtagcagcggcggctctgctggcccaccccggccgggcctgccctcccgcgccccgggccctcgcccgggcgcccgccttcccctcgccttcgggatcacctgtggccgccggtcgcttttctgcacgcagcgccccgcggaacgcgcctctgaccactttctgcccccactcggtggggcaagaggctcgcaacccgacgccactctcccgctggcttgccggagcactcgggggcgataaatgcgccagctcgttggtggaaaagacaggtttggtctggggagctacggtcacccgcatttcctagagtgccccagctctaatcggaaggtacggcccacttctgggccgtggagaacgaagccactgggaccgtccggggagtggagtaagctcctccgaagtctttctggagagactcggcctgggcgggggaactccgcccacccaacccttggcaacccttggatattggcagttataccaataaccaaggtcctggtctacacctgtcccccccaacccccttccccgcgtccaagaccactgatacctgcaaggaaagccggaaattgtatgtgaatcacctaaatgaactccagttgccagctgatttgagccgctaaattcccaggctcttccatatctctccagagaacccatctacaagtaggaaaagctatcgttttcataccctaaaaatgaaacactgtggtaattctgacagaaaataaagacctctgaaggtgaactttgtacattttaacatgcgactaagacttaattccctctaaactttgaagcttaattcttcttactgtccttacggaactgtaaatcatgacgttattattttacaggtcaatctctttacaatgaatttcagatgctacatacccagagtctgcattgtttaaaactttggtcagggtgtctatagtaccgagcataacagaaaaaaattctgaaaagccaagtttgcgtacctattgcggttccttcacgaaatttcattctgcttgcttttctgttggtctgttgccacgcacaacttaaaatatcagatggctattagctgttgcattcatgatgattaagcaaggataattctagcatatttttttctccatgtaagtgagttgctcttgcccctgagttgggccacaatttaaaacacaagcaaataatcagcaccgtagaaaacaaggattcatacactccctccccagccccctttcaaggcaaaattgagtcttccaaacatttatacagcgctctgatttagaaggtcaataaagttcgttgtccttcagtcaagccatggctttataaaagtttgatttcagataaattcattctaatacagctttttttcttaaagatttttcccccaaaaaaaactacaaagaaaagaaattataaaaatgtgaacccaagacctacccatgttaactcagctgtccagccatagcaaagtggacaagagtttcaaatgaatcagccatacccactgtaatgtttacaattatgaaattaaatcacaccacgttcctatgatgcaactatatctcccaatgaggcaacgcccctcagttacactgacaccatcattcacatttggttattgatttcccttgtgctaacgactaatgccaagctatcctataagcaggtcccaggtacaattttctttcttttgtatcgttaaaggatggaaaaccatcggagactgcatcctcggaagtatgttcttccctactcaatgcaagtgaacccagatatacaactcggatgattcac

SEQ ID NO: 1242350 - DNA, 4001 bp, Homo sapiens
tgtacccaaagttggggtgagagaatatggtaaacacacatataaatttacaaggcagtacatcccagtgatgaaattaattgcatagaagatcagtgctacacgatttcagaggtgggaaaaatccctaaaggttaaaaatagaggtcaatattgaaagagaaaacttagataagtagagaactgaaggaagtggatgaagtgagcaaagacctgtctacaaaatttcatcttaaatttggcatagaacttgtattaattactatttgtagcatgacaacagcgaagtatacagatgtgccttttcctggatgggaggtaaacagtatgaaaatggactgcctgtgttcaaatccaggctctgccatttactaactgtgtaagcttaagcaaggtattttactgaagttactgtgcttgtttcctcatctgtaacatgaagataactgtacctacctcctgaattaattatatatatgtaagaagattagaacagagtctcatacatgaaaggacacaaacgccagttatgattcttattatttatatagccaaagggcagataaccatatctaattgttgggcagtctgaccaacaaacaaggaaaaagtctcctaccccaatgcctacccaaaggccctaaggaaggctgaactagatgaactgagaatccatagtatggtaacaattcactcctataagagtctacataagcagaaacaattcctacttatccatggattcatgtgatccaaaagcaaagtccagctcacttcatagggtgcgccatacctacatcacaaagagagccagggggttatgggcaccagttttggaatcaataggccagaagtcaaataccagttccgctacttactaaatgcactaaatgtgcgaaattaggcaaattatcaatgctgtcctttttttttttttttttttttttttgagacagattctccctcttgttgcccaggctggagtgcaatagcacgatctcggcacactgcaacctccgcctcctgggttcaagtgattctcctgcctcaggctcccgagtagctgggattacaggcgcctgccaccacgcccggctaattttttgtatttttttagtacagacggggtttcaccatgttggccagactggtctcgaactcctgatctcaggtgacccgcccgcctcggcctcccaaagtgctgggattacaggcgtgagccaccgtgcgcggcctctatgctgtcttaagtcccatttccacaactgtaaaatgtgagtaacaggtcctatataataggaaatgtgtgaggatttaaatgactatacacgcaaaacgcctagcccagtgcctgttacttatataaataaacctcagtaacaattattttagtcctaagtaaagccaccagtgtgtttccccacaaatccagcgcagatttgtccagaaccaatcagtgctagaagtgataacattttcagttattaatagaataagaatgggttggccgggcgcggtggctcacgcctgtaatcctaaagagtaatgcctaaagagtaactcgtaaaaaaaagtagtcctaacaatggacctctgggtttatgttggcctctgaggagtctctggggctcttacattgcagcctatcctccagagccaggatccaatcccgagtcgggacgcgtgactgcccttaccgctcaggtcaagggctccagttaagcctcctggaccacccaactctacaatgaggaatcatcgagtcgcagctttcgccgcccgttgaagggccgtgcccgagatctatgcacagaggaggccacagttgctcccttacagaccaaaggcccgcaggcaggttccagcaaagaaactggacacgctaccctgggtcctcctcccagatcacctgaaatccgtccctccagccccgccacctacgtgctccaggcctgtctgggcgccgccatcttgccccgcagagatcgcgtttccgccgccgccagattccagcttccgccccgcagcccagccccgcctctcccggtcttatctcggagcattctgggctttgcttgttcagtgcagcggactggtgagcgcggtgctgcgcggctggcggtttattacccccacgtaagctctataccatcacccagaacacacatcctttttttttttttttttttttgagacagagtcttgctctgtcgcacaggctggagtgctgtggcgcaatctcggctcactgcaacctccgcctcccgggctcaagcgattcttgtgcctcagcctcccgagtagctgggattacaggtgcccgccaccacgtctggctaatttttgtatttttagtagagacggggtttcaccatgttggccaagctggtctcgaactcccgaccttaggtaatccgcccgcctcggccccccaaagtgctgtgattacaggatgtgccaccgcgcctggcccacacatgcttctgatgtacagcaggcacagccccttctgcacttacgacacccctggcagggacacagcgttcctcagacgtccctctgcactcaccagccagtgttaccacatcccacatcccagcacccacgcccacggcagcacacagaaacgtggacacacacacacaccccaacgtgacgaatgtgtttatggaagagctagaaggtaaccatgaaaaaggcccaaggaaagaacactgccagtgtgcactgcagaaatagtggtggtgagaagagagggaataaagcttccttgctagcaaggttatcatcttctccagaatcttgcctttgttcatcccactctcccttcttggaaatcctccctcttttccctgccacccctgtctccaaaggataactctttaaggcctagctggcgtcaactctaaaacctctgccagccacgcctactcaccaaactttccttggattcacctggaatctcaccgcctgcaccagttgtgtggtatgctaagaacacactgccaactaccaactgtcaccggttaccttttcacaggcttatgtcctgttcccttgaatagactgtcagttccttgtgggcaccagaccttgtactttgcatctaaatactgagcacccaacgtgttgccatgcacatagtaggaccttaagtaaatcatttctagaccaaaggacatcatggggcagccaatgttagtccagtggctttccaactttaacaggcaccagaatcaactggaagtcttgttaaaccagattgctggggccaggcacagtggcacatgcctataatcccagtactttgggaggctgaagctggcagatcacctaaggtcaggagttcgagaccagcctgaccaacatggtgaaaccccatctctactaaaaatataaaaattagcagggcatggtggtgtccatctgtagtcccagctactcaagaggctgagccaggagaatcacttgaacctgggaagcggaggttgcagtgagccaagatggaaccactgcactccagattgggccacagagccagactctgtttcaaacaaaacgaaacagattgctgggcctcaacctctgagtttctgattcagtaggtttttctttttctttctttttttttttttaagacggagtcttgctcttgtcgcccaggctggagtgcaatagcatgatctcggcacactgcaacctcctcctgggttcaagtgattctcctgcctcagcctcccgagtagctgggattacaggcgcccgccaccatgcccagctaatttttgtatttttagtagagacggggtttcaccatgttggccaggctggtctcgagctcctgacctcaggtgatccacctacgtcagcttcctaaagtgctgggattacaggcatgagctactgcacctggcctgtttcagtaggtttcctttttttttgtgacagagtctcgctctgtcgcccaggctggagtgcactggcgcagtctcagctcactg

SEQ ID NO: 1242351 - DNA, 4001 bp, Homo sapiens
cagcaggcaactgtcgctgagaacagagtaagacgcaaattacgacatcattgcaagcaaaataaccccatataaatgaagccccttctcttcaagacaaaaaaaagtaatatttttacaccgtattatcatcaataaaccagacccaggccgctaaattccatcagagatgaccagtcttaggtagtgaaacaaaggatacgtttccaaaagcaccctggccagagcggtgagtcccaccacctcgaactctgggaattcgagccacagctctgccagtaccccaagactcagcactagtctgatgacctaaaattgagaagagataaaagttgtagctgcttcatcatacataccaacccatgactattatgcatggtagcaaacagcatcagaacatccgagaaaatcatgtggttcagaaacacggaccaatgaagtggaatttcatcactactgtaaagcagtccctaaaatatctgcagaagatataaatccatacctgctaattcactgacagcatagggctgtctgttgtttttgcgcaagttggtgtgaacaaagttcacaatatctggtcgaataggagccttgaatacagcaggcaaagtgacatttttgccagatgactcccccttttcggagtacaccgatatcagtgggcgagcacacgcctaaagaaaaagacaaggattatttttattgacaagtaatgtttgaagcaaactcttctcatacgccaacaataccattaaatactcaattgcagaagagactggtatggtgaggcaaacaacccttaaaccaaaatagcagtaaatgactagaacccttagaatctcaacctctactgcacaattttattttcaaaaagaattgtttatcataaaactttcaaagcaagccttataaagcacaatagctaaatcaaaaccatattgtaaggtttggagatgctgtttaatgccaattaatcagcaaatcctgtctacccgggctctactcatcccaacttccatccctgtcccactcaccctcaccctctactaaacacgtgtttccaaagctcaccagtggaaagactggtgatattactttttgtttaaacctccaagtcttcccaactgtgagtaaactgaaaatcctgaggctgacctacaccatcttctctacttctgatctcaactcccatacactcttccagatatttttcggtctcaggaccacccagcacttgcctcagactttccaagtgttcactctaaagctcctctttgccagctttctcacatccttcaggccactttaagctttctctgatcactgtttaaagccaaaccactcctattccctatgttttcatctcttactaccatagaatattactacgtatttagtccaacgcaactaccatcccagtcaggacagtgtctgttttgttcgcttaactcccccggcacacaacactacatagtatatacgaacactatttgtggaaaagcagtacacatataacactggtcttattacgagttggctaaggattcaaagattttgataacaccgaacaatttttaggcgaagagaaccagaaagcttttaatagaaatgattcccaagctaggcagagacaagcatccagaaaaaggctaaataagcaaatattctaacagaaggtcccactgctcctgagaacgacccagtgctttccactactgcttcccggcgcgtcctgtgctgggaaccccacgttgcctctaagatggctgccgtatcgccgcacatcccagttccacaccagaaaaagacgcctttggtcctcatctccctctcctcgctctatctcctacagattctatgctccgaaccccaaatccttccttactggccccgagatacggggtaaggccagccaagagaacttccactcaccatggcggagagaggagacagccacgctcctctcagcccggctgctgccacaggaaaaggaagtgcttaccactcccgctgtatatgtcaccttccccttgaccgccccaccttgccccgcctaagaaccaacacggatacaaaaaatatctctctaccacactacaaaagtaaaaacgagagtgttatttctttatttgtgggaaattacggtatctattttcttccaaacgtaataataattcttagaaaatagggactcctttttgcggaataatccatagggggcgaggccaactctcgcgagtcgaggtatcttctccccaaccactgctcttattttaattattgcagacggaagttgaagactattgacatagtaaatagctctgggtggcttgaaacgaaagtttaactttgcggacaaacaggacttattgtagggggtggtcaaaatagtcccggcggggcggggccatgacccctgacgtcgccggtccggcgcgcagttcagtttggcggttccggtaccgctctcacattggggcgggatgtgggagcggctgaactgcgcagcagaggacttttattctcgtctccttcagtgagtctagtctcttcttttggctggggtcctgggacagcacttctttccctgggtgtctggatccccgccctaagcctcttgccactctggggatcagcgctttgccagctttcctggggtccaggagttggggagaggccggttctcggctccggtgtggggttgaccgtgtgggagcttgcttgtctcaggagaaaacgtgtacgtcatcaaacgagatggaaggtggcaagtgttccaagaggcgatttattctttctgctgatggacacacttgccataagtagaggcaccacccgggatacggaaaactaggtgttggcatccttcccctgtttaaagccttgttgactcctaagaatgaaatgtggtgttagtctgttaatctctattattcgaggtagttgccacatcagctacaattgtaatgatagcagattggtgtgttgcattttgaaaacacctttattttttcactgtgctccaagacttcattttattcttatggtgaagtactactaccaaggggattccatcaagttctgcatcctatgtaaaaatctaatccatagttctcaaatttagcatgcatcagaatcaccgggggattgtcaaaacacagattgctgggccccacttccagggtttctgatttagtaggtctgagatggggccaattaatttgccctcctgataaatgctaggtgtaacggatacggctggttgggcatcacactttgagaaccgctgtgtaatctagcccatgatttcctaaatgttataatttttcattgtttatcttcattgctttttttcctgcttacaaaagtagtgacgcttgtaaacgttttgaatagaaagagcactagcttttaaaaaaaactggcatgtcttggacatctttcattgtgactccttatagatctatctcattgtttttagctgctatatagtatttcactctatggctgtttcatctttatttaagataaggccgggcgcgatggttcacgcctgtaatcccagcactttgggaggccgaggcgggcggatcacttgaggtcaggagttctagaccagcctggccaacatggcaagaccccgtctctactaaaaatacaaaaattagccgggcatggtggcgggcacctgtaatcccagctacttgggagaattgcttgaactcgggaggcagaggttgcagtgagccgagatcgtgccagtgcactccagcctgggcaacagagcaaggctctgtctctaaaataaataaataaataaaaataaaaatctcctattaactaggcatggtggtgcatacctgtaatcctagctactctggaggctgaggcaataggactgcttgagcccaggagttggaggccagcctgggcagcgtagtgagaacccgtctctaaaaataaataaataaataagtcctctattgatacaactttattta

SEQ ID NO: 1242352 - DNA, 4001 bp, Homo sapiens
tactgttcagctttgaatctgataattacattcctatatgttaagaacctcctgaggcagctgatttccctccttttacaaataatatgttggtaaaaaaaaaatccaaacttcctgaaacactcaaatgaatattctttccacagttccatgtctcctcttaacagtgaattcaaattttcagtctactaaacaaatataggacttcaaaaggggcttgttaaatatgacataggtacaatgttttcaatctttcaaaactctttagaggtcacaaccctggagttagatgctattagcttcacttgacagagattaagtaacctgtacaatggaaaatagccagtgcaagctccatgaccaggaacctctttattagtcttttatatcccaacacacagtacctactgtgtcaatgaagtccgctaaacccaaatgtccatcaaaccataggtttaatgcaagaatttactgaaagaatttgcttgcgggccgggagcggtggctcaagcctgtaatctcagcactttgggaggcagaggcggggggatcacgaggtcaggagatcgagaccatcctggctaacatggtgaaaccccgtcactactaaacacacacacaaaaattagccaggcatggtggcgcacgcctgtagtcccagctgctcgggaggctgaggcaggataatggcgtgaacccgggaggcggagcttgcagtgagctgagatcgcaccactgcactccagcctgggtgactccgtctcaagaaaaaaaaaagaaaaagaaaaagaatttgcttgcaacttaacatgcgtagtacctatctcccgagtgaccctttttgggaataaatgacctgattcacattttttttaaccatggtttcagagcaaaagggaaaccagagtctgataaggaaacgtaagacttgacaagctgaaatcttattagctcctagagatatacatgcaacgaaaaacacctaggagatccagcggcatgtggggcgttatggcaccgctgggggtactttagcatgtacaactgccctcgtaaatcagcaggccttaccacaatcactttgccaccatcaccttacctttgcaaacaagccaggccaaaaaggctcaacatttacaccggctgctttaatgagggcattgatcttatcctcctacaacaaataaaaacgtcaatccatcaaaacgtagcgtatgtaatatctccaaaatgctgcacgtcactcaataagtgtacataacatgtttaaccagctcaaatattctatcacaagcaaaagagatgtgtgccaggcgccctgcaatgaggcgagcccatcactgctgtttcacgggctgggacttgcctgagtcacgcggctatttttaagttacaagacctgggaggtggagccgagctcgggcgccttcctccacgaccgggggaattcaaggcaattacaccgaaagaggtccgagtaagtgtccctgagagagacgaggcacgggtcagggtgcccaagcactgcggaagagcttttctacacgaaggctcttggagccggagcgcccagcctcaagcgcactccatgcccgctgggcccgcacgtggtcccgggggcccaggacctgcccggagagaggccccagccccgaggagcgcccgccctatgcggcctgtgttcgcggcctggccccggccggaagtgctcagtcgaacggcctggagccgggaaccgcatggagagccgaaagtcaccgcccacaggcagcccggccgccggcccgcgcccgcactcaccgtgactgtcacctcatcgtcgtgcagaatgagggccgagtagatgcaggcgagctcggagacagaggccatggcgcgggcgagtgtagggctggcgctgccggacgcggtgctagtcgccggatgaagtgagggcctcaccccaacgcagccttagcttcctcggaaggaccgagcaccttggcggcagctgaggaaaggggctctcgcgcctatacgcagcctcttatgtgtccacgcggaccaatcggcgcccgcaccgggcggaagaggcggacccaggacccactgaaggcgcctgcgcactgcgcctgattggttcttactgttgagaaagtttctcagcgcctgcaaatacggtcccactttatttgggtaaattataggacctgagaacgttaaaaacacttttaggttagggttgcctaggtattcggacttcgcctccgttggttccatgagttgcttgacttggcaggagctccgctgtggccctggtgacattgttcgtaatctcctggttaggtcgcggccttcccagccggcgctgaccctgagagtaagggctgcgtcccagcttggaggcccctgcttagcgcaggaccttggttgagataggtagatgtaggaggatgagagaaactaacagcgttatgctagcagaagccgtagagcgcttactatgtcccaggcactgagccacattctgcaaggattcacgtaatcctcacacaccaggagttggatgttatctccatcttgcatatggcaaaattaagtcttagagctggtaaactagcccaagattatgtagttaccgcgcagtggagcgtggatttggaatctagaagcctaacttagacccggtagctaactcaagattgcatagttccgcgcggtggagcgtggagttggaatccagaagcctaacttagacctggtaactaaccgaagattgcatagtgccgcgcggtgagcgtggaggtggaatccagaagtctaacttcactgcctagtgcttgggggaaggagggattatgggtaagctgtctacaacccgttatttgttatctaaacccaatttaaattcctaccttcaaaaatggtcatctttgcattcctcgtggaatttgcttagtttaccggaaagttagttctatgtatatatatctttttttttggtggggggggggcaccttctttgtttagtccatcccattatttaataatcatctctgaagaaacatttctgttggaatccaccgatctagagtcccacttgggtcaatcttaactacaaacataaatattttcacatccggaattttttaaaaaagcatttataaagctatcaaacttttaaaaaataaagctgttgagttttcatccaaatctaagcagccattatagtggaattttggtcaagaaaggttaaagctattaaaaaatccaaacatttccaaagctacaatgagtcagtccaaaatactgtttgtccagcagtgtacataaaaaactgatctgccgggtgcggtggctcacgcctgcaatcccaaccctttgggaggctgaggcgggtggatagcctgaggtcagcagttcgagaccagcctggccaacatagtgaaaccttgtctctattaaaaatacaaaaaatttagctgggcgtggtggcgggcacctgtaatcccagctactagggcggctgaagcaggagaatcgcttgaacccaggaggcggaggttgcattgcgctgagattgtgccattgcactccggcttgggcaacaagagcaaaactccctctcaaaaaaacaaaactgatctggttgacaagtggcactttgtggtcattgaggaaataatcttcttctccatctatatattatagataatactttttacagggtatcaaacagtaagcactaaccacagctattcaagagaagtagttaagcaaaacatcagtactcatgcatttccttttgtgttgatgaaggacttagtggattcaacagttacttcagacaaattccactgccccatattctcctatcgtagtaaaaatttcctattaatattttgaaaatactatgcaataagccattaaaaaaaattttttttttctgagacggagtttcactcttgttccccaggctggagtgcaatggcacgatctcggctcactgcaacttccacctc

SEQ ID NO: 1242353 - DNA, 4001 bp, Homo sapiens
ccctcagagatgctcctctgaagcaggggaaagaaaactagaaaggaaaactgtcccagggcggggagcggaatagggcccccacatctcagactctcctaccctcaagcagttaattctcaccccctgccttcctctgtcaacggtgggggtgattccaataactcttctcagcttccatacttcaggtgctcttcgtgaatgctgggtggctttaacccttgggggtcccaaacaagtttccagaatcccactgtccaccattctcccccaaagaaggtcccagaaaaggtgaagttccgtgtcttcacgcaacacgggcataagcagcaattatcgcacgaagtttccctagggtggtcggggatcctctcctgccactcctggggcccctctcttgtcgccttaaggtccatgctacctgtcttgaggagctgtgtccaggttgtgggctccggaggaccgaggagtgaaaggctggaggtacatctgaaggtggaggcgctggcggaagatcctgccggactaggtggcccacagtccggagtttcaggccgtctgatcctcgtccgcaacccctggctcgggttgcgatcgcttcgcggagccttctccagctgcgggttcccctaggctcctcttggacgctggcgcggctggcggggacgagggaccaggatggggattcgggggctggtagccgggctgtcgcggatccagcgcgtccttggaaagtaggatggcgaggccgggcacgttcttaagtacgctgagactagcggccggctcgccaggcgtctgaccctgcgtgggcccaggcgggaggctctgccacacctcgcgtacgctccggtagcgcagccgcgtgacctggtgcaggcccgccaggcggcgcttgaggatctcggcgcacgtgacggttttggtggtggcccggccgcagccgctgaagacgatggcgcgcgtggctggctgcgccatgctggcggtggcgaaggccatcaggttccggatcttgctgccttccttgacccgcatgtgcaccgcgcccggcgccaggtctgcgaaggggccggagcccgggccgcctccctcggccccgcaccccgctggcgcctcttcggagcgcaccttacggaagttctccatgcgccgtcgtcgccgggaccgccggctttgccatggggcggcctcagccccggggctgcatggccgccggtcgcgccttgcaagggccagcaggggtaagggcgccggagcagcgcagacgccggcgggcgggctgggacggcgcgatctcggccccacttctctcgagcgggcgccgctctactcagcgctctcggcgccgggtgctccgcgcctttagctgaggccccgcccctgccgccaggcccctcccctgacccggcccggccgggcccgcccgggccccagcctcactagcctttcctggcgagtctgggtcctcagctacgcgggcgtgggagcgggcgcgctgcggggcgcatgagcaggtgaaggtgaagttccactataatcgccatcagcgctctgagagccaaccctcacaaaccggcagtctaaataaaagctgcgcttgccgtgcaaacactgcttcaaatccggtatccgagcccttcccatttgcaactgaaggccgcccctcgtcccctcccagggagagatttccaagaggcttgctggggccttgcccctcctcccccgccccggggaacacccccaccttttttccgctcccaagtattcttgcctcaaggacagctagtgcgcggtcagcagagtgcgggaggagctggctgcggctccactccgcgcctccccgcgggcgattacgtcgcggcgtggtcctcgcggggcgcggaagacccagacttcagcctcgccacgcctgcccggagctcgaggctcccggacccccgtccacccctgggacgtgaggagtgaggctttgggccaggctgttccccgaggcgcgtggggaagcgggcgtgacctcttctgaaaaggcggtaggctcgctccacccaggccctagagcccacccttagagctgcgcgctttagggtgagccaggcacgatgccttgccaacgtggccgcccccttcctcccaggcggaattcgctcaggcaacattggccccttgagatccagtggggtccttttcgaaaggaggctaggtgaacgcaggttttaaaaaagagaagggaggggccgggcgcggtgtctcacgcttttaatcccagcactttgggaggcagaggtgggcggattacttgacgtcaggagttcgagaccagcctggtcaacatggtgaaaccccgtctccattaaacgtacaaaaatcagctcggcgttgtggcacgctcctgtaatcctagctgctcgggaggctgaggcaggacaagcgcttgaacccgggagctgaaggctgcagtgagccgagatcatgccactgcactccagccggggcgacagagcaaagctctgtctcgaaaaatgaataaattaattaattaaataaaatacaaaagagaagggagggataccccattctccaggatgtgattattatgcattgcatgcctgtatcaaaacgtctcatgtaccctctaaatatagacacctattgtatacccacaaaaattaaaaagacttaaaaaaaaataaaagagagaaagaagggaggaagatggggagttgaagccctgggggcattatggaactactggatgcctctccggcggaaactccacgggaccgaaagagaggcccggggtctcctgccgggtgagagaagcattagagaaagatgagattgggggctgtcaggactactgatggaagggagggggtctgagaaggggcccgaccctccctaaaactgctctcgggattcccccgtcctccttccacccgccctacgcagtcaggactgagagagggcggcagatctggtcctagccaggggactgtgacggggcgtggcggggagggacacagagagctggggcgggcgggccaccgggaaagtgctgggggcatgacagtgccttggattgctgggcctcagttggagatggggctgccagatgctgttctccctcctcccgctgttctcgccctctgggcatctgcagcagctctcagtccctgctgttcaaaaccagggtttacttccttgtcacttcttgggagcggccctcggtccctgctgttcagaaccgggatttaccctcttaccacttcctgggagtggctgcggcgactggaccttggcaccgcaatgtgtgaatggctgaccccctccccgtctcctggtgggatcaggaaccctcggggtatgctccgaaccgggacttcggtctcggtccagtctccatgggccccacacagcggtgggggctggaggcacagcagccttgggaagaaacaaagactgtccgcagcgcgtagcggggcgtggagaaccgagggctgtgtaaggtcaggccctgagaaaaagcccccgaaaggctggaagttacgttggaacgggctggttgtggaaggagcgagctctccgtccccgggagtatgcaagtttgggctgcacgatcacttggaagggattgggcggagttctgtcatttggagaaagggtcctgggagcttcaggtttgtgtagggcgaggacggggcggttctgcgtccggccaggttggccctcgaggacccagccgtccccaacctcctaaactgctgtcggatgtagaagactcgcattcactgctctccacagtcggtgaagggagaacgccgaaaagggccgcattccctcctgccggtcccctccccttcccgcgctccctctgcagcacttaaaatgtaaatgtacatcgtgattagccgcggggtcgctaattacagctgaagccattcattacactgtcagcgcgcgtcgcagcccgccggctgtgcgctccctcctagccgtga

SEQ ID NO: 1242354 - DNA, 4001 bp, Homo sapiens
tggccttaccttcccatgccctcattcagtattcagaacacttgaagtctgtgtttacaccaaagaatactatattaggggcaaacaatcgagccacgacagcagtcatcaaatcaacattaagggctctcatgaaatatggaatagacttaactggttccagaagagcagaatggaggctaagaaactggtagggggcctatgggcacccacagctggttatggaatgtatggattaaaggtctcagattcagctgaggtccctttggaagccaagaacccatagctttatcatttgaggattagccagaagcccaaatatccagaaagtttacctcaggaacataattgtctctcctttctctctcctcctcctgcagcttgatggagatacctcttactgggcctctctgaattcgcttcatcagatgcgtgacataactacaaagcacacacagccaaagagaacagtgagaagacaaatcaactcccacctggtactgagcacatgtgcatatataaatacccgctttagttcttttccacagtgagaaggaagaggactcactatcctgggacctcctacacatagaacctccactggcctgagcattccttccccttggtttctcactctctattcaaactctccttcatgatgatcaagcgccccacccccaactcgccccgccccgccccgcagtttcacgacccttcacagccttcattttcttccaatttcaaattcacataacttggcaattaatacgttgactttggcactattcttccaggccatatgcctataaatctctcgaacagtaactgcaactgtgaagtaagcattagaagttgacatccagccgggcgaggtggctcacgcctgtaatcccagcaatttgggaggccgaggcgggcggatcgcttgaggtcaggtgttcgagaccagcctggtcaacattgtgaaaccctgttgtctactaaaaatacaaaaattagccgagtgtggtagcacgtgcctctaatcccagctactgggaaggctgaggcatgacaatcgcttgaacccgggagacggaggttgcagtgagccgagatggcgccactgcactctagcctgggcgccagggcaagattccgtctcaaaaaaaaaagaaaaaaaagaaagaaaaaagttgacaactaaaagcaacgtagcttcaaagcaagaggtctgacggtggctaccttcgacccagggtcaccgcggccagtcatgacacaggcctaagttcacaacagaaatcctgcacacgcagagctctagcccttctccgggacaccagggagtctcaggctaacgaaaccaccaaggcaccgtctcttcccgagtcggagggcggcagagcacacaaacagatcgcggagccccggaggccgaggaaggcccgactcaccctgctatcttgttgcggagctttttgctggggataatggcgatctcctcgcacacgcgcttgttcgtgtggaagtcgttgcccaggcgcgtgtagtacttttctatgatgacccgggccgccttcttcacggttttggtgcgaacgcggccctgcgggtggagaggacaggatcactcacgagccagcgcaaccttctgggaagagtgcggcgccgagccccggccggtgtggttggggaccgccggctgcgctgagccggagagggcccggctaaacagtgccgggcgccgggcttaatgcggaagccgccggcccgttgcgctccagcctgacagggctctgcgccttcccggcccagggcctctctgtgggctgaggaccgcgggaagctgcagatgggggacgattgtggaggatggcggcctcgagccaaaacacctaccatgttggcgggtccttggtaaaagaggaaacaggaagcacaggcgaagcctgttaaagcttaggccagaaagccgcttccgcccggccacggtcgctctgagcctactcgggagccacacagcgccccctggcggagtggagcgggggcggcggtggcgcgcccctccggtgggcagggtgtctgtcccgcccccgacggctcctccctttccgctccccgctcccctcggttgacttgggctcgcttctctcccccatctgatttttaatgggaccgcccgtgcgatgtgctctagcgtagcgtccatctcttccacacacgccagggagaggagaagcatccggtcctcgggaggaccgagaaaagaaggcgatccagggccgtggaacaatgaggaagtgggggatggcggccgcccaggtcccccactcagtccgcgggccggagacttgtcaggtagagacagggtgcgactgggcgagacgtatctcatttcttccgggcctttgctcaaatgtcgccttatcagagggctttcccttcaaacttaggtaaaataactccctcactatccctgcttatatttcctagcacttgccgtgtgattcggcttatttttctcaactaggggtgagctccatgacagtaatggtcattttgtttagctaattcccagtgcttgaacagcgcctagcacgtaacaacctctaacattgacgtgaagggcccagctcaccagcagagctcccaacacctcaggtaccttctccatccactatcttcaggctgttcctgccgcacccatcctcaaaccagggccttccgaagccaccagcgcaggctgccccgatgggccgcagcctaggtagggccctgcccccttcttccaactctgctccctgggctgacagcaatcctaggctcccacctgacaggggaaggctgagctggccaggctggatgagttaagcccagggctgtgcctcattcctcaacgcaccttgggtactccagtcggactctcaactgattggggatggaaacctgaaggacaggaaaccctggcagcaaaaagtaccaatgggacaaaagaaaaggccagaatctcagaactgcgggagcaaacttccagtcaagctgctgtcaggcccgaagtgaaagatcagggtttttgtttttgtttttgtttttgagacggagtcttgctgtcgcccaggctggagtgcagtggcgcgatctcggctcactgcaacctctgcctcccaagttcaagcgattctcctgcctcagcctcccaagtagctgggattacaggcgtgcgccaccacgccctgctaatttttatatatatttttttttagtagagatggggttttgccattttggccaggctggtctccaacttctgacctcaggtgatccacccgccttgtcctcccaaagtgctgggattacaggagtgagccattgcacccggccagccttttttttttgagatagagtcttgctcagttgtccaggcttcagtgaagtgacatggtaacagctcactgcagcctcgatttcctgggctcacatgatcctgctgcctcagtctccctagtagctggaaccacaggcacacaccaccatgcctttttttttttttggtagaaatggggtctcccatgttgctcaggctggtctcaaacccctggggctcaagcaatcctcttgcctcagcctcccacagtgctgattgtaagcgtgagccactgtgcccagtctggcctctcctttatttatttatttatttagagacagtctcactctgttgcccaggctggagtgcagtggcatggtcttggctcaccgcaacctccacctcccgggttcaagagattctcctgcctgagcctcttgggtagctgggattagaggtgcctgcaactaccacctggctaattttttgtattttcagtagagaaggggtttcactatgttggccaggctggtctcaaaatcctgacctcgtgatccgcccaccttggcctcccaatgtgctgggattacaggcgtgagccaccgcgcccggccaggcctctccttttgtgaggagactcccccaccttgcccaa

SEQ ID NO: 1242355 - DNA, 4001 bp, Homo sapiens
tttaaacttttcagtgaagatagagacatttataatcatcaatctcatcactgggttggagaatgccaaatgatataccttctgtgagtctggcctttcctcctgtaggctggcacaacactgttgaacaacctacacaaagaaccactgtctgagcatggctgaaaaccgtggtgatcttgtagcaacctaaaaaaaaaaaaaggcaatgttaaaaatgaaaagcagaggaaaacagcacctgttcgacatttctggtaatatgtaaaaaaatcagtaacttcagtgctatgaaacagcaagccacatgtgtaacataaacttttctagcagcgacacaaaattttttaaaaacaggtaaaatcaataatatatttcattaaacttaatatttccaaaatatcatttcaacatgtaatcaatgtattttttttctgtgctacatcgtcaaaatccagtgagtattttacaattaaagaacatctctattttgagtatccacattttgattatccacaagtgctcagtagccacattcagctaatggccattgtattgggcagcacagctttagactgaagaatcaacagacttttctttgtatcatgaaacagaaaactcatcgtctgaagagcttaaagacttgctaagtcaaatggcatatctcctttgaatgcctgttttcacttaccccgaaatgtttctacaatggtttcagtacatttattatgaaaatgtccctgacatttccaattctgtaatcccacttctactcaacagagggttctaatgtatcttaactatacacaccacactagcaatccctacagaaattttctttagtaaaggaattaagatttcaaattttacctggacattttacatccataaagtaagaatttggactttgtactaggcgtttctttttatgttttttcttttcctcttccaaggacggatgtagtaaatctctagccaactgaacaaagaagcatattattactattagttttaaaccacaacgctggcacatttaaccatacgtgaaatatacatgcaaaaacaggaataacggtcatcctcggcagaagcaacacgtcagatagtaaagttatttttcgaaacctgttaataactttcatcagtacttttcataatacttgtgttctccaagtccctagaaaagggctttcgcacgatcaggaaacatatggtaaggcaaactttgtccttctttactcaactgcgtaatgaactgtcttcgatgaaaactgcgcgaagtcgaggtgctaagcaaagaaagtgaccccgactgtggactcgcttagagtagaaactgctgaagtagaccagacaacgtcagcgcctgggtgatttttgctcctgtggctcaacagctgatctgacaggaattcttgctgagcgaccgtccttgacggaattaatatataaggcaacaacgaggacagtttttaaaaaaggaaaacaagtaggaaatcgcttccgaaagaaggcagagggggcgagaaacaccaatcactgggaaagccaaaagacccaaagatcacaacctcaggggcatcctcaaagaccaagaccgctcataagctacacagagaactgttcccctcccagccaccgcctctgaattgcagcccacgcccctgcagggccagccgcgccgcggtgaccgggcaagtcactacatgcccgccacgcgcgaagacgctgcgcaacctgagccgcctcgccactctcggacactacaggcccgagaggcagccggactcatccgtcccatatgactctcggtaaagaagcccaaaacaaacccggagcccgatgtaaacaactcacaggcatgttgatcctcttgcaagctcagccctaccagacctcccagcccacacagctagcaagctgcaagcgatctgcgctcggcatcaacttccgggatagaagctgctgggaggagcggcggggcgggcttgtctgctctaggccctcctctcggtggtagggggacgccgcagcagggtactcgggtccagggcgcagggaagacccggggatggtgagcgttccagggtgccaagtcccgtgggtctaacgggcttgttggcgagcgccgcgggctctgcagtgcctgaggccagaatctggctggggagcggcctcgggcttaggccatggcgagggagcgcccgcggccaccggggccggcgccaccccggaacccggcgggccgctcagcccccggccccctggcccggccgctctcggttagctctgggggtgggcacacggggcaatgccactattctcttcttttgtgtattaaaaaatacagtattattaaccattaatacgtgccagagagattatgaaagaggctcgtatccttttggcttcccttttcaaggcgcagatttcgaagttttctgcggggtatggctgtgccttaggtttgctttgttctgaaaaaaagtttttaaaacagcacggattcgctgctgtgcctcattcactaagaggccccaccccttccgaggattactcgtcctttgcagagtggacaactagggggcctgagaaaggcgaatgtcaccgatgaccgaacatgagtctttatcattattattatttgagacaaggtctcgcttttttgcccaggctggaatgcaatggtgccatcacagctcactgcagcctcgacctcctgggctcaagcgattctcccgcctcagcctcccgagtagctgggaccacaggaacacgccattattctttttttttttttttttttccttggagacagggtcctgctatattgcccaggcttgtctccaattcctaggctcaagaagtccttccacctcagcctcccaagtagttgggactaccggcgcgtgacagcatgctctatttttgaggaggaaactctatgcttgaaaaatgggtgtcatgggcgaccaaaaggcaagaaaccagaaagacactttaccagaaaattggtctaactggattttttttttttttttttttttttttggcagagtcttgctctgtcacccaggctggagtacagtggcgcgatcttggctcactgcaacctccgcctcctgggttcacgcgattctcctgcctcaatcctcccaagtacctgagattacaggtgtccatcaccatgtccggctactttttgtgtttttagtagagacgggggatggtggggggggggttcactatgttggccaagctggtctcgaactcctgacctcaagtgatctgcccgccttggcctcccaaagtgttgggattacaggcgtgagccaccgcgtcccgccctgacttgatgttcttaatcaccttatttgtctttgcaaaaaggatacatgtataatatacattttgggaaatgcagaaaaatagaagaaaatttaccatctgtaaataaacatttttaacttttgacctatatccttcccaatattttttactctcttggatataggtttattttgggttttgacttaacctaattgggatcatcttgtgcataatcttttgtagacttgaattttcctcccacttactataaaatgagcatcactccatgtcactacatattcttttttttttttaaataaggtctcactgtgttgcccaggctggagtgcagtggcacaatcttggctcactgcagcctcgacctcctgggctcaagcaattgtcccccctcagcctcctgagtagttgggactgcaggtacaagccaccacgcctggctaatttttgtaatgtttgtagagatggggtttcgccatgttgcccaggctggaatattctacattatgcttcttaatgggcatatagcatttgtcctgtgactatatatattttcacttcagccatacactaaattgggcattaggtttgggtttttaaatatttgatacttaaaaattaataaaaattggtgaatattaaatatttaatgt

SEQ ID NO: 1242356 - DNA, 4001 bp, Homo sapiens
gtaaaattttttagccgggcgcagtggctcacgcctctaatcccagcactttgggaggctgaggtgggtggatcacgagatcaagaccatcctggctaacatggtcaaactctgtctctactaaaaatacaaaaattagcaggcgtggtggcacatgcctgtaatcccagctacttgggagactgaggcaggagaatcgcttgaacctgggaggcggaggttgcagtgagccgagatcgcgccactacacgccagcctgggcaacagagcaagactctgtctcaaaaaaaaaaaaaataaataatcaaggtaaaatttttttaatggaggaaaaaacctccataaatcatcacttattacgatcttgaacaaacaaaactaaggcttaagtccagggatatgggctctagaccaggatttgccacaggctcgctacatgctcttgggcaagtcatttatcttttctgggtctctgcttcctgtggaatgtgagggttagaccagatctgtgctttagaaattgggataggagagggaattcgtcaatgtatgatatattgacgcaaatcgattgatcaatggaacaagttactccaaaaccatccattccccaaatgctgtaatcgccttttctccactcacaaccatggtaaactagtgttactgagaggtaaacagtgttacttctgacaggggtgtctggtacctcatagatgtgatggaattttaaaggagtcaaagcactgggctaaacaattctagtctctatccctgacatctcataactctatgttaaatagtttaagtagtagttataggaacataggctttggtagtggcactgttgatagccttacccctgtgagtttccttagtttcctcagaggtaaaatggagtggcaatacctacttcacaaggctgtcattagaattagtggacatacaatgtttaactttgtgcccagcacacagtaaagagacataaatgatagcccctattattactatttgcacagagatctacaacgcagggtaaagtgatcagtgcccttgccacaagacggtgtttaaaggaattatgaaaattccaacttctgtcccttggaaacaaggaagctgccttgaggaagaggataaacaggctgagtcctgaagcacagacaccctggccacttgcggaggtgggaaacgggctaaaatagtgttccaaatgaaagcgagaacgctttagaattgccatgattttaatccagtacctatgctttactaagactaaaaaacaaaacaaaacaaaacaaaacccggccccttttcctcgcccgcttctggccagccccatcaggactccaccttgagcacgatgttgaggtcctgcaccggcttctcgttgagttgcaggcggcccgcccggaccgcggcctcatagtaggccaggggctgagctcggaactcggtactgaagacgtgcagcaagctgtggcccacccagcgacctttgcagtaggtccggaagtcaaagtaatagggccgcaccttacgcaggccgccctcgaagtaataactggtttctgcaaagtgctcatctccgaagctcaccccggtccgccgcttcttcgggggcggcacgacacgctccctggttgcgccccgccgcttcttatgcttgcccgggcctggggctgcagccgagggatgctccccgcctactggggccggctccacttcccggccagccggcttcgggggcccgggggacagctcaaccttcgcgtcgccaccagcgtcaccgttttgctgatgcgaagccctcagcccgccctctgtcccaacctgggtagacactgtttctgccattgggcccttatcgccactccaagtcctggtaaagctagggcgcctaaggtcgtagcgccaatgtccaagaaccctgagccatccgcggcggtccagccacataaccacgctgcccccactccactcccagggtcgcgatctgaggacgtcactcggccccagcgaatcagggaggcccagtcccgaggcggggtctgcgataagtgagcgaatgagtgagctgctcgaattaaattaggtgaattgagtgagcttagagatgagagactgtaaatgtctcaccaaaagtgaccttactcagacgtcttcctattagggagatacgacgttatttataaaggaaacccttggaattgctccgtgtaaaggccatgacaggagtaggtcgtgtaaattccgagtagtcccttgggtctgaagaaacgcttgaaaggagctttatttaagacaaaacaaaaactaacaaccagaataaagattgctaaactctgcgaatatactaaaacccactgtattctatattttaaaagggtcaatattatagtatgtgacttgtatctcagtaagattgttatatatgtatttaaaacacacacaagcaccccagaagcaatgtgttcacacctgtgtttccccctaacagcatgagaaggattagtgatccccattcgcctcccacatgcttccatcctgagattaaaactgcaaatagatcagaggatatatggcgagggttcttaagtgcaaaataaaccaactctggctaatttcatcagagatagaattatggaaagtatattagtgcctcatagaattcacaagacaactggagactaggctcagaaaaagggccaaatcaagggaaaccaagccttttgagagcctggcttcagacatgtcagggaagaaacccagttgggatgcagtagacacaagaaactatgttgtgccaaaggactctttttcctgcagccctgccaccccttggagacccctaaatctccctgtgtctctgtgtccctcttccaaggttaagagtcctgcaggggaggacttccatcagccaaacctcattgctctgagccctcacttccagggtgcctggagatggaagaatttaaccctctttttttttttttttttttttttttttgagacggagtcttgctctgtcgcccaggctggagtgcagtggagcgatttcacctcactgcaacctccgcctcctgagttcaagccattcttctgcctcagcctcctgagtggctgggactacaggcacgcaccaccacgcctggctaatttttatattatgagtgctgggattacaggcgtaagccaccgcgcccggccaagaatctaaccctctttggtatccagagtgggattcttccaaataaggaggcatttcaatgttagtttgccaaaaaaaaaaaaaaaaaaaagacagtctaattcttatcctaggcatttgtattctggagaggagaaagggaaatcttttttagctaaattccttcttcaagtcattagtctcaccaaactaactgagggactgcagctgaggtatccacagctgcagaactccatatgctgaaaagtctgattcctgactacctccagaaataagaggtagaattctccattgattgtggggtatgttagaaccaaactacttcacaggagggacatcatctctcaagtgcatcatttcattaagatatttacagtgaaagcagaaccttatccaaaagaaaagtatgtattcttagctagcctctttgctccataggattggggtgggagaattaaattagttaattcaagtaaaatacttggactagtgcctggcaaaactgtggagacagaaaacatagcagaatcttgttcctcctccccttctgacctactaaatgagaatctgcactttaacatgatcctcaggtgatttttctgcatattaaagcttgagaagcactggcatagaccatgtagagtagacatttgtcatattctgtaaacatccagcatcttccgaacacccttcttttgggtggggaatttctcacatttcattactgcccccaaaaggtagaagccagagccttcccacactctcttgcagcttggacataggcatttgacct

SEQ ID NO: 1242357 - DNA, 4001 bp, Homo sapiens
aaaaaaaaaaaaggctagataagaggctataaaagtggtaagagcctaatctgaactaggacaggaaagtagaaagaaggcaaagacaccactatctttgcagaggcaggataggtaagacttgataactagatacaaaaggtgaaaagattcagacgactctcatgtttctagcaaaactatccgggcacttaagagtggtattaattcacagagcaaaaagatctgaggtactaaggaattctctttcagtaggcccactgtacctactgttaggtacatccaatggaaaattcagatttggagctcaggagatttaggtttggaaatcaagcataaaaaaagatgagatacttgttctttgttagtgcttcaggccctctatcttttatttcctccaacaactctcttctggatccactggtgactcccaaccaactcaacactgtccttattcttcatcaacttaacttccactgtgtctaccaaatcaatacccaggtcttgacagttctcacgatctgttgttctaattccaatatccagccgacaagcatcctggacgaaaatcacaaaatcgtaacgacatcatgtataaaaccatactgcctactctgaattagaccccaacctggcaatcttttggttcatttttataaacttcttatcatgttcctgagagcaagtattcaaaatcttctaggttcttttacgttatcaaacatggctttggtccgtcactttcagctgaatcccttggatctaattaatgaggtcaatatctttgatctgttacagagatataaggtgaagaagtcagacttgtaattatttagcacgtcaaattcaccttaatatacagattcttagaccctcttcccctcccccaaagattccaactcaatagatctggtgaaaaccaggaatctgtaaacgcccagtaattcagaagcaaacgtaagagatcaaattctgagaaacaatgtgtttctctgagaaagagaggaacgggattcattctgtaatgacaggacaaattcatgtaccattcaaaacgtctttcacaactaggactcatatttattatttacgtttacagacttattatacttgtagccctacgcccaaggctctatcatcatttacaatccagtcacttcctcaaacaaatgtatttgctccgttctctgccttttctcaaaatgttcactttccttccacttagaaggccccctccgctttcttccgcaaaattcaggatccaagataaatatcacctctatgctgagtctttccgtacaggaccctccccaactcacctgcagtaacttaatacataactctaccattaagcaatacggaacacttccatcaacctctacactttagtatggaccttagtgtaatgcctgacagggtatacactcaacaaagtttactggattcaagaatttggcccaagtacatgagtggccaaacagccctcacagacatccaagattcctggtaggcgctagctgggatcgctcctgaagttcctcgctgccaacgccacccaagggtggcgtggtggccagcgccgctcggaagacgggcaaggagaaacccccgaagcggaacgttgagaacggaggcccagttaagccaccctcccaggggaacaacgggaggaacccgggccaaacacggcagacgcagaagcacccagcaccgagccgccgcgcccaggaaccgcgggagctaggctgaagcaagaactggtgtcgaccgccttaccttgcaatcgttgcggacgaacatcatgccgtgtccaggatagatgggccccgaacagaaataacacttttcgatacgcatgttgaacccgcgtgtaaccccaccaaacaaacgccaagcttgagaggaagtgatgcaaccccgtcaccggaagttaccttcttcccccttccccgaccggaaaaaggcaagcgtccttcgttctcgcgggtctgttagaccagatgcgaacacgactgtgcctccggcggccgtgtggtcaaatgcgctgccgtttgacgcaggcgcagagctgcagactagacctgttcgctgttactttggggaaatgtggttctgcgccaccttgtgaacttgctctcacagcgcctagttttttctctctgtgtgtcggcatttatgcaagtattatgtatctttggtttgtgctttgcctcggagtgctctcgagagcactctcttaactcatttgtctactgcctgccctagaccagccctcgattctcgtcccacagtgatttgcagggtgtaagcggcgaagaccctgcaatccagcgttgcttcgaacattgcaatgaaaacggttgagttgctgatgctccaaggactttaccagcaatttttttaaatataaaatcgtgttatccgcctcccccccattttaattaatatgcatatgtagtaaacaaatattttcgccggaaactacgactccctccctagacctgcggtcttcctccccaggggcaaaacagttccatttattacctgccagagcttttctgtgcataggcaaacatgtatatttgtgtgtttgcctgtctctacgtcctcttctttataatactagttaatatgctatttactcttttctgcatcttgctgttaccttgtatcccttcattggaatgtgagctccatgaggggcagggatttcagttcgtttggtttacaactacatcccagtatctagaacagtccctggcacataataggcatttgatacatattttactgtaaaagggtatttaacattctttttcatatatatatgccattgtatgaaagtattttaattggtcactaatcgatgggcattcttatcttttgatataataagtatctgttggtacgctttttcaggagagggtttatgtagaactgctggatcagaggagctggatatagataaatagttttaaaatttggcagataatactaaattgccttccaaaagtttttaccaattaacactcagcatcaacaaataagatgtctgtttcactaccccgctgtgaaaagtgatctttgccaacctgagatgaaaatttatcttattattatttcaacttgaatttaattacaaatgatgttaagaatctttcacaatgtttttcagcttttttctgtgaattgcctgttcaggtcctacgcagttttctattctttcgttgattttcaacagcactttacacgttaaggttagtcctttgctgacatgcatttagaaattatttccctatcaatgttttaagctttgctcatggtatttttccatgcagaaatatgttgtttatatattcagatttatccaatttttttatgattttggatttggtactttcctttaaactgcacttctcactccaaaattgtttttcaaaatgttttctcttatgttttgtagtttcatttttttgcatttgaattttcaactcgtctggaatttaagtataaatgacataagactccagtgtctttccctcagtgctgtatgttgataaagcatcctttcccccactcactcataatgtcacatctatggctccatttctggactcagttccatcgttttatttgttaatgtgccactgcccaaatatttaaattattgtcattttttgaataactgggtttacctcctctccctttctattagttttcatgctgctgataaagacataccctagactaggcaatttatacaggaaagaggtttaatggactctttatggctggggacacctcacaatcacagcagaagccgaggaggagcaagtcaggtcttacatggatggcagcaggcaaagagaatgaaaaccaaatgaaaggcgaaacccctttaaaataatcagatctcgtgagacttatgcactatcatgagaacagtgtaggggaaactggccccatgattcaattatctcccaccaagtccctcccacaac

SEQ ID NO: 1242358 - DNA, 4001 bp, Homo sapiens
aatgagaacattttcaattcctaccccaaaacaaagtttctattccttagatagtcttacacaggccccattacttctccatctccctaccaccattttcaaagcagtcttctttctacagcacctcctcaatccttttcttcttaaaagtcctccccttggcggagcttgcagtgaagccaagatcgcaccactgcactccagcctgggcgacagtgcgagactccgtctcaaaaaaaaataaataaataaataaaaagtcctccccttttatgccttaatactttctttttctttcttttctttttttttttttttttgtgatggagtttcgctcttgttgcccaggctcactgcaacctccgcctcccgggttcaagaattctcctgcctcagcctcccgagtagctgggattacaggcatgtgccaccacgccccgctaattttgtatttttagtagagatggggtttctccatgttggtcaggctggtctcgaactcccgacctcagatgagccttggcctcccaaagtgctgggactacaggcgtgagccaccgcgcccagcccctaatactttcaaactgagacctctggcttcatataaaagacccccaagaagccattcatagaaaaactttacaattagcaaatgcttgcactgccatcaatttttacaaacacttgatctttacaataaaccaattagatacacaaggctgatgttacattttcattttacatttaagaccaaagatatatagctagaaaatagcataagcccagcctagaattcaaattttcagactccaagttcaatactctttctactcaaaagctactatctcttgcatattctttctttacatcatttgctcattaaacagaaaggagaccatctttgtatcgcctggtatcactagagcactgctacaaagagcagattcctccctacaatgttttctagagtatataaacagttcaaccccaagacactgaggccaaaagttactttcagtgcttcctgcagtcttcaagtaagaaagaattctgggatgctgcgtgaaagggccaagaggaggcctgggctatgcacagtccctccatgtcgccctacatagttctctatttcttccagtatctgccctctttcctccacccaagagtgtttttttgggtctgacacctcaacaagggcccttctcaaacacaaacgaccctagtcgccaaataaactcgtgcccacagctaagtcatccttggcaagcatggcagaggctcctaggaacatttacgagtgtccttcctctgtccacatcccttgtccgaaaaacttccatcttccagagtccggatcttcttggccctcgcccccaactgctcgacgcgcacccttgcacctcctccaaaacctcccagcctcccaggttggcgggcgatacttcctatctctcccagcccggatctcctggactacagcccgccgccccgatctggccccggaagatcgcggcccctttcgctacccccgagcccgaggcccaacggcccggtccctgccccgcctccccgcccaaggcgccaagtcctcggggctccgtctccaggcccgggccggtctccaaggccccgcacactccaggaagacgggaaaggggctgtagtggtgcccagggcacggggcgagctgggcgctctggtaggaaggctccaggcccggccgtctccggctcccgcggccccgacagccctctggctccgccggcccgcgcctccgcggcctgccctcacctgatccaggttctcgtcgctgccgctgtcctctgtgtccgagtcgatcacgacgcggcctttccgcttctttaccatggtggtcccccggctcccacgccggccgccgcccggactcccctcttgcccgcctgccagtgggaccgccactgccgccgccgccgccgctgctcgacccacacaaaggcgaccgcgcatgcgcgctccgctccgcccccctggccccgccccctgctcgccgcacgccgttcgcaggtcgccgggtgccccgccctgccccgcccccgacgcagcgtgagaggcggggccttcccccgtcgctggttcccggcagagagtggtggtggctttacccgcgactgccctggagtccttggctgtatctctgctgcggagccgaagtttggtgggctctcttcctatcgggggctggagccgcaaggatccaggttctctctgagggggctcacgtgtctacctactttcaagctgtccaacactgatggcgtgtacttaaggggccgacggcctggaagacataagtcgcctggaccacgcggtggacaccggttgggggctggagactgccgacccgggctgtgcgaatgacagctgagctgggacctggagaatgcatctgaattacccaaaaggagagtagagtgttgcatgcagagaacagcgtaggcaaaatggcccggcgataataaagttaggttcggagaactgaagttagttatggccagagcagagattgtgggtggggataggcgacagaccaggctggagaaggacacggcgactgcctcactcagatcctaataagtaagctgaattagggagtttgaacttgagtattgaaagattttaaactgaagaaccacatgatttgatttgtgtgtggttttgtgttttagtagagacggggcctccctatattgcccaggctggtctcgaacccctgggcccaagggatcctcctgccttggcctcccaaagtgctgggattacaggcgtgagctaccgtgcccagcctgatttgtggtggtgtttttttgtttgtttgtttgtttgttcgtttgttttggagacggagtcgctcttgttgcccggcctggagtgcagtggcagctcactgcaactccgcttcccaggttcaagcgattctcctgcctcagcctcctgagtagctgggattacaggctcctgccaccacgcccggctaattttttttttttttttttttttgagacggagtttcgttcttgtcgcccaggctggagtgcaatggcgcgatcttggctcactgcaacttctgccgcctgggttcaagcgattctccagcctcaacctccggaatagatggcattacagacgcccttcaccacgccctgctaatttttgtattttcagtagagatggggtttcagcatgttggccaggctggtctcaaactcctggcctccggtgatccgcccgcctcagcctcccaaagtgctgggattataggcatgagccactgcacccaggcctgatttgtgtttttcaaagattactctgaccgcagtatggcgaatggactaagggcagggagatcgcttggattgttgttgtcttcttggcaagagatgatggtgtcctgacctaaggacgaagctgtgggaatggaaagaagtggatggactctggataatttggaacgtagaatccccaggatttgggataggggtaagggaaggagtgctcccagatacctattgatgttcagattctagcttaggaagctagtggcaggtgagcccttcatcaaaaaaatgaaatacaagaggagagaagaaggttttgggaactggtgtgtataggaaataagtttttatacttaagtttgaggtcagctgataaaaaggtcagctccagaagttatttcctttagtgattaggaatataaagtaggggccgggcgtggtggctcacacatgtaatcccagcactttgggaagctgaagagggccgatcacctgagggcaggagttcaagacctgcctggccaacatggcaaaaccccatctctactaaaaatacaaaaattaggccgggcacagtggctcacgcctgtaatcccaactttgggaggctgaggcagggggatcacaaggtcaggaaatcgagaccagcctgaccaacatggtaaaaccctgtctctactaaaa

SEQ ID NO: 1242359 - DNA, 4001 bp, Homo sapiens
agctctgatctctagggcaggaagcccaggacacaaaacttaagaaccactactatagtaaaccttggctacaggtgtaccaaaaacaaacaaaaacaaaaaacacttacaatgccagatggagaggaaaagtcagggaagatggctcagaagccaagagaaaagcataaggatctcacaacaactaccaccttcctaagcctcaactccctgggacatctattcaacactgaccctgtctgaagataattttttcaagcaataacgcctagaagatcattaataataaggagaagaaatgactgatcatggaggacacaaggcagaaaaaacctgagctgccacccatccactactaaagacacctgtcagagggacaaccaaaggatttgatggagctttgaggggagcaggcagctttataacaatagggttgtcatgagttgcaactgtggggccatcttgtgtgcagtgtgagagatgagaatggagtctgggtctgcaggtcagacgaaggatgaagagatgaatactctagcctctcagtagtaccagcagggcgataggtacttccataccccccccaaataagacccaagtcccagctttgacaaaagaaccatgtttggaagagaaactgaagtaaattggaaggaagcgcttcaacaggaggagagtggttcaaaagatggacaagaggtaagttgtgatcttcgaagaccaggtcatggagaagggggcacccttaaagggaagtgagagagggaaagaaagaatttcattctaattcctgagagcaaggcagcgcatataaaattacctaagatttacagagcgatttgccgtttacaaaacattatgacattcacgataacgtttaatccttatcaccctgaaacgctggttacattttattttacacatgaggaaactgaggctgagtagggcggattatgcgacttgctcaaggtcacttggctgaagtcagcgctaggatgcatccccaatgcccccacccctccgggtggccgtccaccctgaaagtctttgtattatctcctacagggcaaggctggtgtggctgcaacagacttcgccccctcacccccaaatctgggacggagcagcgccctcaggtgtcaaggaggggacctgagtgacgcggagccactgactggggtttccctgtcctgcggggctcgcgggagccaggagcagaagccacagctctcgaacacacgacaggcagtcagtcaagtcaggctccagcagcagttgccggcgtggggcttaacacgagaggggcagcgctgggtgaattcccctccgagcgatcccagggctaggaccaagcgcctgcgcccgcttctccgacccggctccccacactcccccctgccccgctggctccttcccggaggttcccctgtgcgtgggggcgccctggaagaggaatggggctggggtggagtatggaggtgtcagagggccgaccccggggcgagggcttccaacgccgatcttatgggtcaggacaaccgcgaacaaaccccggctgaagtttgggcatcaagggtttcagaccaagtagcaagttgcctggagagcgagcggtcctaggtggagggcctggggcaggggtggcggtaggggaacaagggagaggcaggagatggtgccccttcccacgcagcccctcgcggccccgcgggtaggtggccggtccgcctctgcagcccgcgggtgcggagaaagcgcccggcaccgggcacccggcaccgcggcgcagcgcagccagcccctcctcgccgcgctccgcgctcctccccacctgcccacggcctcgcccccgccgcggagactcacagtcctcagaaactggatctcgtcctcgcctccttctcccccttcggccatggctcccgaggcgtcggcggtgccccagcctccggcgcctctgcttcccccggcagccgctcggcgtgcgctgactgctgctgcgctctttctcctcctccttttcgtcctcgtcctccacctcctcctccagctcctggctcagcctcagcctcagcagcgccaagctaatccccgaccatatagggagctgggctaacactccactgcactgcagagcgccaacgccaaccaagcagtccgcccacccctctcgcctctcgccccagccaagtgcgctgcggccgcccgctccgtggagagcgcaacgctgggcgcgtcgagctggcgggggcggtgcgggggccctgggctggcgcggtggagcctcccccgcaccgctgggtaccgcaccgcacactcagcggaggcgcgcgccccgcggcgaccggaggatgtcccctaaactgctccaattcacaaacaaaggccagttgcttagctccagcgcgcccagactgggtaccaaccctctcgctttgctcgctttgcccgctttgcccactttgcctgtgtgtgtgtgtgtgtgtgtgtgtgtgtgtgtgtgtgtgtgacagagatagagagagagagagaggaaagagagagacagagacagagagagagagagaggaaagagagagacagagacagagagacagagagaggaaagagagagagacagagacagagagagagagagagagagagagagagatctggactcgaataccttgctaggacccgcgtgcattgttgggcaaggagaagacggtgcagtgaggagcgagggtgattgtccacttacaacaaagtttgcaactccctggatagtcctttctacaccttaagagaaccccttcccctcttcaaaattggtaagtacactttaccaaacccctggattgtccagggttgctgtgacttctgtaccccagggagcttctgggggatcctgtgccaccctcaatttggaagtcaggtggcatcacaacccttcctctctgcccacccctaaccttattctgcatttagagttccagccctgtggactctaaagggagtagagagtagttacaggaggctcccttccaggtcctggaaggctcctacatcccacccagccttaggtccttttccatggttggggattgccagattggtccttgccttgactgacggtgcagggtgcccccttctgtttgatggccgagaagctccaaggcaagagactgttcaaggcaaaaggcaccagagatgtagatttaggaggaagtgcaactgggaaggtggtaattctgggctgatgatggtggaagacactggaaaccccaagccatttcacagcttcatataccgcctccttgtggacgacatctatctcttgatgctaccttaagatctctttcctgagcttccgtcccatatgttctgatgaacatcagaaatgcaaagaaaaatgtttttttcttgtattgtactcaaactgctaccttctaggcttcagcttgggccttgtgcctcttctgaaacccgcctagaataagtcaaaccatctgtacattgtggcccttcacctcttagaaggcatctgccatgcttgcctctatggcccaccatccactcttttcttctcctggctcaaggttcttcttagccccaactttccctgtagtatagtttccagagcctatgtcatctttgatggccatatgagcattccaggtggtcttcttcctgaattgttgtgctctccgtccttgttttggacagtctttatgtgcagcctaatattggattggcttctggagaaacactaatgacactcactgtgtttggagttaactagaatttctagatttacttttttcctcccacgtgaactgcaaaagtcagctcttctccatcttgatcacatgcaagtgcttgagtacctgtgggcacggtggctcacgcctataatctcaacactttgggaggccaaggcgggtggatcacctgaggtcggcagttcgagaccagcctgaccaacatggagaaaccccatttctactaaaaaaaaaaaa

SEQ ID NO: 1242360 - DNA, 4001 bp, Homo sapiens
tcttgtagtcccagctactcaggagactgaggtgggattcaaataatcatttgaatcctggaggtcaaggctgccatgacctccactgtgctacagcctgggcgacagagtgagaccctgccttaaaaaaggaagaaagagggctgggcgcagtggttcatgcctgtaatcccagcactttgggaggccgaggcaggtggatcacctgaggtcgggagttcgagaccagcctgaccaacgtggagaaaccccgtctctactaaaaatacaaaattagccggtcgtggtggtgcatgcctgtaatcctagctactcaggaggctgaggaaggagaattgcttgaacccaggaggctgaggttgcagtgagccgagatcgcgccactgcactccagcctgggcaacaagagcaaaactctgtctcaaaaaaaagaggccaggtgtggtggctcacccctgtaatcccagcactttgggaggctaaggtgggtggatcacttcaggccaggagtttgagaccagtctggccaataaggtgaaaccccgtctctactaaaaatacaaaaattagccgggtgtggtggtgcacacctgtaatcccagtttctcgggaggctgaagcacgagaatcacttgaacccaggaggctgaggctgcagtgagccgagatcgcgctactgcactccagcctgggcgacagagcaagaattgtctcaaaaaacaaaacaaaacaaaacaaaaaaaaaggaaaagaaagaaagcaggaagattgtttcttccttgattgctgttcaaaaggtcaggccaggcgtggtggctcacacctgtaatcccagcactttggaaggccgaggcggatggatcacctgaggtcaggagtttgagaccagcctggccaacacggtgaaaccccgtctctactaaaagtatgaaaattagctgggtgtggtggcatacgcctgtagtcccagctactcaggaggctgaagcaggagaattgcttgaactcgggaggcagaggttgcagtgagcggaaatcgtgccaatgcactccagcctgggcgacaaagcgagactccgtctcaaaaaaaaaaaaaaaagtcaggccagctcacacgtcagtgcatctcaactatgttgccaccacacacagttccatcagacaaacgttccctgtgggtccagaatttttcacagtcccccgcacctctcctctctccctaacccgggctctcctatctggtcaaaacccactccaaactagacccatggccaaaatgtggaattcttatcaaggccatttttcaacttgggctaccttcccgccctctcccatctttctttccctgacaaatctcaggggctctcctgtactttatacactagtttggctggtggtggagcggtggcaggtgtcctgggcttttcccacatttttcccctccaccagaggcttcaccacctcctcatatgttgctgtcaccccctcttctaaagtgactcaagacaggtgtctatccaagaatgagggaatgcgatagccacatttcgcttctccctgacgctaggagacttccggaagggtccgaccgtacctgctccagtccccttccctagcacagcccagcctccgggtgctagaagaccccactgtctccaacacttcagcgccccgcctcctctgcagttccacctgctgctagtcgcgcccctcacgcgttacgataggccagacctcaaagcccgctctcccattgggcagatgacccgtccctcctacgccacgtctcccggctctagcgagaggcccgggcggcggccgtgggccctagggaaatctgagagctggatggcgggagaggggctctacctggaaggggtttacatccactgggtccgcgaaggggttggtgtcgaaagccgacatggtgatcgggggccagcgggcgaactccgcgaacgctgctgcctccgggcacccagacccagcggcgcttcgtgtagaccctccacttccgggagcgaggcagcggttctggcgcaggcgcgatgccctcccccgagggcgtggccctatgacggcaccggggtcgctccgccccccccccccccccccccgcccagcccacaatagtgcggtgggtgggcattcggcttccgtccacatcttcgctctgctggggattcaggggtcttggctgcgcggagcgtctacggagccagaggcgtggccggagtccttcccaactgcctatcaatctgacaccttccaattttatgtttctaaagcaaactctcaaaagtgggacaggaaacagccccttcacttctctgtagaccaagtttgggaagaagtccaaactgatccctgggcaaaggacaggggtgacaggtgaggccagaggccttgggagaactaggaaagcgcttcttctgcagaacgtgctcggggaaagagaagtgccaggaccatccagcagtcctccacccgagctgagcctgcttcttctagggctgctcgccctctgatgtcgtttcatcgttttagggacgagggttcctgggcccatcagctttgggacctgagttgggacttgaacctggacatcaaacatttatgaagtgactcacggaattcagcaacacagcctcaatcatgggggaggtggctgcttcactctccacagctccgctttcccccgcccccgccccccacagggtctcactgtcgcccaggctggagtgcagtggtgcaatcatggctcactgcagcctcgagctcctgggctcaagcaatcctcccacctcagcctcctgagtagctgggactacagctggtcaccaccatacccagctaatttatggattttttgtagagatggggatctcactatattgcccaggctcgtctcaaacacctgggctgaagtgatcctcccgccttggcttcctaaaatgctaggattatactcatgaaccactgtctggccaaatccaccttatttatttggatctgtctggtattattcatctctgctgtcaccgaatcccagccactgtcatttttaccctgaactaatacagtgctgttaattggtctattgttcttcatgttgtaatcaaagatatgtttaaagggggcaaaattatcacagaactttgttaaaatttttcaattaatttccataaagggctgggtgcgtggcttatgcctgtaatcccagtactttgggaggcagaggtaggaggatcacttgaagccaggagttcgagaccagcctaggcaacataccaggaccctggctctacaaaaaaaaaaaaaaaaaaaaaaaaatatatatatatatatatatatatatatatatacatatacatatctcacacacacacgtaattagctaggcatggtggcctgtgcctgtactcccagctacttgggaggctgaggcaggaggactgtttgagctcaggaggtcaaagctgcagtgagccatctttgcaccactacactccagctgagtgacagagtgagaccctgtctcagttaaaaaaaaaaaaaaaaaaatcaggccaggcaaggtggctcatgcctgtagtcgcagcactttgggaagccaaggcaggcagatcacctgaggtcaagagttcgagaccagcctggccaatatggtgaaacctcatctctactaaaaatacaaaattagctgggtgtggtggtgcacacctgtaatcccagctacttgggaggctgaggcaggagaatcgtttgaacctgggaggcggaggttgcagtgagctaagattgcaacattgcactccagcctgggcaaaaagagtgaaactctgtctcaaaaaaaaaaaaaaaaaatcataaaggcccaaattcttagtttgtcttcaaggtcctaaaggatctgcccctacgtttctccccttctgaccccttctagcccccaacccccacccactgttccagccatgcaagttcttttcagttgctca

SEQ ID NO: 1242361 - DNA, 4001 bp, Homo sapiens
cccgctgcatacattttgagtcagtcattgggcactaagtgttcacgtcttctcccataatctcctcactccctcctggatggagtttccaggagggacccagcacagagcacagtcaatccatatacttgcttaagacttggacactttcccaatgggtgggagggaggcaattaacgccctcccccaatcagattaagcccaaagctgctgtcaaacctgctgtatcacacttcctccaggaaaccttccgaaactcctggctggcagcagggaaggaagtgcagcctgtaaaggaaatgctgtggggggcaaggggtggggatagggacagggaggcagagggataggggaggaaaggaaaaggaagagggagaagaaaggggggatgctctaaactagaacaaggagcatcctcaagggaggtcactacttagtcctattatttcatctctagagaaaggtgctagaaagagatgcccagagaggggaggtgacttggggaacttgcttggaggtggccactcaggaaacggttaaagaaacagccacagagcccaaggtctctctctagaactcccctcctgggaccccactaactctccaaggggtttgctaaacctaagaccctctttcaggggcccattcaccagagacagccccctctcagctctagagactttgccctaaggctcaccaagcccagaacaaacctaagttagcaagacctgtgtagccccaaacaaaatctctctgccaatcatgcccctgcaagaaccatctccctctttcagagccctgctccgtgaggcagaacatgtaggggacaggttgcaaatttctccagactccaccaccccatgggcagtcacatggctgagctcccaggctcagcccccaacagctgtgctcgttttcatccctgtgcctttgcccatacattctcctggaatgccctctcttgcctctcctcccacccaaatcccatcacctctggaagtctcctattcgctagctgtcgcctccctttctctctgtgtccctgggaaagtctgccaggccctcactgatctccccatcgggaagctgggacattacttgtttaagccgcctgtgacagtgaatgctcagtccgagtctctacttggttcccccaacccacagaccaggagctccccgaggcggaggacaaggatcggttcacaaacacctcacctccatcctcgtgacctccggccagcgttgaaatgagccaaatccggcgcccccaactcaccacccaaagccctgatggagcccgcctggtggcctgggccagcgcgcccgtcgcctcgcaaccctggggcggctgaggtccgccatccaaaggtcggccgcccgagggaggtgagggaagtcaacccgggtccacctgcaggcgctagttggaaggaaaggcccaaaggaagccacgggcacccccttccagtcgcccccatccccggctgcgcacgccatctccagaaggccggtttccagggaacgccaggtggggctggcgggggggatggagggcccaaagctcaggctccagatccagggtctgacgtcacccaaaggcccagttccctctgcgggagccacagatgggaatgggggggcttggggggctcggggggcctgggtgcgccctgagcgctctcccccagccccaaacagtaaaggtcacctccactcccacctctccagcagttcggccttcttcctgcatccaaaggtgaagtgtaggaggaacaaagctgcagccagcgacccccacacctctcgccccgcgcccagcttcccttcaaagctctcctcccagccttcatgcccagactcacctgccgcggccgttcggctgccgaaaggccgcagcgctgcgctgagctgcgctgcacccgagcgatgcggcgcggagccggccgcgagccgctccggggctgggggcggggagcgcgcgcgcgcgcgcgcgcgcccgaggccgtctctgcgcgcgcccgcgccgccactgcctgcagcagtcactctcgcgagacttccgctctgctcctaaggctgctcctcctgagctcgcgagaaggacgacccggccgccccggcatcttccaggagctgtccgaggtgctagttcccgggccccggccggatcaggtggttgacgggcacctcagggacaagagcctggcgtgtaggtggaaggaagagacccagagatgggagcctggcaccagcagccagagcctcagcttccatatctgtaaactggggagaataacctcctatacctatgccaggagcctctgggacgtgccagaaaggagtgagaaagagctgaaagcaggagagtgtggtgactgcggaaggtccttcagatctgcaggcgcagggggaaagagagaacagaggacggaagatcggagatgatattcagagaggcaaggacacagatccacggaaagacgacataggaggacgagaaagaagagctgcaaacagagacagagacacacggagagagagactgagatgagagctcaaggcctggagagaaaaaagacatggaaagataagataggtaagggagcataatgaagcaagaaagaggcaagaaatagagacaaattacgcaaaggagcagagagagagagagagagagaggagaggcttagaaaaagaaagagactcagaaaaaggaatgaaagagacagtgatatgcagagatgaataccaagagagagtagaggcaagggtaaatgtttaaaaacccagagctttggagggttgagagagacccacttggagagatgggctgggagtgaagacaggattttattgtgattggtgtttacatagtaaacctccgtgggatctctacaggcagggccagggccactgtctgtcctgccagccaattgctccttcccctacaccatacacccaccctccaccccccacccacaccatcctaggcctggaagggggcctcagtgggtgggagacactgcagggattctttgcctagaataagggcccattgtctggctccatcctgccaggagtggggcctcactcccacagctggcatgaaaagggggtggcagtgaaaaaaggcagacaagaactagtgtggcagaggggaaaaggagggagagagcctcggtgcctgggaagggctgagcaggaagcatcatcctgccaccaggccaaccaggaaggaagggtcctgggcttcggggcaggacaactgggttctgtgtcagtcctgtccctggttgacccacatgctgtctctccctgctataatgcaagccaaggctgatttacagagctgtggagagcagccaatgagatgacaactgggaacctgtcgaagttatcaagtgtggctgctacagggaaaatgttgggagtccatgtgggcctcaggaaagatataggggttcacataggcctttaggagagagatctgaggtccacactgggatccacaaggaagatgtctggaaaccacatggaatttataggagatatcttgtggttcatgtaggtcctacaagggaaatattggggttcccgtctgatgaccacggacaatttttctccactcagaagaatcagaagggtctcctatttgataaacaactaacgtaggaagagtgagcaggtccaaagtcagaagcccacctttgtcccagtagattgtacctttcctattcaggtaaatggaagggaacaatgatcacttaaacaaacgtttacttaataggcatttgctggttacctaccatgagaagaagcatacagcagtggttaagaatatcaacctagaaggcagaccttgccccttccctgcagtgtgaatttgagaaggtactaatcctcactgaaccttagttttccacatatgtaaaataaggatggtgataatgggacccgtgtcttagggttcctgcaaggatgaaatgaattaatacatgcag

SEQ ID NO: 1242362 - DNA, 4001 bp, Homo sapiens
agctcaggcaatccacctgcctcagcctcccaaagtgctaggattacagacgtgagccactgcgcccagcctgtgcttacagttttattgttacaatagtcacaaatgaagctttaaaattgtactggccaattatttatgttcttgtatgaaaaatcgggttatgtacagatgtttgattattatattttctttcctttgttttttgaatagaaacaactttaatagaaacacctttgaactattttgtgttcagaataacccatggaaaatgagagaatacaatttcatataaaaatatttataatatacagaattttttttacttttgtaataaatcatgttgatatgtacttttatcaaagaaatgaagtaatagctccttgtggaaagattagctgttaagaagctgaatttcaaaagataaatccaattttcccctctatttgatagtttttgtgattcaaaacaatgttctctaaaaatagctaggaaaactgagaaagaaaagctacaggggaagacaggtccaagcaggcatttaaaaatactataatgcctccataattaaaatagtatgacacacatgaattaggtaaacagactagtagaatggaatacatatggaaattcactctacagaaaaggtggaatcaaaaataactggggcaaagataaactttataacaagttatgctgaggcaacttgttagctataaggaaaaagataaaattagatccgtaccacacactatatgtaagaataaactacaaatggatcagaggaccaaatgtaaaaaagataaagatttaaaacattctttaaagaaaattttaaataaaataaaatgtaaacataaatttaagagaataaaacaggtgaattcttgtttagcttgaaacatcttgtgtaaagatgttctcaaagaatggaaacatgattagaacatgtaaggaacaggagccaagttaaagggtctcccatttgaaaaattgagaagaatttaagcatcaaaatagagtaactgtaccccattaaataccataagaagccatgagtccacacaaactgaaaatataaatacatacataaatacatacatacataaaaataaagaggagatggtaaagctcttccttatattagaaggctaacaaatgcagaaggaatgatggagttgttaacaaatcaccactttgcaaccaccagaggtataacataagccaaggattatcaatagaagctaaaaagtagtgagtgtactgtttcaacaaaaacaggatatttacatagtttcaaactatcttaccacaaattactcattagttacataggaaaaaattagttactttacagtagagaaatttggcagacaacacttaaagcaattgattaaattaacgagacagttatcacgaacctcctctgataactgaaaaggacacatcatttctatagaattcctactaaaaacacctacctgaatctagtcatgaaaagataccagacaaacctaactgtgaggaatattctacaagctctcagaaaatttcaaagtgaggtatgccaacctcctgtcttctgtatctctatccaatcttcaacatcctcaaaacagtggcttcacactgcctctagccattaaagggagggtagagatgattttttttcttgttcaaataataataatgagaactaaagaaatatcttctattttctaaagtattacattaaattgcacctaattatggtaaatatgatttttaaaaaacctccttttatttttataagaatttaataaaagaaaaaacctaaatgtattagtccattttcatactgcttataaagaactgtctgaaaccaggtaatttataaaggaaagggctctaattgactcacagttcagcatggctggggaggcctcaggaaacttgcaatcatggtggaaggagaagggcaagcaaggcgccttctttacaaggcagcaggaaggagaagtaccgagcttaggggaaagagccccttataaaaccatcacatttcatgagaactcactcactgtcacgagaacagcatgggggaaaccacccccatgatccaattacctccacttggtctctcccttgacacgtggggattatggggattataattcaaggtgagatttgggtggggagacaaagcctaaacatatcactaaatctcttatcactttaacaacccctaatctgctggtcataataacacaataaacccaatttcaaatttcactattatctgaaaaagcaaaactaacaataaggcttttataaaaccatgtgtgtataaaagcaacaaaaaagtatttcttatttaacatactaatcagccctagaagtctaattgcaaacagttttcagtctatctctttaggactaaatacaccctccttatttacaacaaaaatgaaactaattttttaaatacataccatcatcatctttgctttctagtggaacactccaagctattaggtttcttgctgtacgaccctcctctgcaactattctccttactttgtcatgactattggagcgctggaatgaagcctatgtatggaaaagatggtacttattagattattagataagtcaaaatatatatttaacaaagtcattatttctcacatttttctcagaaagaaaacacttaaaactaatttgggatgtggtgggtggttaaacagagaaaaggaagtcacaagtcttttttagatctaaaaacactgagttttgtaactctaaaaaataaacaaattatttaaataataaatataatctaaggtttgaaaaagtggcctaaagagcaccaacactgctgtggactaatatctgcaccatcccttacatatcaacaagtccaagtgtgaaagagaccagttttcacaaacatcctatatatttcccctaaaagacctcttcagcataaaatattttggaaaacgctttttttaattctctagagattgcgctaaagtaagtcaacattccatttttagctacataattttatctccaagttatcaggattcaaataataattgctgttaacaggtaaatttaaattgcaatttttaaaactcaaactattgcacagaacatacgtaatttcttgcttgctctagccctgcctggcctaagaacacgggcctaagattcagccccaccaacaccctgtgccagctgggagccaggtccagtaaaataaaggaaattgcctccccactaatgaatgtcatatcaaaatagtctgtttttataagccaagtatctatgagaagaaagagatcataaaacacccatgtgaacacgaggatgcagcctccttatctaatccttaaatctgtgtgggaaacctgcctctttgtgaaacaagttcaccactgggccagcccaaaatcccagtccaattagtaggtgcctccctgccctcctatagttcttgccagcctggacttttagcattcctggaatcctaaagcgcaatacatttaacgaggcaattactatgtgcaaaagcatcaagtaagagactgaggagaatataaagaaaaatataaatatataaagtattgtgcttgtcctcaaagagctaacaatccaagtaaatgaagcaaacatgtaagagtaaaaaataatatatgaattaacaagtatggtaggtagtcttcaaagatgcctcccttggccccagaaaaccacacctgctggtgttcatgccctcatgtaatccactccccgtgaatatgcctctgtaacttgctttctgaccaataaaatgcggcagaagggacactgcataacttctgagactaggtcatcagaagctttgcagcctccacctgagtctcttagaatgctccctcttagggcagtcactcttaaaatccagctgtcatgccatgagaagcccaagccacaagtagagagaccacacatgggcagcactctggttgacaggc

SEQ ID NO: 1242363 - DNA, 4001 bp, Homo sapiens
tgttatttgtattagcacaatttaaaaaaattaatgttacccacaagggaagaagaggaagaagagagaagaaagctgaatttctctaaatgaacactgttttatagtttgaattttgaaccatgtaaatgctgcatatgctattaaattaaaattaaatcaaaggaaaaagaattccctaaaaatcaaaaagaagctgaggacagtggaatctcttttgtcaagatactaagaaagaccaggcatagtagctcatgcctgtaatcccagccctgtggaagaaggccaaagcaggaggatcacttgaggtcaggagttcaagatcacctgggcaacaaagcaagaccctatcgctacaaaaaaattaaaaataaaaaactggcatgcacctatagttccaagctacttaggaggctgaggtgggaggactgcttgagcccaggtgataaaaactgcagtgagctatgattgtgccgctgcactccagactgggtgacagagagactctgtctccagaagaaaaaaaaaaagatattaagagaaaaaaaatctgtcaacctagacttctatcccctctaagaccatttttcaaaattagggcagattaaaaaaaaagaaatcttctggcaaacaaaagcatagtttatgaccaaaagacccaaaagcagaccaacagaaaataaccccaaatgacagatatgaaaaatcaaaaccttagaactgaggaagagtatgaagtgggagggatgaaataagagcatacaacaaatagatgctctcctgctctttctttttttcttttatttgagacggagtctcgctctatagcccaggttggagtgcagtggcacgatcttggctcactgaaagctccgcctcccgggttcatgccattctcctgcctcagcctcctgagtagctgggactacaggcgcccaccaccacgccaggctaattttttgtatttttagcagagacggggtttcaccgtgttagccaggatggtctcggtctcctgaccttgtgatccgcccgtctaggcctcccaaagtgctgggattacaggcgtgagccaccgtgcccggccctctcctgctctttcaaccagaagaaggggctctgccctgagcgccacacttcagaaggttgtacctatcaaaaataccaaaatccaaaaggaatcagtaactaattgagtaaacacaaattaagagagagggactcacaaactaaacttagggtccccccaggccagacaataagagagaaggaagaaggcaaatcagcatcagtgctggaaaaaacagagcaagaatatgtgcttttgattaaggttggtcaccccaactatcccaaaggaattatcgaggcagactggactccatgtatacctccattcctttctcctcctcaatttgagtagtttaagaagatgtttggaattgcctgaaaaatcttgagttagaaaagtaaagtgtgggagacagaaacctgttttccctggctctctggggaatttcacatcggtccccataccagattcaagacctactctagcccaacttctaccctacctagcccagggagagtaggttcctttaagacttggctagaccctgggtaggaggccaggtcaggctgttagcatccattgatttgtaactatttaatattaagaaattttaaaagctggcttccacttgtattcctaacctaggtaccataagtgttagaggcaagcctgaggagcagcagggttcctgggctctaaggttgaatagtacattcatagctgctcactttatcactgtgctttatgacaatgtgttccatagggtatcttgaatgaaacaactattacattaaaaaagataaaagaaaggaagaaaagagaaaggcaaaaaaactaaggctagtctttaagatatcacttaccatcattctttaaattctcttctatgccaagatcatttatcacataaacccatggagtatgactcctacaataaaaaatatatatacgcttagttataacattaccagaaaaccataattattcataaaaagatacaaatctcatccccacacttacattaaacaacaacaaaaaaaactgctcctttatattacctgttggggtataatatagcatgctttaaatattccatgctgaacaagacctcagtgctctccaaaaaataaaaataaaatggaaaagaaacagtattaattacatggacatcctaacccagaggggttccaaactttcttactacaacccataaacacatacatgttttatatcttacccagttcatacacgtttaactgaattaaaaattttgtaaagtaacagatgtactctaatatttccttctgtattctatttcagtttttaaatgctgctttcactgaactgactcactaatgagtctgaactcagtatagaaaatcctgtgtaactttccttaagaatgttcataaactaagattttatcagaatatcttaattaacaattacataaggctgtaagtacaacagcccgtacctttcaggtaacctatttaatgtggccacacttttactcaaagaaatccaagtcagggaaactagacagaacacagggactgggaaattgcttaacaaacaacaacaacaacaacaaaaatgacctaactctgtatgaagagtcagtgaacaaagaaaagaaagcagcaaatggaaccaaacctccttctggaagaaaatctagatcatttatcctttgtcaataaatatgctcctttaaaatgcagtaccagtaaacatatgtccggataaaaatttatatgcaaatgttcacagcagcattattcataacagctaaaaagtagaaacaacccaaatacctatcaactgatgaatggataaataaaatgtatattcacacaatgaataaaaggacataaaaatggatagaccaaaaaaaaggaagaaagtgctaatatatgctacaatatggatgaaatttaaaaacatcatgctaagtgaaagaagccagttataaaagaacacatattgtatgattccacatacgtgaaatgtccagaacagtcaaatccatagtgtcagaaaacagaggttgctgaaggctgcggggttaggagaaaatgagagtaactgctaataagcacacggtttctttagggggtgatgaaaatgttctaaaattaattatggtgatggctgcaaaactctgtgaatatactaaaaaccatttttaaatggggaaattatattgtaaatgaatcatttatcagtaaagctattatatttttttaaatgtactacctctgctcacaaacctccaacctctctccatctcactcggaggaaaagccaaagtcctcacagtaggttatcatgtccaaaattttccaattccatacaccccttctccccagcattcactgtactccaatcacactggcctccttatgcttcccagcatgccagacatattctagcattagggctttatacctgttggacctcccatgtggaacactcccaattcactttgcacaaatgtcactctcaatgaggccttcccatataacattcattcattcattcactcattttgagacagggtctggctctgtcgcccagactggagtgcaatggtgcaatcttggttcactgcaacctctgcctccctgactcaagccatcttcccacctcagcctcctgagtagctgggactacaggtgcacaccatcatgtctgggtaacttttgtattttttggcagagacggagtttcaccacattgcccaggctggtctcgaactattgggctcaagcaatccacccacctcagcctcccaaagtgctggggttaaaggcatgtgccaccatgcacacctggccctatttaaaatcataaccctaccaaacaaagaaaagctatgggagttcatcccaccttacaaaaaggctaaaagaagttcttcaagttg

SEQ ID NO: 1242364 - DNA, 4001 bp, Homo sapiens
ccacattcaacttattatcaagtggggagcttcttatagattgtctttctttctcaattttttccttttctgttattgcctttagcaggttcaagttatcaacaaaagaatagttgctctgacctggcttgttttctggaagaatagccccaaacccaacacagccattttagttcagattctcatagcctacattatttaaattaacatcaatatgatttctttttacctggaggatatgtttttttaatcttgtcttcttctgcttcagcaatctgtgaagcaaacaggagatagacttggtttaaaatcattgctccactacttaccaagtacaagagccaaatgatttaatctccatgggatttaattgtcttgtttgtaaaatgtggataattcctatttcagagcactgttataataattaaatgagataaaattaagggtagatgctcagtcagtgttaatttctttctcctataatattgttgaaagagaaatctctggtaaattaggcaatcttacaacagagtggatgtgatgctgagcttactgggttattatatagttactctatgtattcattatacagaactcaatgtaaataactgctagggcatagaatttaccaaaactagatttcccgtcctaatttctgtcaattaactattaagttcctgatgtttgtaaattcaaaatgaccaaaatgtcacagcataattacattaaataataataactaaatcaaaatgaaatagcattcataatgttacttttgacctacctgttcattcaaaggtctttctgcacttaattctctattatgtagagatttgtctagaataaacacatgtgaatataaatttaattgtgcgttgaaggacaaaatatgcctcttattaaataaaatttttataaaaaggaaaaatattaggagaaataattttggatgactatgaaacaaatgcatattaacaaagattatcaagattatacaataatagtaattatcaatattgccttgtttattatcttggtgtatttcttgagctgacagaatcacacttttttttttttctgaccagaaatttaacatatagttctaacactagggttatcagctattctcagctagagagagcataatttggattggtattattggcacactaaaagctctttcatcatatactgcatatataatgaatagactgtctgagaaaggttgtaaggcaactagaaaacaatccaagccactttaggtgaaaaaggttcccttcccttttcaaaataagatctttaaaaacaacccatattattgctctatcattttaaaagtgaagaaaaaaaatctgtcttctgtctctaaattcgaactgatttctctgtccgtattcatggatatgatttgatcagaaaacgcgtcagggtgatttacagctcacgtattatgccaaactttaccttttcgtggcgaaataaaaggaaggtaggaagaagaaaagtgttcacataccttggcttcctccaggtttggggaaagcttgaatcgggagcactaacaccagaatccaagtgccggtcccgaggaaccccattcttccacgctcggcttgggtcacagcccggcgctgggctcctggagctgtagcttttgttatgaatgaaaaggaggagtaaaaacaggaagagccaggagggtgggtgtggggcgggagaggggccgggactgggcggctgcaggatctctgacactcgacggtcaagggataagcagggttggggcgcgcgggagtcaagtctccaggtagaggggagcgctgtccgccctgtgggtgctgaagttcctgtgacgcggagactgcgcgccagggcgtagctttactctcgctccctcctgcagaggaagtgaggaaggaagcgcatgctccatgcacgccagaggcgggaggggatggcgtcggtgactccaacgctactccaatcccccgggaatggaacaaaggaggggcgaccggccagctggtgtattttctgtgctgcagtcctagggtgctcctgggctcagggtcagctggcttgtcctaagcgtgacagaattgtcccaacctctcaagtaaatgttacttcaagggccaaatgccttctctgcctgtgcacctgtcaaggagatttagataaccttgtgcgaggagttctgcttcgggattcttcttttgggatatctgctccagaatcccttccttccattcacctcctgtacccaaaaggtagatataattataatctctttagaaaagccctgccttttgtggtctgtgttgacgtatcaagcatccctcagctctaccgaggcttttgaattgggaaattcaaggaacagtcttccaaatagtcagattgctgcaatacactctcactctctgatgctgaaacacaacaacaacagaaacagtcctgagtagacgagcagcaatggcaaattctcctttccccaccaagtggaacctcccccactttacacacacacaccacacaactaaattagaaaaaagaagctgcatttctgtaaaatcttgcccagaatttaattatgcccaaagacctggctgttccagggggtccttcaagagaggggatagtcatgaaaagcatttttcatctttactaagtcagggaggtgcttcctatgttctgagaatattcccagaagcctaaggttattgtatacaaggaactatcaaaagactttaaatgatgaaaacaagcaacattaatgtgagcaggatgctgagtaagctctttagtctctgatttttaaacagaacttggaccttttcctctggactgcggcatgctgggaaccagtctgaataatgaccaaagagaaggattcagcacaatcaggcctttgatttctgcaccctccttttcaaggaggaagttattcaagtacctaaaaacaaacaaacaaccaagctgacaaacaaatctcccttgctccggaggtttttgagtttggaagtcactcaaatacttcctttgaggatctaaagagtattctaaatctaacagctccttcaaaacaaaaaactctttattggcagtaataacatagcattattatcccagtatactgcattaaaaaattaagtcatattttaaaatcccagctgaatgaagggtatatttccttagtttccttttctttatgatggaaatgacaggctctgtttacctcacactgttattatgaagatcaaatgggtacatgttttgaactagtcattttgataccaagaatattttgatacagcctaagaaaataagtcatgaaacgttttcagcttttatgaaacattacccaacgctatctgaaatagccattcactgatcctgagactcactgacctaatccctcagcttcactttgtcctttgtcccattcctgactcatttatctcctcaatacatgtttgcaattgggagagattcaggatgggatgaaggtcagggatgtctgttgagtacattgcattgcttgcccaaaagaaaaagggtattttgtctctttctgccatttggacttaaagtgattatgttaaatggacactaaatctaggatcatgttatgtttctgatcaaatgagtggtggagcattgagtaaaacataggcatgaattagtttacattattcagccttatggatgataccactggacttagtataggtctgtgaatggagtaatcctaaattgtatttattcatcaattcacttaacaggtgtttattgagcatctgaaatgtaccaggtattgagatagttgctgggtgtacaaagacaagtaagacactagtcactgctagtcctatagcctagtagagagaaaatattgtgaatataacaacaactatttggtgaacaggtttcacatgcaacacactattcttattgaaatataagtgaatgaataagtacaagagagtgttatgtgtcct

SEQ ID NO: 1242365 - DNA, 4001 bp, Homo sapiens
gcaaatgctggagtccatccagatgccagccaaaacagtaggccagatagcatggtagagaccatcctggagaccattgtcaacctgcagataaaagaccaaatgtatactgataggctacaatcggcaattgtgataatacaattataatgatgcaaccactccaggttgtggttcgaggaccacccagaaaggggttgtaacaaagaatccttaggaggttgcttttgtcttaagtttccatgctaggcagagcatcattgcagaaaggtattaaacaaaacagttgcaggtatccaattccctctgtttgcattcttgagaaagctaggctggaatggcggttctcactcataatttttatcctccttgtagctccctgaaagttctgcattactcctaacttcatcactctctccctctcttactaaaacaaataaaccaaacttgcttacattttgagaaagagatagtggcatcttgggttttcccagtctctgggaataaaagtctaacaggagggagtcaggaagacacaaatcaagaagctcaggaaggttgggagtggtggcagggaaacatttcagtttagcaaacatccaatacgtttgcgatcctgaaaggaaggaaaatgttccttagatccagccctgcaatctgctggggtagtttgaggtttgtttgctcagccacatgctgagtgatcgtaggcaagtccctcagtttcctcctctgcaaaacggagataattaaagcatttaccttttagggttgttgtgagggtgtgtgcaaatacatgttaagagtgtttaggacaatgccaggcacagaatgagcccctatattgctattattatgttgctaacattgccttaacagttctggaggttagaatatggggaggcagtggtggtgagagggagttaactagcctgggggtgggagggtcaacctgtccaaaatgttggtttctatgggtatgtctgcaaaacaagtgaacattatccttgcagcttaccccacagctgcttaacgtgtttggatgcatgcttcaggcagcggccttgcaaaccctttttttttttttttttttttttttttgagacggagtttcactcttgttgcccaggctggagtgcagtggcgccatctcgactcactgcaacctccacctcccaggttcaagtgattctcctgcctcagcctcccgagtagctggaattacaggcgcccacaaccaaacccggctaatttttgtatttttaatagaggcagggtttcaccatattggtcaggctggtctcgaactcctgacctcaggtgatccaccccctcccctcagcctcccaaagcgctaggattacaggcgtgagccaccaggaccggcgcaaaccctccttctaatcattcttctactgaggatgggggatggagaggtgggaggaggcaaaatcgtgcatttcctttactgaaacaaaaatttttataccctccaatttctttttctgcaaagaaaaggccttttctagccactagatataaaaccttgctctccaaagagctgagagtagctgtttaacagcaaaatctgcaattctgatggaaaaggctggaggcagacacgaggctctccatctccatctttcccttgtccactctgaatgcaggatgtcatcccagcaaacgccgctctgatttgatgaactacacaatctcctccctcagtactcccttccccttactgatagccaaacattctaatcccctacgcatccttcgtctgaccccagcctccacctcaaggattttagcaggacgccctcccacaactggcaataccaaatctcgggttggcggcaggcggccgagccgacatcaaaactgtactcaccgaggggcagcccgaggagcctactgcggtatgggccttggtgggggtcaggccaggaacgggcgaactggagagctagtgcgtcaccctcctccgcatcttagctccgccccggcccctcctccagcaggtggaagctgcctcgccaggactccccagactgcatcccagataagtgtgcctctcaccaggagccgcacagctcttcaacccccacattctgcatacaaacctcttgactatgacatttcctagagaccctcttcagctccatcgacctccatgtaagtcattcacctcctcagtctcaattacaacgtgccagatcaccactacagcacacctttaattttgtcaacttctagaatatgttttttgtttttgtgtctaaagcctttcagcttcaagagggaagaggcaatgaatggtagagagacaaaagatgaagtcctaagaacttttaatggtggctatgataaggtataccctgctctgaggggcctcttactaatcaggaaaactatggggatatttaatacaagaagccagaaacttccattaaagtgataaacttgaaaatctgtagaaatatcagctctgagtgttatttctaaacgtccacacaaaccatcaagtaaaattccactttggcctgaagagaaaccatactcccagcatactgtagaagtatgtccaggtagtcccagattcttaaataagggtttatggagcacctactatgtgcaatcttgaacactgaaatttgttcaaatactaaaatcaaaatgtaaagccatacaataaatatggcactacaaatttgatcaagatggaggatgagtaaagaacctgggggtctcaaaacaagtaacctgatgaggttagaatccagatctatttatcttagctctagagagcaaatccattatcatctacagcaatttttatgcaataaatagaggctggcaaaattcatttatgagacacatggcctttcattttgaagccaagcctctttcccagtactttttctttcacggatgctcatctgcttcttgcttcttgtttcaatgcatgctaaatcaacaggacaaacactatccattaaatggctctaggctcactggccatgctggagttagtatttattattgatgcacagagacttttttcaattctgagttttactttagctttgttcattgttatcttcattttgtggttgaaaaaaatgaagtcactacaatttactgcttttgtgttaaatttaactgaaatagatcaaaatgcctatgcttcatttgaaatttggtgtttcaaaaataaaacttcatatatatttaagagatcacagaggttaggtgcagtggctcacgcccataatcccaacactttgggaggccaaggtgggaggatcacaaggtcaggagttcgagatcagcctggccaatatggtgaaatcccgtatctactaaaactacaaaaattagctgggcgtggtggtgcatgcctgtagtcccaactacttgggaggctgaggcagaagaatcgcttgaactcgggagatggaggttgcggtgagctgagattgtgccactgcactccagcctggacgacagagtgagactccgcctcaaaaaaaaaaaaaaaaaaaaaagaaaagaaaacaaaaaacaaactaactaaaaaagatcacaaaattaaggtttaaattctgccacaattaagaaaaacatgactattaaaatcctacattaagttcttagtgatcatattatagaatgtggccatgcagtctactaagttctatgtattaagttgttattagataaccaaattaatattagatctttatttacatttataagacagtgagaagaacccatgaggttactgcacgtccagacactttcatatcatttcctcaaatattccatgaagttagcaacattatctctattttgtataagaaaaaataaaaacgcattaaatcaagtttaaaacaaaacttttctggctctctagttaccctaccttcaagctagtcaccttcacattcctgtaatactccgtatagcagctttcagctaacaaaaataggagtcacatg

SEQ ID NO: 1242366 - DNA, 4001 bp, Homo sapiens
acatagtgaatgcaactaatgtcagtgaagtatacacgtaaaaacggttgaaatggaatattttatgttgcatatctttttacaacaataaaagtaaacataggcacagacaggttaagtaatctgctcaaagtcacacagccagtaagtagcagagctacttcaaacctctgaaatctagctttagagtccatattcttaacttctatactgtattgcttctcacaaagtctcattttcttcatgtttaataagaacaacgttacctaccttacaggtgtataaagtgcttcacacatggcaagagctcaaaaaagttattgttttgccttagtccttttctacacatttaggctccttgaaggccgagtctttcttaactatctttgcatttctctcattgtacctagcatagagtacaataaatatcagactcaaaataaatactttcctcagagaaatatctgtggcatctagaaatccaaatatggattaaaaaaagacaacactatacaagtaaaaatttgaagtgttgtcataaagacataaagtaacgtttgcgcaatttttatagaatgctcaattctgactgacagaattgacactgagctagctaaggcctgaaggggagtaaggaaaggttgtgtatctacttccctaagtggcagttataagtacaaaaaatgcaagtccaaggaaaaaaaatccttaatggtgacatcaggataatcataacagtaaaatactgtttaaaacaaaaaaaaagtccgatgcagcaaaactaggctctacagacacactaggcgcaaaagataaaacagaacaaccttttctaaggactaaataattacaacaatattctcagtactatttggcatacgatctagaagatcaaagtaaagtgtaaggacaaaatcaggagacctacatttccagatccccgtggcactgatattggactgtaaaaccatagattccgagggctgccgccttagtgctaagcggacgcaagggcaagtagtgtaactgttccaactcggagcccagagtggtccaagtcaaagtcggtgcagcccgctacggttcagctctactaaagggttgcaaggagctgaaagcagcaaaacggtttttgtggggcctccaatcgccttcctgagcgccccagaaaccggctaaacctcgtctctcccgaaaccacctggagtcgctccgactggagaaatcaagagtccgccgccttaaaatgactaaaacaataagcaaccccaactcccacttcaagcgcgtacggtttccatttgctcccctgcctcagtgggaggaatggaacgtgaagacaccgcttcccgccccgcccccggtaggccctgaatcagttcggggttaaaaataatgaggcggacaaggcggcctctggccacagtctccaaagaaagcgaatgacccgggtatcagaccagctcagaccctcacaccagaaccctggggtccgccgggccccgcagcagcagcctcgaagggacaagaagagccaggagaaaaagaggacggacaagctcacctgccgcttgttcatccgccgcacatcgtccaaaaagtctagagacagcatggcggggacggcgagcaggacaccggcaggggaaagggcgcgatgaccagcgggcggaactactggagctcgggtcgggctcacactggacaggaccccgcagtgcttgcacttccgcttccggggcgggagctggcacggtcgggcacggtccccgccccccgcgccccttcgctgcggagagctgacagagagactcacgaccttgctagtccagtctcagggcttggcctcgccgtgggagggttctcacgctctggctctcgcctgccaaaaaccgactggacgccacttcccgcgctcggccccgcggcccttcaccgaggcggcgacccaggcttagttggggaggctgctctgccaccttcggaaggcgggcctctgtgcccgcccggccaatcgcgagcaacctctccggtgtgggcgggtagaagcggttccgcgtcccggcttgggtatgggtgtggcagtggatgtgtcgtctgaccgtaggttctctggtcgagcaagtctcctgcgctatgggaagctgaggaggtgctttctttctttctgtctctgtctctctttctttacgtctctgtctctgttgaggtgcttgcttgcttgcttgcttactttctgtctgtctgtctctttctctttttctttctctttctctctttcctttctttctcactgtgtcgcccaggctggagtgcagtggcgcaatctcagctcactgcaacctccgcctcgcgggttcaggcgattctcctgcctcaggctcccaagtagctgggactacaggcgcgcgccaccaaacctggctaatttttgtatttttagtagagacagggtttcactatgttggccaggctggtctcgaactcttgagctcaggtgatccgcccgccttggcgtcccaaagtgctgggattacagtcgtgagccaccgcgcccggccatcgaggtgctttcaataagtgcttttcgcgtaaggttggaccgtgtgagagaccttccgagcactgcctgagcctgccaggagtttacagtccaattggagagaaaacagcccgggagaattagaaaacatccaaatggtgcaacagcgtgatgagaccaccagtggtgtgggtcgttaggaagtggcttcctttctgaccttgactttgctgacaggatttgacatggtctccttgaattctacctcctggttttcttaacttggacaccttgaagtgactatcttttcgctaccttttgctttgactggccaaagctcctaatacgcacttcagtcaacaaagactaaagctggattacttggtatcatttctctctcttttttttttttttttttttttttcaaaataatccttctctcccattagggaaagatgaatgaaggatatactggaactctttgtagtatcctcgaaattctttaaatggaaagtcattccaaaataaaaacttgaatttattggaggatggctgtaataaaaaagacaaataataataagtttaggggaagatgtgaagaaattggaaccctcatatactgctggtgggaatgtaaaatggtgcagccactttgggaaatagctgcagttgctcaaaaggttaaagatgtgccgtctgcagtggctcatgcctgtaatcccagcactttgggaggctgaggcaggcagatcacctgaggtcaggagttccagactagcctggccaacatggtgaaaacccgtctttactaaagatacaaaaattaggcgggtgtggtggtgggcacctgtaatctcagctactggggaggctgaggcaggagaatcgcttgaacccaggaggcagagtttgcggtgagccgagatcgtgccactgcactccaacctgggcgacaaagtgagaccctatctcaaaacacacaaacaaaaaaaggttaaagatggaatcaccatattaaccagcaattccactgctaggtatatacccaagaaaattgaaaacgtttgtccacacaaaaacttgtacatgaatgttcacagcagcattattcataatagctaaaaagtggaaataactgaaatgtttatcaactaatgaagggataaataaatgtggtatattggaataatgtactaataattccgctggtacaatggaatattaatctggcaacaaaaggaaatactacaacatgaatgacccttgaaacagatttagtgaaaggatccagtcacaaaagacaaagcattgcatgattccatttaggtgaaatatctagaatagacaaatccacagagatggaaatcagtggttgcctagggctgggagagttggggaaaatggggagtggctgctaatgggtatggagtttcttttaggggatgctagttctacaact

SEQ ID NO: 1242367 - DNA, 4001 bp, Homo sapiens
aattattctttcatttagggttaggctggggaagaggcaagaagtactggaagaaaaaaaagtcaacagaaaaccttcttccatgtttttttcctagttcttaaatttctacaaggttttaataggtcgtggactttggaaagatgtggaaaggggaaaaggctctctagtttaaataatttgctcacagcacttgctgctaggataatcacaaacagctatgctaaaaattaccatctaaatagttaattatatttcctctaggatgaaaggaactctaagtatacataaggtagcattactggttttagtcctggcatcctagtgaaggaacaaaatgttgaaccctttcattagtaacacacatacaaggaaatgattcaaggaaaattcgtattcatttgtcaggctttgaaatctcaggtatttatgatagataccttcaaaaatgtttttaaattaaactagatacaggctgtatacagaatacttctgggtcacataaatgcctaagtgtatttgccaagagactctgtatcaatttctctttggtaattccatgtattgttttataaaactcatttgtgtcttcagagttacattcacataaagcttttttttaaaaaaaaaagtcttctgtaaaaacaagtatacacaactaggaagctgtgctttgcctgctaagagtccgatttcaaaatacaaaccggcttcaactacatatagacacatacaggaatttgggaaatcttatctcattaattcaggtgctaattatccaactgtaaaattaataggcagaaattactagcctctcttcttccgtcatctagtcatcaatgggcaaggccttcgaagaagggaatagagagtgaataaacttggacttcaaattaagtcgtttcgcagagatcttaagagtggaaaatactgggggggaaactattgttttcgattacttttaacactgttatcatccctgcctgctaccacctactagcatgcataatcaggaatttgatgcaaataaaaataaaacagaacactaataggactactttgcgaatatgaaaacgggttcgaaaataagcttatgctttacacccttaaaatagagctagctttaaaaaaaaacccactaattacaattctttgcaaaataactggataaaaggacaaggggaaatcgtagtatcgtttcttaaaagaaacacctccgtaaaaccactgcaaaaacaatgcttcgctccattgaacacagacctaaaaggcccgtgacttcccttcatctgtagttaccacacattctcttacagtctttctgggtgagaagccttcaaacgcctttccaccttgaaaacacattccagagctgaagggaatgggggaagcggggagactactagaagttataagccctcctcccaggagagcagggacaacttggagccttctgaccccttcaccaagcaggggagaagcggcaacggcgagccctccgcctgggaagtaatcagggttggaaaagcccccaagtcccaggcagcagctggaacaatgaaggagagctgggagctgccaggctcccaggtgagggggtctgcggccgcaggaccggcccccggtccccacgttcggagaactgggcctggcctgtgaggaagcggcgaccccaacccccggctcggcgggcccagcccaaacccgcgtacctgctccgtgggggctcggtccatggtgcctgcagccgcaacgggcccgcgctagtcggtgtaaacagcgcctcgggccgctttctccatggccccccgctcgggtccagactgggttccggacctccgcccctatctggctggccgcgacaccgattcggctacgccactggccgaggaggcggctccagctccgggagatggaggaggcggtggcagcttcggggagggatcatctgggacggaagccgaggagggcccgaatgggctggaggcgtagttagaaatggaggcgcacggaaggaaaaggagtggggaggaggcagagaggggcagtgggcggagtgacagcaaatggcctcagcaagggtaggaggaacccggcctggcctggaggctaaggccaggtggaggcgcccaggagcaggtgccccgaaccacacgccacccctgcgactgttaaacgagaagtgtcagaccacttgggacccaggtctcccgggacttcaaagacctcttcaggatctgaaaccacctcttagtgatgttggaaaagctttcatctgcccaccgtacatctgctccttccttatgttacgcaaataaagggagtcatgactataaaggaatgagaatattctgaaaataatggagtcttgccctagaaaaatgcatatgtaaaacgcatacacagaatgactggaagaggcccgctaggaagctccccacaaatatttattgagagttaattcattatccaggttcatgcccacttctaggctcacatccaggctgacctcgcccatctcagaaatcctaattttatgcaggatctgtataacaccacccaacgggtaattattttatcttcagatccttagctccttaagggcagagactgtcttgaaactgggcactaccgttagcatggcaaatttcttctgggcatctcctcagacacaccctccaacacccacaccctctgtgaagattcaaccaactgcggatagaaatattttgaggaaaaaagaaatatcaagtacaacaataaaatacaagtaatacagtttaacaactgcttatacagcatttacattgtattaggtattataagtaatctagagatgatttaaagtatatcggaggatatgcatggattgtatgcaaatactacaccattttatataaggatctttagcactcatggattttggtatcagcagggatcctggagccaatatcccccctgggatacttagggacaactgtataagctaaattacacttaagtgaaggtagagttgaggtggctgctgtttggggcactggtgtggagatccacagctaggaatgggaaagagattttaagaaatttgctttgtcatgcttcaggagatatcagtaaagactaattgccttttcagttagtctaggttattagtctggttattagactccaatatgaggcttgttatgtgaaggccccttgctgtacttatgttgatacaggttgggtatctctaatggaaactatgaaattccaaaccctcttgaatcccaaatgttccaaaattagaaactttctgagcacagacatgacatttaaggataatgttcgctggaacatttcagattttggacttccagtttagagatgctcaaccagtaagtataatgcaaatcttccaaaatccaaaatctgaaacacttatggtttcaagtatgtcaaaataagggacattcaacctgtattatatattggcctgctgaaaggagctatattgtgtcagcaagacttatatcaaggctggcaatagaaacatcttgaaaggagaaacatttatatttacacatttatatttacatttaaatatatttatttaattttagtaaattttctgccacctcaaatttaatatcaatgcatgtgtatttgaactgcaaatttatgtaacatttgtaaatatatgtgcaattaacgtaatgttaggtccctggtgcctatcacacacctagctgggattcagtgaatgctgaatgaatttagggttggttgctcagaaaaactaagttatttataaggagtagttatgtaaactaacagatgaccgtcctccttcacaattgaaagacaaaataactgaattttcagattgtcttcctactggtggtctatagccataatataccctcatctgagtaaaaagataatagcaatgcactcataaaaatactatagtacttttgcttttcttccttcttctgaggaatgatctgaggaaatttaaa

SEQ ID NO: 1242368 - DNA, 4001 bp, Homo sapiens
tgctctgtcgcccaggctggagtgcagtggtgcaatctcggctcactgcaagctccgcctcgcgggttcacaccattcttctgtctcagcctcgcgagtagctgggactacaggcgcccaccaccacgtctggctaattttttgtatttttagtagagacggggtttcactgtgttagccaggatggtcttgatctcctgacctctccgcccatctcggcctcccaaagtgctgggattacaggcgtgagccaccgtgcctggcctttatttttattattttattttttgtttgctttttgagatggagtttcactcttgttgtccaggctggaatgcaatcacaatctcggctggctcagggaacctccgcctcccagattcaagcgattctcctgcctcagcctcccaagtcgctgcgattacaggcatgcgccaccatgcccagctaattttgtgtttttactagagacgaggtttcaccacattgaccaggctggtttcaaactcctgagctcaggtgatccgcctgcctcgacctcccaaagtgctgggattacaggcgtgagccaccatgcctggccaatgtccccatatggagattacctgtcaccaacagtttgagccccaggtgcaaggagacatatcctagattttcctgagcttcagaaggtataatctccaaaaaggccaggcgtggtggctcaagcctataaaccaggcacattgggaggccaaagtgggcggatcacttgagctcaggagttggagaccagcctagccaacatggtgaaaccctgtctctactaaaaatacaaaaattagcttggcatggtggcacacgcctgtagtcccagctactcaggaggctgaggcagaagagtcacttgagccagggaggtggaggttgcggtgagccaagatcgcgctactgcactgtagcctggaggatagagcaagactccgtctcaaaaaaaaaaaaaaaaaaaaaaaaaaatcaccaaaagaaacggccatggcctgagttcaaatcctgaccttcccactaactcactgtcatcttgggaagcgatttaatctctctggcttcagttttccttatgaaaatgaggggggatgggccaaggtgatttctacatcttttccagttctaaggcattatggggaaaaaaactttttaaaagtttgtatgcttcccgcacaaaattttaaggcatttcaacctttagaggaatcctgtgtttaactcaaataacatacccatattacaggtgaggaaatgtgggcagagatttgatgaccttcccgagatgacccagggctccttcgcctttctgctagaccagaataactcccgagtagccgcaactgcagcttcatgcccagaacctcaacttccttctccttctagccttctccttctagcaccttggtgctcagtgagaagaaagaagccatgacaaagggcctaactcggaggtcatatccacgaccattccgcaggggcccaggccttttccgaattccaaatgacttccccccaggaccaggtcccgggtttaggagtaggggtggtgcactggcgcgatgtgaacgctgctcaaaggcccccggtggccatgggaacgcgggcccagcctcctgcgctgccatggcaacaggctccccgggcggcgggccccagtgcccatcagagcgtgcaggtggcgccttctggggagaggggccgggcgggaggtgcgggtgcaagggtgggggcagcggctgcgcggcggttttcgcctggtccgccacctcccgggcagcggctcccacctcgccaggcaccccccgcgcctacctggagtgagtcagggtcagcgcacggtcatcgccccccgcggggccgctcttcctggagtgtccactgactcgtcccccttgccaggccggcccggcgcagcccctggggacccggagtctcgggcgcacagcctcagtccggcgcggcgtccccggaaatgctgggcccccgccaagccccgcccagccccgccccgctctgcccgtgtttacgggaattgtccagagggcgcctccgggatttgcctgatgcgggccgtgccccccgccccaccaccgccaccggcccccggccatttgcaccaacgatggactcgatgccacgaccaccctggcctgtcgggtccgcctccccacgaccgctggtcggcccaagttagccgtggagcccaagggactgtgcggtccttcaccttgggagactcggcctcgctggacctgggccacagggggcggcctcactagctggagtctgggctggcccgggttgaaatcctagatccactcttacctaactggctgtgttacgtaggacgagttccttaacctctctgagcctggagtttttcatctgtaaagtgggcatcagaacactagagatctcacaaggctgtgatgggaaatgcaatggtggaggcacacacctggcacatggtcagctctcaagaatggtaatattgtttacagaaggaggcaagtgagagagaggagggcagatccacactctgtgaaaccacccacgtctccacccgagataaatgctgctcactgctcccttaacatgcagtgggcgggcgtgctcagagagtaaaacgaaacggagatctgcaggaggggtgaaagatagggttataaatatcccgcatttatgaggtgaccttggctcctccctctccactcttgcgtcccggtgctatcttccaggaaagcaacggcagctttcagggcggttactgaaacaaccagttctggacttgtaagtggctgagctggcctgaactgacgggtcaagggactgcagaaaccagaggccaagtggcagcccgttccagggccgggcaggcctggcctaagtgtacattgtccttctgcagcctctcctctccgggaattgctgcctagctcctccagaaaaagaaaaaagtggttacttttgttacctctctataaaagtaaacacatatttagtacaagaaagttagacaacagaaaaacacaattaaaaataatatcactcataatttcattttacctacacattggcatcaaccttgttaatttttttttttccgagacggagtcttgctctgtcacccaggctggagtgcagtggctcgatctcagctcactgcaacctctgcctcccgggttcaagcaattctcctgcctcagcctcccaagtagctgggattacaggtgtccgccactgcacctgactaatttttgtatttttagtagagacagggtttcacaatattggacaggctggtctcgaactcctgacctcgtgacccacccgccttggccccccaaagtgctgggattacaggcgtgagccaccacacccggccgtcagcgttaatattttttaaaactttttaaaaattaagattaatttgcatgtagtaaactgcacaaatcttaggtatactggtgttaatattttggtgaatatcttcctgtgtgtttcctatgcataattatacacttacatcttttagaaaaaagattattcaatacatactgttttctaacttttacttaggacagcattctattatgtttttcttttcttgtttttgagatggagtctctctcttgttgcacgggctggagtgcagcggtgcgatttcggctcactgtaacctccacctcccagattcaagcgattctcctgcctcagtctcccaagtaggtgggattacaggcacccaccaccacacccagataatttttgtatttttaatagagacggggtttcaccacgttggccaggctggtctcgaacttctgacctcaagtgatctgcctgccttgcctcccaaagtgctgggattacaggtgtgagccacagcacccggcctatatcgcatttttctataacattaaaaattcttgccgggtgcagtggctcacgcctgtaatcccaactctttagga

SEQ ID NO: 1242369 - DNA, 4001 bp, Homo sapiens
ccacaacagaagtagcaagacagcaggcctggggctggttacacctgttcatcctgacttcacaagctgaagcacccaaggggctacagtcaaactaacaccccaaccctgtcctaaccccaggcagaatcaccccagatctgggcaagatgtacagaagtaaactctgagctgagtaacactcattcagcggttcccgtaccaggccctgtcctaacgacttttcaaacacgagctgatttaatcctcactaccttgaggtaggttctgttattatacctgttttacagatgaagaaatcaagacccagaaactttaagtagcctgctcaaggtcacatggttactaagtggctgaggtagcatttgaacccaggtcatctgcagtatttcagacaggggttcaggtagggttacttgaagccgctagggccctgccttaatttaagtgctgattctactatttccctttgtaaacaggatgcttttagaggtggggatgctgtgaggagatggaagtctgggacagtttcagtctgtaacctctaattcatacatgctttattccaagtcatacaatatgacaaccaacaagttaaagggcttgcggatacatctgttgggcacttataaacttcatacccgagtaacacaccttgcaaggcacctacgactgcctattttgcagatgagaaaggtggggcactgggagcagaaggcacttacttgcccagtggaagaaatgggcttgggatccaggaccctctgaatctaaagcccaagtgccccaagaagagctggagaagcaaccggatggaagggaaaaggagagggaagggcggagggctgaaacaggaggtggccacagaagcagatgtgaggaccaggaaaggaacccagccaaccaggatgctactcccaggtcactctgaggaggggtcgcgcccaggacttgggaatgtcagcgcccagagctgcccccatccgcagtctgttcgctcccaggacttgggaatgtcagcgcccagagctgcccccatccgcagtctggtcgctcccagggcctggaggtctctccatgctggggcttggggctgcactggcaagccagggatggaggggcggagagggaggatcgggcgcctgcccgcccaccacagctcccggccctgctgcgacttgctgggaataccagaaccccagtgtttataggactgcaagcagtggcctccctctaccccgagccgccctcgggggcggcaccgcggtcggctctggtcagcatcaaagacaagtagatgggcaggcggaccccgccgaaagtgcatcctcctaagggaactaggggggacgacagagcgggctagaccccatccctacgcagaaagaaaactgaagaaaggggccagcggccccacagctcccctctcctctccctccctccgcgcagcgccttgaaaaaagaaggggtcctaatggatcccgtgcctccgacaggtcccctccttggtcctttgtcacggccacctccgcacgaggcacgtccccggcagccttccttcccccggcccgcgtccccgggtccccggcactcacccagaggcaggctgatccgggggctgagcgcccaggtcggaggcggcggctgcagcaggagcagcagcagcaggagcagcagcagcggtggccgaggcggcagcgcgccccatggggcggcgagccagctcctcaggcccatcgcggtgcgcagcattcggagagcaggagcgacggtgtcccgcggctcgggctcaggtggctcggccggactcacgggcggcagctccgccccgcggtccgcccccgagtcgccccgggggcccccgcctccggacctggggggcgggaggtgggaaacagggtcaagtgggccctggcaaactcagcccctccgcggggcaccgcagtcctcccgccggcgccggccccgcagcctcggcttgggcagagctcacccgcaagcggcggagggcggggctgaaggaggaagtcggccgtgagcccggccggcccgcccccttcccccttcctccttcccgggcgctggcagcgcgaggggcggcagctcggggcgctgccgcaggggccaagcccgggatcagtagccccggcggccgccggagcgctgggacgcggacgaaagccgacccccagctccccgcccccactgctcagaccctcccaccgccgcccaggccctggccccttccggctcctctgggaccctctgctagtggcgttggtttggggacacgctgcgtccccgctatgcgcctagggagttagggggcggatggtgattaggccttggtctcctccctttaggcgccccctccgctcttgctcctggcgacccccttgttcctgcgaccaaatgaactcggccgagctcgtgctgacactggggctagcagcttgagagtccaatttttgcacaggtcaatccactgcaagtcatggctgggcattcactacaagctcagcacttagtctaggcaccctgcgggcttgtccgcttaatattctgtccacgcgaagccctcgggtgggggaagggcaagattagcttaagtgggataataggatttaatgtactgctgaggaggtaaaaccttcacaacctgcacgtgacccggcaggggaagggaacccctaagactggagtggaagcccagaggcacccacccctaatcctcctggctcctaacatctccacgggtggagttcagctctgctgagaccaggggtttccaactgcagcctggaccattagcagattctgaaatcaatttagtggatcccaacagcattaagaaacaaacaaaacatagaaactatctaagcaataatctcaaaggataagtaattttgggaaagctacttcaacttttcctaagtgtgcacaggattacagaaaaatgtagtagttcctcctgtagttaagagtccaaaagagtgaaagcctctgctagttatttccatggcagtagagaccatcgctccataaatttgctgcaattgcaggaaagctcctcttcacccccagccaaaatcagcctcctcagagcacctcttttcctctcctcccgactttcagggtctgccacatctgctcccacaacagggatgctgtcaagagggtgggcacagcacccacatggtcccaggtctcctttcttacagctaagtttcctcatgctgcatgatttctgtacctccatcaccttctgtggacatggtgcaggctagcagcatcccttttaaaggggctcccagaactggacacagaattccacatgggatatggacagcaccaagcacccacagtgctactattgcccaggtttggatgcttactctaaatgggttcaatccacctacagccagtgatacccaaacccctatctgccgcctagtccagccctgctcagcccttaactccaaaaggcctcaacttttttttttttgagacagagtcttgctcttttgcccaggctggagtgcaatggtgcaatctccactcactgcaacctctgccttctgggttcaagtgattctcctgcctcagcctcccgagtagctgagattacaggtttatgccaccacaccccgctaattttttgtatttttaatagagacagggtttcacaatgttggccaggctggtcttgaactcctgacctcgtgatccacctgccttggcctcccaaagtgctgggatttcaggcgtgagccaccacacctgacccggcctcaatatttctacttggctgtctgaaaaccatctcgagcccaacatgtcccaaactaagctcctgatctctcccccttctcaaaaatgtgctccacctacagccttccccatttcatttaatggcaattccatctttaaattgctcaggccaaaaccctcagctcctctcattatctcactcctcacatccagtccattagaaaatctat

SEQ ID NO: 1242370 - DNA, 4001 bp, Homo sapiens
cttagcaggtccatcagggatgtcaaagtgaaatataaccaggtcagttgggtgcattagtaactactgggatttacaaccagctacaaatactatatatgtgtatatatatatgcacacacatatatatacatgcacacatacatacatatatacacatatatatacacaaatattgtatatttgtagacaatattgtaaacttgtacatatatatttatatatacacacatatataagaaatcataataatttaataatttctcttgtcaagagcttattctgaatactacccacggacctcagaaaaagaaagagcatttttttcccagcaaaatgcatcctcctttgtagtgggctaaggaataggcaccatgaacaggtgataccattgtaatttaaagaatggaagaaagtcaaataagagtatctaccatccaacgaaaggaactgtatgcagaagtcttttgggatctccaactgaggataaccggctccctctgattctgggtacacatgtctgcctccatgaatgttagcatgcggccagggtgggggagcaatggacgtctacaccagtgcttggccatttgtagagtggaaattgcactttgctttcaaaaatggattctcctcccagcaccatgcaactcgactagctgaaggcacaaatggaataaatgcacattctaaaaaaaggagggagggggcgaaaaaataaaccccacccaggaatctttaagggaaacaggtgctagcaagagaaagcggccagctgtcaataacacttaaaactccatcttcgttactctgaaaacaatttcaatgggggaaataccgtgccctgttcctgagggtttaatttactaggctgtctctgtgaattagagtcagatctaagtttcgcactcaggagcggttttctctgtcgactacgtttgctcttccgagctccaagtcggtttctaaaatgggcaagccttttccctcccggcagccttgacccccactcctccaagtcgtcacttttatttacagcccggtgagcggtgtctgtgtcgctcagcctggccccaagaacagtcaccgcgaacaatgagccagacaagggacccacccagagaacgcctgctcgccggccgcgcgcaagcccgctagcgcgggacgctccgggcttcggggctctgggtgcccccaccccttcccctctaaaccccaaggaaagcaagaaggtaggtcgttccctacacccaggtactcgtgctcacccaaccagccctgcctcccagcacccaccaattagatgccgtatctaaaaagaaaataaaaaaagcggggcagcgtggcggttcagccggctgccgacccggatccaactcgcccagcttgcgggtttggcgctcacttgcgcccgagtccgcggcattttgaaatcccggaggatttggggtgggggcaagaggtggggccacgagccataaagtggcttccgctccctccccccggcctggcacagctccgggatcgggcaagacacaaaagacgggtcttatcagtgccaacaactctgccgccgcctcgggccatgctgcgcacgggaaccgggcggcgggcctcgcggtcgggtctctgcgccggccgcggcgcgccgggaggctggagcatcctggacgccgccagagctccccggtgcgcttttcgcgcagaacctccgtcagcagctcctcgcttcgcagataaagaagtaaaggcgacggaggagaaatggagagaaaagggaagacttacttgggggccgaaggctcagcctgactcccgcttcggactcggcaggtgtctagcaccgcgggcccaggcggaaggcgctggcgcagcgcagagcagggactccacttatcgaggactggaaactccccttgccgcccggcctccgcgctgcgctccttgctgtcaccgctccgagcgacgcaggcacgctccccgctgcctcctagtcctggtgggtctctctgctctcttctccgggttcgtccgctccctcacagaccacaccctgtcacctcagcagccctccactccttcctctttgacacttccaccggttactccgccgtctgcgtcctcccacccccactcagcccacgtgctcctgccgctccctcggctctaacttcccctgccgggagcccccacctccgctctgaaaaccctttggtctctgagcaggggaaaggtcctggggtcttcgcccacatctccccaggcccttcggtgcaaaggaccttgctttgattttgtcgttgcgatggtttagatatattgtgtactacatattaagatgtatttctttaaatgagctacatatcacttttaatactgtagaaatgtattcccaggtgttaatcatctaaccgctgttcattggcctttggagttagactgtcagcccagcttttctccatatgcaaaaaggcccacaaagttccagaacaccctctttaccccaatccaagccacacgtgcccttttctaatgagcccgcttcctcgctgttattgttgtggaaatatttttatatttacttttccctgtttctgcagacaatgagaagttcctttctaagggcttccctcagcattctgttcttagtttcatgataatacctatcactcatgtgacattttcctgtttggattacttcctctactactggtctttaagtttctctaggcagaactattggtctgtaagtttgttcaggcagaaataattcatactcatattcataactttgtcaacagctcctagtgtggtcctcggcatacagtacgtattcaaacaatgttcaaggagtgaatgtcccttaaatatgaggcaagctttggtggttttatgtggtatttaaaggaaggaagacttcaatttgtatgcttggcttgtatcccatataattagtcctgtggaaaacaaagcattttggagttagctggatgattgctcatacgttcctttaattcttgaaacaagtcttccttgtaagtattacccactttttctaagatgatactcaggttggtaacttggtggtcactaaatgtgaagacccctaagccttagagatcccatggttcttcacaccagcccaagctgcatcaggctggcgttaatgcaatacttgactgcccagctacccagccacatgcaaaacctgcctaccagtaccacagagagcttacccaaccatctttcctccaaaaatagcatttatttttccctccctctttctcttctcttgcttgactcacttaagtcagagttctaaaaaacaataaacaaacacctctcaatgctcagacctcttgttaaacttattgtcttaactcctaaacttaaaattactttcatgaacatatcttgccttagctatccctgtgtctcacacagggctccatatctctttggtttctccattcaaataaatagtaattaacatttgttaagtctagagagaccaaagatcaggtagcagccagccattggtccaagcattaacacataatagctcatttaatcctcaacaaccttgtgagatagagcctattttatagtcggggaacataggcatagaggtatatcacatagccagtaattagtggagcagaaattagatccctggcaatctgcttcagaggctgctttctcgaccaccatgctttaaatggcctgccataatccctggcacctaatacatgttaatgagcattttaaaaataatgaatgtttacccatccacacttagcatcatagcaggaagaagagacggtaatgaaatgggtagaacttcaggtttttgaggacatataattgacctcaataccacaagaactgctttctgtggtgggactatggaccctacctgtggcctgtatttgaaacatgagagggacatggtccatgctcatgacatcaggtgtgcgtgacagatcgctgagccttcacgt

SEQ ID NO: 1242371 - DNA, 4001 bp, Homo sapiens
ccatctttcaaatccatcaacccatcaaaccaggggagacatgaccagatggtgctattagagggcaccaaaagaaaaaaagagagaaagaagaggaagacggcaaaatgcccacaaatctaaatcaaactcaagttaaccagctgttggtgatgaagaagtcacaacatttctggcatactctcctgagtcacagaaatgttccaaaaaaaaaaaaaaaaaaaaaaagaaaggttattgatatagcatccctacgaggaataaggccaggtaggaatattctgtaggatgcagtaagaaatagttgctagttgttaatctaacaaaatgtgccaatgaaagaaaacagtctgctcaacaacacattttggaagccttagggttatctatttaactgtctttctggaagtacattctaagagacctaaaccaaacaaagcacagacagtaactataaaaaacaaaactcagctatggctgaactatggtttatttatctctagatgtttaggttcatggtaatatagacccaaatctcagagcttatctggcattttctatttatctaagccagagtaaatgtttgtgtaatatctgccagcttgaaagaatatgcctgtcactcactacattaaacatgactacacacaacttaatttcctgagttagacacctaagagagtaaggggatttattttttaacagcaagagtaaaccagtatcaaaagctactgtttttaagccaccaaaggagagtaaaatccttcccttgagcggtctgagatgagatttctttatactacaaggaagaaaccttgaaaattttcttcaaacaagtatttttcctattctaagggacagagatcaaaccagtttagaaaaatgttagacctttcccagggacttcagctttggaataaacaaaataatccacttaatggccccaaatatcaagtagggggaagggcaaccttaaaaagcacccataatttttattacagacttaaaattcttaccgccagaagttttggggaaaaatcgtcctactcattgccctttcaccccaagtaacaggaaacactacagttatttttaaaggaaagcccccgctgtagtggcagacataaggtccaatgactgttgacgaagtctatatatctatagtaacgatgtgctgcgccttccctgtgagatcatccagctgacggcgctgagggctcgggatgctggaacatcagttaccgaatggtcaccccagaacagggagtactgccctaagttcctcaaacgctgcgattcataccgggacttcaatccccctccacacccccacccccgccagctccctgacatttcgccttttaacaagttcaggatttaaacaatcacctgacagcaatggtcccaagagtggatggagcacaaatttttcaaacccaattctcgtgcacacttccaagtcctttatgacctttcatttcaatccaagaattacacatgacagaagaagcttcaagccctcctaaattacccaaggaaggaggctactgtatcagtttctgcagaccagggacaaacaccgccgctgtcaagacgggaaataaaagtttccctaccttcctcctcaccatgcccctgccagcggctgccggcgcgagcggcggctccctcccggctgcagaacgcctctcgttgccggagaaggggctcagcaaaattgactcttccttatttgtttccatccataattgatggggagatgagaacgtaacacatctcagcaccgagctcttgtcgcctggcggagaccctgtccaagacgcttccgtaaagcatttccagtcggggaacaaagcacggaaagttgctgggtagagcggccgggaggagacaccgggagccgggtgggcggtggggtggccggtgggctgctccgggcccgggagtccgcccgcagcgcgctctgccagtaaggggagagggacggtgggaagcggccgccctccgggcctgggccggggatggggatggccaagtcacccgagctcccgcccctcgccggcaggcactacccgggggccgtgcaatccgggcgctcactgacaggtatcctacgcccgcgaggggctgctccggcctcaactgcggcgctgcgccccttctccaggacgcaggctaatgctcgcccgcccgctcctagccgggcgcagagctgccagaccccgggcgtcccagcgtccgctctggggccaacgggcgggagggggcggctaagcccgcaggcggctccttcggccttggctcagctctccccggctggctcctggagacgctgtgcccggcagagaagcaacccctgctaaccccagctatgtgcgggggacgccgagctggctctgcctggcaagaaacttttacttgatgccccctccgctttttttccaagggggtgcacagtggaggagggcctccaagtccacttgcccctccccctaagccgccagctttgccagttttgacgcgtccgccaaacctctctagccctttgcgcgtcccttgcacggcaggcagagagagcagcttggaaaataaatcaactgtccagtggcaacacacacacacacacacacacacacacacacacacacacacacacagcgattcgggatctcaggttccgacccccaccgcgcgcacacacacacacacacacacacacacagcgattcgggatctcaggttccgacccccaccgggcgccacaagagcattagcaaattgttgaaaacggtcttacctcattggggggaggctggtaagaaaaaagaaaaagaaaaaaaaaagcttgccacgcgcaaggaagaaagaaaataaagaaaaatattgtaaaaatagatatccctctgtctccttaggtcttggcttccttgatagaatcctgaaactcgccaccaccccttgcagcagcagcagcagcagcgggacagagcaggagcaaaacaaaccgatgcacggcaaatggtgtaattcgatccatctccaagtcaatccatcaggcgagccggagcctggctccctccacgcactcggcagctcccggcgcgggtcccacccccgggcacggacggcaggaggcgcggccggccgggcgcgctcgccctcgcgggtgaaccgtggccagcgccgcctggaggcccccaccctggcgccgcggccctgctgacccctcggtggcctccgcgtccctcctctccggcgctctgctgcgcaccctccctctccccacctctgagtagctgctccttctagcaactcccagtgcctcagtcatccagctcgcagtgggtgctgcagcctgcgaagcaaccttttcgattccctccctctttccctctcgctcacttctttcagagctttcctccagaacccagaggacaaatcactgcagcccaggagagctgcgggcgcagttgttccgtgaagttctgccttagttttccagtgtaagatttattttttaagcacatctttacaaacccgcccccacattacccccccgccccccatttctctttataaccactaagcaaaacagctgggaagaaagcaatcaaacattgctttatctttataaaatacagaaattgcctactaaaaatcccatttctactttgaatgaaagccattctgtacagtataattttgcaggctaatgacccggttttacaggcaagtgtttcatgtaatatgttgtgggagaaatgaaaatgtccttgaagtgacatcatttaaaattgactgtcacaaatgaaaggaaaaaaaaagtcacatattccaaaacaagaggattttaattcaaacttcatttccaagaacgggctgtgttttattaatttccagttgaattatggatcactgagggctctaaatggctagaatgaaccatgatgcccctgtttaaagaaaaagaagagagctttttccgccaaacttaattttca

SEQ ID NO: 1242372 - DNA, 4001 bp, Homo sapiens
catggagctgtgctgggagcttcgaaaagtgggtaagaggactgaaagcaactttaaatagcctcagggtgggaactaagtgcccaggatgggatgtatgcattaagtgctaagaagtgggtgtgcattaagtggggtgggggtggggggtcatgggaagactttgggacaggcaaacagagtcaaaatgcaaggggtttgatggagggaaagattccagaacactcagatgtggccatttgtcccctccagagtgcccacacgctatgatgtccaagacagccaaggagactgagggaaggcaaagctgctgggagggcaaaggaagcttgggctggagctgggatggcagaggggtgtgcaggcctcctccatgtacaggcggccggagctctagcagcactgctcggcttcctccaggagcacctcaggctgggtagccgagctggtccccagagcacctcattcatggtccctgaaccacctaaatccttctcccctccctaacccagaacctggactggtcctgtgccagatcagagcccctgcctgcacctgggctcccacactgctcagtgaccttgggcaagtcacattccctcagctactgcggcagttcgggccactcgttttgtgtatggttttttttcccctctgctaataatacctgccccagataatgctcagactcccgcaatccctgcaaactgccaaaggcatcaaaaggctcccggtggggccagacccgaccagttcccccagcccccactgcgagtcccccaccatcacgacaggggggccgcagacacgccaaatttggggacagagccgaatcggactgggggcggggaggcatttgtgtgcaatgcaggggaggggagatcagttcctcgcggcagaaagcctcaaacccccgcctaaccggctttctgtcccatagtacagggtctaaactgaggtgccctgggggagactccagtcccccaggttcttattatctaccctggcctaaaggctgcacccccgccctagatccaccgcctgggggtcccaacggccgtgccccacccaacgggcactgccccccaacgctggagccgatttctggtgacaactgccacgtgcgggcaaggggggagcggccggtcccggcattgctgaggcagcgccctggtaccccaagccgccgcaccgcaccatgtcccgccgctcgctgcaggatgcccacccccttgcctggcccgagctccgggccggggcgggggcgggggcaggcggcggggtctttgttcccgctgccgaagcgcggcggcggcggcaaggggtccgcgccccccttgccggcccagcctgcgccccgcgcgccagcagagcccgcagctcaaaaggagggtacccgggttggggtcccaggcggggaaaggtcctccgccgaagcccccgagccagaggacccagagtggctcggggccgagagaggggcccgccccctcccctggcgcccgggcgttgcggctcctggctgccagggacttggtgcgacttagccggggctccggcccccgccgctcgctcgccgcagcgttacagccggctctggtgtgccagcgtgtacactcacacacactcacccaaacccacacgctccacgcggggacagcgcggggacagcccgggacccgcagagctgcgcgcacgcactccctccgggtgcagcacactccgcacccgccccgcgcagcgtctgatcccgcgcctgaccggccgcgcggcgccgcctacctttccagacggcgaagatgcggggtccgctccttaggtggccctgggcggaggcggcggccgcccagagcagcagcagcagccgcagccgcagcggaagccccaaccgagccggcgggccagggacgcgggcgcgcggtgcgctgggggcggcacgtccgggcggaggaggcgtcatcccgtggccccgggagcgacagcggcaatcagccgagactgagccagcgcccggccgcaggcagacccaagcgccaggaggcggagccagcgctgaccccaccccgcccctccccccgcccctcgcagccttttctcgcctcactggctttcctgagcgagagcggaactgctgggggaaccttcgccaccctctcccgggcaactctacggggaaagcccagctgcggacaagccagacttgtggtcttctgccaggggcggcaggccctatcccctctctgggcctcagttccactccccgcaccccgtaaaaagattggcgtagaagtcgtggaggacctctctccaagggcgcagaggagtccaacacccaacaaccttgctatggccagctaagtggttcgcaccctgaggactatggtcctcggaggatgcgttcgcctaagtggacacggctccctgctgagcctaccagcaggcacaacgatgatatgtggggagcactcagggacccgctgttgctttgcctgggagaacactggaaatttttcatcttggcctggctccttcccctccctctcctttctcctccctttcccagccagcagccttctgggctgcctccccccaagccagctggtgtacgctcagaaaatccaaactcatttccatgtgagtggagggggatataattaggaaggccccttccccaagtagagaggggagcatcccccgtgccccactcactgtgggggagggagggtcaaagcagcttaaggggatctctgcccgcaaagtgcctagggctcagctatctcaggcaacctgaccattcagtggggactcccttggggggtccaggcccagaccctctgcagttacctgagcagtccagccagctctgccatcagctcctcctctcagaactacgtgcctgccctttgtaaaagggtctcctctctctagaccagacagggcccagacctaccacttccacttgtgccccagggaaccatgaatggaaaatccacccagctcagtaagtacttatctagtgtttactggatgtctagctgcactgagaggagacaggccgaggaaggagtagaggtgaacatccaaccttcagaactcacagacctagacacgattcacgcactgcagacaccagcaaaggcggtgggctggctgccctctgccctctgccctgctccatggggccaggaccatttggttgttgtttttacctcctggaaccaggaaagttttgctaccaagaagtttggctttaccattctacattttgcttccagttgtcccctccttcttccctcagagtcctgaggcaccccagcaggccaggaaggtaaactcaaggtacctccagagacagtgcagagtgaggttcctggcccactgggtgaagccaacagcctcctgatacacaggggcacactgccccagagagggaggctgtggacagtctaagagctcctcctcaggcctgcacctaagcctgtggccctgaagccagcagtggagcctggcccaggccagcctctaagatggacattcggtttcacctgctagacaggtattgccctcagtgtctgtcctctctatgcaaagctagggcaaactaagaaatcacctgtctctgccttttggaactaagaattcaaatggattcaaaatcaatgataacactgcccatgtgcatggcaactcacaacacataacccacattcacctacctcatctctgccagtcctccactctcttcctctcactgagggagggagcgtaactccactgcagagaagaaaactgaggtacagggagggacaaggacggacctgcccgaggtcaaccggtaaatggtagaacgaagatgggttttctgactgcaataacaattgctaacactgtggttcctatgtgctgtgccatctcatagcctctcccaactcattcaatcttcgcactcctatgagataggagctattagtcacctccctttacaaatgaagaaatcaagg

SEQ ID NO: 1242373 - DNA, 4001 bp, Homo sapiens
gtcctacccaagcccattcctgtccgattgccatgtgtcaccccacaggagacaggaggcagctgtcagtcgggcacaccatcaccagctggtggccctgggggtggggggcaggtgaatggcagggcctgtctggccagtggggcacctggcactggtgaaggagaccacagactgtcgttggacaagactggtgaacggttggcagaccccagccagcggggctcaacagtgcattactaagcagagggcacagccagtgtggctacagcagtgaactgcgggcgggggggtaggccatggagctgtgctgggagcttcgaaaagtgggtaagaggactgaaagcaactttaaatagcctcagggtgggaactaagtgcccaggatgggatgtatgcattaagtgctaagaagtgggtgtgcattaagtggggtgggggtggggggtcatgggaagactttgggacaggcaaacagagtcaaaatgcaaggggtttgatggagggaaagattccagaacactcagatgtggccatttgtcccctccagagtgcccacacgctatgatgtccaagacagccaaggagactgagggaaggcaaagctgctgggagggcaaaggaagcttgggctggagctgggatggcagaggggtgtgcaggcctcctccatgtacaggcggccggagctctagcagcactgctcggcttcctccaggagcacctcaggctgggtagccgagctggtccccagagcacctcattcatggtccctgaaccacctaaatccttctcccctccctaacccagaacctggactggtcctgtgccagatcagagcccctgcctgcacctgggctcccacactgctcagtgaccttgggcaagtcacattccctcagctactgcggcagttcgggccactcgttttgtgtatggttttttttcccctctgctaataatacctgccccagataatgctcagactcccgcaatccctgcaaactgccaaaggcatcaaaaggctcccggtggggccagacccgaccagttcccccagcccccactgcgagtcccccaccatcacgacaggggggccgcagacacgccaaatttggggacagagccgaatcggactgggggcggggaggcatttgtgtgcaatgcaggggaggggagatcagttcctcgcggcagaaagcctcaaacccccgcctaaccggctttctgtcccatagtacagggtctaaactgaggtgccctgggggagactccagtcccccaggttcttattatctaccctggcctaaaggctgcacccccgccctagatccaccgcctgggggtcccaacggccgtgccccacccaacgggcactgccccccaacgctggagccgatttctggtgacaactgccacgtgcgggcaaggggggagcggccggtcccggcattgctgaggcagcgccctggtaccccaagccgccgcaccgcaccatgtcccgccgctcgctgcaggatgcccacccccttgcctggcccgagctccgggccggggcgggggcgggggcaggcggcggggtctttgttcccgctgccgaagcgcggcggcggcggcaaggggtccgcgccccccttgccggcccagcctgcgccccgcgcgccagcagagcccgcagctcaaaaggagggtacccgggttggggtcccaggcggggaaaggtcctccgccgaagcccccgagccagaggacccagagtggctcggggccgagagaggggcccgccccctcccctggcgcccgggcgttgcggctcctggctgccagggacttggtgcgacttagccggggctccggcccccgccgctcgctcgccgcagcgttacagccggctctggtgtgccagcgtgtacactcacacacactcacccaaacccacacgctccacgcggggacagcgcggggacagcccgggacccgcagagctgcgcgcacgcactccctccgggtgcagcacactccgcacccgccccgcgcagcgtctgatcccgcgcctgaccggccgcgcggcgccgcctacctttccagacggcgaagatgcggggtccgctccttaggtggccctgggcggaggcggcggccgcccagagcagcagcagcagccgcagccgcagcggaagccccaaccgagccggcgggccagggacgcgggcgcgcggtgcgctgggggcggcacgtccgggcggaggaggcgtcatcccgtggccccgggagcgacagcggcaatcagccgagactgagccagcgcccggccgcaggcagacccaagcgccaggaggcggagccagcgctgaccccaccccgcccctccccccgcccctcgcagccttttctcgcctcactggctttcctgagcgagagcggaactgctgggggaaccttcgccaccctctcccgggcaactctacggggaaagcccagctgcggacaagccagacttgtggtcttctgccaggggcggcaggccctatcccctctctgggcctcagttccactccccgcaccccgtaaaaagattggcgtagaagtcgtggaggacctctctccaagggcgcagaggagtccaacacccaacaaccttgctatggccagctaagtggttcgcaccctgaggactatggtcctcggaggatgcgttcgcctaagtggacacggctccctgctgagcctaccagcaggcacaacgatgatatgtggggagcactcagggacccgctgttgctttgcctgggagaacactggaaatttttcatcttggcctggctccttcccctccctctcctttctcctccctttcccagccagcagccttctgggctgcctccccccaagccagctggtgtacgctcagaaaatccaaactcatttccatgtgagtggagggggatataattaggaaggccccttccccaagtagagaggggagcatcccccgtgccccactcactgtgggggagggagggtcaaagcagcttaaggggatctctgcccgcaaagtgcctagggctcagctatctcaggcaacctgaccattcagtggggactcccttggggggtccaggcccagaccctctgcagttacctgagcagtccagccagctctgccatcagctcctcctctcagaactacgtgcctgccctttgtaaaagggtctcctctctctagaccagacagggcccagacctaccacttccacttgtgccccagggaaccatgaatggaaaatccacccagctcagtaagtacttatctagtgtttactggatgtctagctgcactgagaggagacaggccgaggaaggagtagaggtgaacatccaaccttcagaactcacagacctagacacgattcacgcactgcagacaccagcaaaggcggtgggctggctgccctctgccctctgccctgctccatggggccaggaccatttggttgttgtttttacctcctggaaccaggaaagttttgctaccaagaagtttggctttaccattctacattttgcttccagttgtcccctccttcttccctcagagtcctgaggcaccccagcaggccaggaaggtaaactcaaggtacctccagagacagtgcagagtgaggttcctggcccactgggtgaagccaacagcctcctgatacacaggggcacactgccccagagagggaggctgtggacagtctaagagctcctcctcaggcctgcacctaagcctgtggccctgaagccagcagtggagcctggcccaggccagcctctaagatggacattcggtttcacctgctagacaggtattgccctcagtgtctgtcctctctatgcaaagctagggcaaactaagaaatcacctgtctctgccttttggaactaagaattcaaatggattcaaaatcaatgataacactgcccatgtgcatggcaactcacaacacataacc

SEQ ID NO: 1242374 - DNA, 4001 bp, Homo sapiens
attaaaattatagataataactagacgtaaaagccaaaagtttcggaagagtaatgtagtaaaaatttctgttccgccttcactctccagccacccatttttcctctttagaggcaaccactatttccagcttcatgtgtatcctttctgtgatatttccaatatataaacctacacatttatatttttaagacactgtacacaaatggttgcatactttacattctatacatagcctgttttttttacttaatactacatcctagaggtcatttcttaacaatacatatggaagtgcctcatttactggctggatagtattccatttttgtggactggaggttatttttggtgttttgcttttaccaacaatgttacatgcttttcttttaaatgtgtctgatgttatatgtatgtttaaataattttgtgagttgaaaaaaattcctgatgattcttttatgttgaacctacagaaaggatgtaactaaatttctcattgaacctctgagcttccacagtgtgactagctgtgatgatgattataatatttattaaattattgaaggattttaaagcaggggactggaatgatcagatttgcattttaaaaaagtcattctggctgcagtgaattgaagagtagaataagactaaaggccaggaatattagggttatccaggcaaatggtgagactggatctgaacttggatattcggagttgagttggtgattttattgtatttggggttggggagaagttgcatacaggataaaatctaggtttctggcttgtgcctttcactgaggtggggattcccatgaaggagtgggattttgtttttattttgtcaaggaggaaggatagaggggttaatttgtgacatgttcagtttaggtgactgtagttctgtcagatgtagatgaccattaggcatttggatttgtggctgaagctcagtatcaggttctgggttgatagcagtagattttggaggcaaaatcatacagaagggaggagaaaaggttttaggatggaaacccaacatttaaattacaggtagagttgaatatttaaattagtaaattacatgattaagtgcctttaaaaaacttattctagtttaagcattaacagtgagattcactatctaatatatgaatttttaacagttgttttcccttagttattttagtagtatatagttcctgagggaaattgggtaaacttagattttttttaacaagtacctcaatagaagttagcgatataaactccatctttcctaatcatttggattatactatgtggaagtttgttcagtctttaatagcagagaaatgtaggaggtttgaaaatatgatttgccaagaatattaaggtttttagttggagtgatttttggttatgttaactcagtttgaaataaatattagtcaaagacttttcagacattttaaaaaccacaatattgacttaatgtattgattcctaagtctagaactgctgtctagagtgcttgcctttgctctagacccctgtaaaagcactgcctaatggatatcaccactttgattcacatttcacaaacacttcaatccaaacatttaggaaacaaaactcttcctgcctcttttccccccacaaaaacagtggagagagagccggagacagaaactgcaacaaaattttttcttccccccgatttcctaccttgattaatggcaccactctttcctcatgaaaccttcaggaacctgggaattgccctccgcttcactctgtacttcactgccaacatccagtctgtcactgccttgtacattttccctcatgatatttcaggtcattccttattactttttgttgcctctatcttattttaactgaaaatatctgtttgttgggcttctgtaatgctgagtggtcttcttgccttctgtcttctgcctcttgtcatgccctcctgttcattctcttgactgctgttggagtaagtattctaaaatgctcttttagtcaggctctttcacttggagggaagagactcaagttaccttaagtaatgaagtgcttattgaaaggaaccatacacaagggaacccaggaaaagttaacttgctctcaagaagaaaaagaacctaataaaacttgctctcaagaagaacaagaacctaataaagctggagaccccactccagtgctccattgttagcttgtcctagataccgtttctttcttcagtttttttccccctatgtcatagcttccatttattactaatttctgctccttataactactatgtgacccccatgccaacatcttgcctcctggctgcaattgttttaaaacgttttaaaagaggttagctcctgttgctaacctcttccttttccctaggattttctggtttgaattccagatttggctcagctctttttctcattgattgctaacaagtctgtgtacttaggttatgtcaccactcttggccatttattgttggctgtgtgtttgtatgtatatatgggtatcaggaaagatcttaatggtggaaagtatgggacagtgtgcaggctaatttaccgcaaaatggggttgtgagcatggcccacaccataattttgacatgtatagtacagataaaaatcaaatcatgtcctttcctattgaataatcttcaaaaaagctgtctcattgctttcaggatagagtttaaactgtagcatggcatgtgtatgagatcattcatgatctaactcttaattctctagcttttcttcacttgctgtcttccttacatactttaatccactcttactgactttaggcttcctctcaggtaatgtgctttctctctcgtcttttacatttgatgttctatttccctgatttccactttcccctttctttgcttggctaatttctgtctgacctttaggattcagttcaggtgtatattcttcaggaagatttcctttacctcttttcagattaagttaggtaccattcttatgtgctcctgtagcacatagtaattacttctatcatagtcctctaatgaaatagcttaattacttgtctgttttcttcactagggtttgactactttggtaagagggatgatatcagtgctttttagtaaaacaagtttttagattgagcattttaaaaaatataagttcagaaaaaatagggtctcactgtgttgcccaggctggtcttaaactcctggactagagccatcctcctgcctcagcctttgaaagtgctaggattacaggctgagccactgtgcccagcctaaaaatataagactttataaattataaaatatacaaaaagtacacagctggtaaatatatagctcagtgaattttcactaagaacataccagtgtaactaacatctacatcaagatatagaatatcactagaactctacaagctgcctcatgccttcttctagtcactaatccagctcatagaggatttaatttacatgggaaaccctttaacatataggtttctgtacctattttgtgtgtatctttagacatgcaaggagtgtaggtattggaattttgatcctgtagaaagaacatacctaatttatgttatagaaacaattatggcatagtttcatacaatagacaagttcaaaataacataatactactaaggtttatttgtgagatgttatatttaggtaggtgtttttgttttatacatttaatatgattttagagtggcagaaaataatatgatagaacaaagtatatttgctgaaaatggcctatgaattatgagtggtaaatatgcttgggataggtatagtaaacatgtaaagcactttccaaatagtgttaggcctctgggttttaatgtgaattatgttgctggcgtattttggcagtggggtcatccagcgggcaactgaagtgtaattttacatgtacagtgaggaatggactagctgtcctgtcatagacagctg

SEQ ID NO: 1242375 - DNA, 4001 bp, Homo sapiens
tcttctgtgcgcagacagcatcccgtgcatttttctctattgtcactttattgtactaccactgcggattctctcacggtctcctatacaaaagcacttcaaaaagctgacaccacttaattcgcctctgacattctggaacccaaggcatggaaaccactcagtgaaaagtctgagaaatgaatggaaacggaggtcggggcggggacaatggagggggcagtgggtggagagagcgtgcgtgtttgaaaaggggcgggggctatgaccggcggcgctgagaatccaggtccagaatcgggagggagcacggatacgccagaatctgagtgggtgggagagcgatccactgccgagacaaaccgaagtggggaggaggcttcttacctgcctcgggcctcaccaccccaaccagccttcaggcacctctgtgttggccggaaagcgacagctacggtcgcaaactcagaggtttcgtccccaaccttgcgacatccctttccagtacagggagaatctaaagctgagttccctgctctgccgtaaggtgaagaagaaaaaatttgggcggggccgcctggggcgtaggaaagggggcgtgtctgcgcaagcgcacgctgtactctccagtggcgtcacgtgcgggggcgggacagggcggggccgacccgtgctggcagtagggggcgtgggaggtaagtgcgcgcgcgcctgctcgcctgcagccggggagtcgcgcggggcggggccgcgtgcgcggggtcgggggcgcgcgaccgaagcggataagggacgcggcggcggttggctgtgtctgttgagagagtacaggacagcccggactgcgagaggcggcggcggaggcagtagttgcaccggcagaggcggccgctggcagcggttgaggcggcggtccaacgcgtgctctctgggcggggtgcggcgggggatgtgcctgctcaggccgggcggagtctctctgacagggcgggggatgcgccgcggccgctcgcccggaccctgaggctgctgggcccaccctcccggaaccgtccgaccctcggtggcctcggcctcttctgccatctccggtcctaccctggggcggagggtggaaggcagcttccgtcgaagaggagggggctgcggtggccaccgcggcggagcccgaggtaagacccgcccaagcgcccagcggccctgcagcccgtcctggcccacgtctcagcctcgctatttggctccggtcgggccgccccgccccgtcccagcggagacgccccgcgagcgggtctgcgccgagcctcccaaacaccagatcacggccccggatccccagtagaccccaccccctgtatcttccattggccgggcaccattccggccctccagcctccccggagattctgtcacggtccccccaacccagcagaccccattagtacccctcagagtcccttaggactcttaatggagcttctagactacgttacatcctcccttgggctgacgtgattacagttctcaggcaaagtctcgaccgccccctaacccattgcgtcccccatgtgcccctcgccctactcttcttagtagaacccctcccagctcgctcatcaccaagccgactagcactaaccctagccatcacggctttcagatagccgctgtcatggtgttcttactcccggtagatgtggtgtcagtccctctagacaccgtcacagactttggcttctctcccaccaccgactgtagcctctctcaacagacctctcctcaagcaaaccttgttatctttctccttagtcgcgatcctttctttggttgaaagggctttgccatgaaatcctgagggaatatttgcttagcctaatgtattccctccattgtggcttaaggggaccgaccgagacccatgtttggaggggttgggctgaaaaaagtgggaggcagagtgaagttatggaagcatgaggccagttgtgtgtgtgccattataaggtcacagagcctgcacctcgtcttgtctgttctgtgtagaacgtgtgaggttgtccagcactgatgttttagggacctctgtaaggattaaatcacgttgcactagtggatataactatgtcgtcttgtagtattacttcacctccttgtcgattgctgcagatactagaactgtttcttatttttatttttaaaggatactaggggactttttttggattcactgttttttggatttgctagaaaaataagatttgtagcattccttaatccctgaatgcttcgatgtcggtttaataataaacttctgttgcctggtgctgctgtcttgcttctccaagaagcaagtacagaaatcatgcagtgttcactgaggtcattaccaacaacagccttctcaatagcagtaaaatgttgaataaaatgtttgtagaagttgagctcctgagttgtcaagaaagaaatgtaatgttgcatcaaatgatcagtacgtaattttaatattggtataaagatgaaatataaagaggtctttgtagtcatacacacacacacagtaaaaaatgttaaagtaacaggagaaaatcacattaaaattatagataataactagacgtaaaagccaaaagtttcggaagagtaatgtagtaaaaatttctgttccgccttcactctccagccacccatttttcctctttagaggcaaccactatttccagcttcatgtgtatcctttctgtgatatttccaatatataaacctacacatttatatttttaagacactgtacacaaatggttgcatactttacattctatacatagcctgttttttttacttaatactacatcctagaggtcatttcttaacaatacatatggaagtgcctcatttactggctggatagtattccatttttgtggactggaggttatttttggtgttttgcttttaccaacaatgttacatgcttttcttttaaatgtgtctgatgttatatgtatgtttaaataattttgtgagttgaaaaaaattcctgatgattcttttatgttgaacctacagaaaggatgtaactaaatttctcattgaacctctgagcttccacagtgtgactagctgtgatgatgattataatatttattaaattattgaaggattttaaagcaggggactggaatgatcagatttgcattttaaaaaagtcattctggctgcagtgaattgaagagtagaataagactaaaggccaggaatattagggttatccaggcaaatggtgagactggatctgaacttggatattcggagttgagttggtgattttattgtatttggggttggggagaagttgcatacaggataaaatctaggtttctggcttgtgcctttcactgaggtggggattcccatgaaggagtgggattttgtttttattttgtcaaggaggaaggatagaggggttaatttgtgacatgttcagtttaggtgactgtagttctgtcagatgtagatgaccattaggcatttggatttgtggctgaagctcagtatcaggttctgggttgatagcagtagattttggaggcaaaatcatacagaagggaggagaaaaggttttaggatggaaacccaacatttaaattacaggtagagttgaatatttaaattagtaaattacatgattaagtgcctttaaaaaacttattctagtttaagcattaacagtgagattcactatctaatatatgaatttttaacagttgttttcccttagttattttagtagtatatagttcctgagggaaattgggtaaacttagattttttttaacaagtacctcaatagaagttagcgatataaactccatctttcctaatcatttggattatactatgtggaagtttgttcagtctttaatagcagagaaatgtaggaggtttgaaaatatgatttgccaagaatattaaggtttttagttggagtgatttttggt

SEQ ID NO: 1242376 - DNA, 4001 bp, Homo sapiens
agtcaccctggaaagggcttcctcacgttatcctcctacacaacctgggacccctcttctgtgcgcagacagcatcccgtgcatttttctctattgtcactttattgtactaccactgcggattctctcacggtctcctatacaaaagcacttcaaaaagctgacaccacttaattcgcctctgacattctggaacccaaggcatggaaaccactcagtgaaaagtctgagaaatgaatggaaacggaggtcggggcggggacaatggagggggcagtgggtggagagagcgtgcgtgtttgaaaaggggcgggggctatgaccggcggcgctgagaatccaggtccagaatcgggagggagcacggatacgccagaatctgagtgggtgggagagcgatccactgccgagacaaaccgaagtggggaggaggcttcttacctgcctcgggcctcaccaccccaaccagccttcaggcacctctgtgttggccggaaagcgacagctacggtcgcaaactcagaggtttcgtccccaaccttgcgacatccctttccagtacagggagaatctaaagctgagttccctgctctgccgtaaggtgaagaagaaaaaatttgggcggggccgcctggggcgtaggaaagggggcgtgtctgcgcaagcgcacgctgtactctccagtggcgtcacgtgcgggggcgggacagggcggggccgacccgtgctggcagtagggggcgtgggaggtaagtgcgcgcgcgcctgctcgcctgcagccggggagtcgcgcggggcggggccgcgtgcgcggggtcgggggcgcgcgaccgaagcggataagggacgcggcggcggttggctgtgtctgttgagagagtacaggacagcccggactgcgagaggcggcggcggaggcagtagttgcaccggcagaggcggccgctggcagcggttgaggcggcggtccaacgcgtgctctctgggcggggtgcggcgggggatgtgcctgctcaggccgggcggagtctctctgacagggcgggggatgcgccgcggccgctcgcccggaccctgaggctgctgggcccaccctcccggaaccgtccgaccctcggtggcctcggcctcttctgccatctccggtcctaccctggggcggagggtggaaggcagcttccgtcgaagaggagggggctgcggtggccaccgcggcggagcccgaggtaagacccgcccaagcgcccagcggccctgcagcccgtcctggcccacgtctcagcctcgctatttggctccggtcgggccgccccgccccgtcccagcggagacgccccgcgagcgggtctgcgccgagcctcccaaacaccagatcacggccccggatccccagtagaccccaccccctgtatcttccattggccgggcaccattccggccctccagcctccccggagattctgtcacggtccccccaacccagcagaccccattagtacccctcagagtcccttaggactcttaatggagcttctagactacgttacatcctcccttgggctgacgtgattacagttctcaggcaaagtctcgaccgccccctaacccattgcgtcccccatgtgcccctcgccctactcttcttagtagaacccctcccagctcgctcatcaccaagccgactagcactaaccctagccatcacggctttcagatagccgctgtcatggtgttcttactcccggtagatgtggtgtcagtccctctagacaccgtcacagactttggcttctctcccaccaccgactgtagcctctctcaacagacctctcctcaagcaaaccttgttatctttctccttagtcgcgatcctttctttggttgaaagggctttgccatgaaatcctgagggaatatttgcttagcctaatgtattccctccattgtggcttaaggggaccgaccgagacccatgtttggaggggttgggctgaaaaaagtgggaggcagagtgaagttatggaagcatgaggccagttgtgtgtgtgccattataaggtcacagagcctgcacctcgtcttgtctgttctgtgtagaacgtgtgaggttgtccagcactgatgttttagggacctctgtaaggattaaatcacgttgcactagtggatataactatgtcgtcttgtagtattacttcacctccttgtcgattgctgcagatactagaactgtttcttatttttatttttaaaggatactaggggactttttttggattcactgttttttggatttgctagaaaaataagatttgtagcattccttaatccctgaatgcttcgatgtcggtttaataataaacttctgttgcctggtgctgctgtcttgcttctccaagaagcaagtacagaaatcatgcagtgttcactgaggtcattaccaacaacagccttctcaatagcagtaaaatgttgaataaaatgtttgtagaagttgagctcctgagttgtcaagaaagaaatgtaatgttgcatcaaatgatcagtacgtaattttaatattggtataaagatgaaatataaagaggtctttgtagtcatacacacacacacagtaaaaaatgttaaagtaacaggagaaaatcacattaaaattatagataataactagacgtaaaagccaaaagtttcggaagagtaatgtagtaaaaatttctgttccgccttcactctccagccacccatttttcctctttagaggcaaccactatttccagcttcatgtgtatcctttctgtgatatttccaatatataaacctacacatttatatttttaagacactgtacacaaatggttgcatactttacattctatacatagcctgttttttttacttaatactacatcctagaggtcatttcttaacaatacatatggaagtgcctcatttactggctggatagtattccatttttgtggactggaggttatttttggtgttttgcttttaccaacaatgttacatgcttttcttttaaatgtgtctgatgttatatgtatgtttaaataattttgtgagttgaaaaaaattcctgatgattcttttatgttgaacctacagaaaggatgtaactaaatttctcattgaacctctgagcttccacagtgtgactagctgtgatgatgattataatatttattaaattattgaaggattttaaagcaggggactggaatgatcagatttgcattttaaaaaagtcattctggctgcagtgaattgaagagtagaataagactaaaggccaggaatattagggttatccaggcaaatggtgagactggatctgaacttggatattcggagttgagttggtgattttattgtatttggggttggggagaagttgcatacaggataaaatctaggtttctggcttgtgcctttcactgaggtggggattcccatgaaggagtgggattttgtttttattttgtcaaggaggaaggatagaggggttaatttgtgacatgttcagtttaggtgactgtagttctgtcagatgtagatgaccattaggcatttggatttgtggctgaagctcagtatcaggttctgggttgatagcagtagattttggaggcaaaatcatacagaagggaggagaaaaggttttaggatggaaacccaacatttaaattacaggtagagttgaatatttaaattagtaaattacatgattaagtgcctttaaaaaacttattctagtttaagcattaacagtgagattcactatctaatatatgaatttttaacagttgttttcccttagttattttagtagtatatagttcctgagggaaattgggtaaacttagattttttttaacaagtacctcaatagaagttagcgatataaactccatctttcctaatcatttggattatactatgtggaagtttgttcagtctttaatagcagagaaatgtaggaggtt

SEQ ID NO: 1242377 - DNA, 4001 bp, Homo sapiens
acagcttctctgcctgccaagtgaattctttgtttaaaggcctgctttccctaatacggtaattttccatcctaattgagctgtattttaaatatctttatatctcattactaacttaaatgataaataatagaaaaagattctaaattggcaaggcactgtatgtagtaatctctatgagagtggatgttggtctttgcatctcataaattggcttagctctggatgttggtctctgcatctcataaattggcttagctctgatcattttggggacagaagtggggatggcctttgagctttaaggctggagacaacagctgaccaatcctggacggaagggaacgggagagcaaagagacaagtaactaatttggacctgataaacactgaggaatgaacagtgctgaagagaaaggcaagagtggctccttctcccatttcccagaccagttattccaaacataacgccgctcaagtttctcattccatctccaagcctctctgtagttaaatgacctccatcttttttttctgggggcggggacggagtctcgctctgtcacccaggctggagtgcagtggcgcgatcttggctcactgcaagctccgccttccgggttcatgccattctcctgccttggcctcccgagtagctgggactacaggcgcctgctaccacgcccggctaattttttgtatatttagtagagacgaggtttcaccatgttggcctggatggtctcgatctcttgacctcgtgatccacccgcctcggcctcccaaagtgctgggattacaggcgtgagccaccgcgcccggctaaatgacctccatcttaatgttacagagccaactgtctcaacttccttctctctagtttagtgagtctcaatctttagcattagagtcacctgtggagctttaaaacagtaatgacacctggcacaacccagaatttaattggtctagagtggggcaacagtattggttttatttaacaaaaagtttcccaggtgattcaaatgcacatacaaggttgcgttccactagtgatcttgatcttataaattagcctccctcaccctcgaagaggccacttctcggtttcatggtacgcttttgagtcttctacctaaacagaaaacattcctgagggccatattctcgttcctcatttctctaactttataacgatgcttctttaaagggaagtctacactagtacggtttccatcaggtttattttacttcttttttctctttcagaccaccactgtcacatgctcttgcgcccgttattctgcttttacctcctttcgtatttctttgaccaggtactggattactagtcttttaacacagtcctctaaaagtgacccaaaagtcaccctggaaagggcttcctcacgttatcctcctacacaacctgggacccctcttctgtgcgcagacagcatcccgtgcatttttctctattgtcactttattgtactaccactgcggattctctcacggtctcctatacaaaagcacttcaaaaagctgacaccacttaattcgcctctgacattctggaacccaaggcatggaaaccactcagtgaaaagtctgagaaatgaatggaaacggaggtcggggcggggacaatggagggggcagtgggtggagagagcgtgcgtgtttgaaaaggggcgggggctatgaccggcggcgctgagaatccaggtccagaatcgggagggagcacggatacgccagaatctgagtgggtgggagagcgatccactgccgagacaaaccgaagtggggaggaggcttcttacctgcctcgggcctcaccaccccaaccagccttcaggcacctctgtgttggccggaaagcgacagctacggtcgcaaactcagaggtttcgtccccaaccttgcgacatccctttccagtacagggagaatctaaagctgagttccctgctctgccgtaaggtgaagaagaaaaaatttgggcggggccgcctggggcgtaggaaagggggcgtgtctgcgcaagcgcacgctgtactctccagtggcgtcacgtgcgggggcgggacagggcggggccgacccgtgctggcagtagggggcgtgggaggtaagtgcgcgcgcgcctgctcgcctgcagccggggagtcgcgcggggcggggccgcgtgcgcggggtcgggggcgcgcgaccgaagcggataagggacgcggcggcggttggctgtgtctgttgagagagtacaggacagcccggactgcgagaggcggcggcggaggcagtagttgcaccggcagaggcggccgctggcagcggttgaggcggcggtccaacgcgtgctctctgggcggggtgcggcgggggatgtgcctgctcaggccgggcggagtctctctgacagggcgggggatgcgccgcggccgctcgcccggaccctgaggctgctgggcccaccctcccggaaccgtccgaccctcggtggcctcggcctcttctgccatctccggtcctaccctggggcggagggtggaaggcagcttccgtcgaagaggagggggctgcggtggccaccgcggcggagcccgaggtaagacccgcccaagcgcccagcggccctgcagcccgtcctggcccacgtctcagcctcgctatttggctccggtcgggccgccccgccccgtcccagcggagacgccccgcgagcgggtctgcgccgagcctcccaaacaccagatcacggccccggatccccagtagaccccaccccctgtatcttccattggccgggcaccattccggccctccagcctccccggagattctgtcacggtccccccaacccagcagaccccattagtacccctcagagtcccttaggactcttaatggagcttctagactacgttacatcctcccttgggctgacgtgattacagttctcaggcaaagtctcgaccgccccctaacccattgcgtcccccatgtgcccctcgccctactcttcttagtagaacccctcccagctcgctcatcaccaagccgactagcactaaccctagccatcacggctttcagatagccgctgtcatggtgttcttactcccggtagatgtggtgtcagtccctctagacaccgtcacagactttggcttctctcccaccaccgactgtagcctctctcaacagacctctcctcaagcaaaccttgttatctttctccttagtcgcgatcctttctttggttgaaagggctttgccatgaaatcctgagggaatatttgcttagcctaatgtattccctccattgtggcttaaggggaccgaccgagacccatgtttggaggggttgggctgaaaaaagtgggaggcagagtgaagttatggaagcatgaggccagttgtgtgtgtgccattataaggtcacagagcctgcacctcgtcttgtctgttctgtgtagaacgtgtgaggttgtccagcactgatgttttagggacctctgtaaggattaaatcacgttgcactagtggatataactatgtcgtcttgtagtattacttcacctccttgtcgattgctgcagatactagaactgtttcttatttttatttttaaaggatactaggggactttttttggattcactgttttttggatttgctagaaaaataagatttgtagcattccttaatccctgaatgcttcgatgtcggtttaataataaacttctgttgcctggtgctgctgtcttgcttctccaagaagcaagtacagaaatcatgcagtgttcactgaggtcattaccaacaacagccttctcaatagcagtaaaatgttgaataaaatgtttgtagaagttgagctcctgagttgtcaagaaagaaatgtaatgttgcatcaaatgatcagtacgtaattttaatattggtataaagatgaaatataaagaggtctttgtagtcatacacacacacacagt

SEQ ID NO: 1242378 - DNA, 4001 bp, Homo sapiens
gcgagcgtggtgggactggctccaggcacacaggcgaagggcaagagggttggacacgaagccacaaagctacttgggttcctccttcttctcgtttgcctttttctgcttctgctgcatgatctccgagtccctgggggtagagatgatggggcactgggaggtaccagagggcaaaaaggacaagatgcagggggatgaagggcacaaaggataagatggaagtggatgggactaagttcagcgtttggctgctgtactcccaccctaggagaacaagaggaagagagctgaggctcaaaaggcgaccagtctccatctggctgttgcccaaggggtcagaagtctggtgacacaggcccaagggtctctattctgtattgaggaccacacccagcaacaccagtgaggaggttgggagaagggaggagaaccgaacagcaaggagggccaaaagtactgggctgccgtaaccacaactgtatttgaaatgtgaagctccctgcccttgcccttaaggtcagacccagggacgctcagaaatcagactgagggcaggcgcccgcccccgtcctttcctgtaaggctgtgagctaacaatttggagggtggggaggaaataaaaccctagaggaagcaatgcactctgctcctcacgactagtccacattcaagccctgaggtagctctctttccttctataacccttggtctaacccaggtctccaccgtccctttccctcccctccctggggctacctctgcttgcgggcggcagcagaaagcccgtcatctcggcgctttcccttaaccgagtcgctctgctttttcatattcttctggcgggcgagctcacgctggttaccgcctaaggaaagaaaattaaaggtgagacgcgggggccgctctgcccacacaccggcgacccttctaccccagcgcggccagcagcaggatccaacaccacttcaatctccgggccccgacaacggcccatcgaggcccaggctgcttggggtaggggggagtggcgaatctgccacgggccaggtcaaaatacggactagagaagggaggtcccaaggggccagctggaggcgtgttttggggcggcgtggggcccaaacagctggcaaggtgtgtgtggacggtttgggtctccgtgggggatgggctggcttgtggagtgggggctctgggcctatcacaggggcgctggccttctccttacaccgcggaagatccgggagggcctatgcctaacccgggagggtggtcccgtgaagtagccgtgggcaaagggctcgatttccgggcaccgagtgtgagggtggccacagagcgcgcccagagaaacgccttgctagggaagctacggaaggtcaaagccggcgcctcgccggtggtgtttagggtgaacggaaagaaaagggcaaggagaagggggctcggtgctcacgggtcatggcgacggcagcggctccaacctgcctccgttacgtcccctcgttctgtcggacgttgcaggtcccgccccttctggcaacgtagcacagtcgttcctttcctccccgccccttcgcgcccgggagccggctcccattggacaagaaaaagcacgtggatccacgggtcgtgcttgagccggggtgggtaagtggcggagggtcgcaggcggagcgctcagcgtggggcggggcttcccgagtgagacgtagggacgggcctggagaaactaggccgggtcacgtgggcaggttgggggtggaggggtgcggctggcgatgtggcgctcccgcgggctcgagcacgtgaccgtgcagagtgacctcatgcggggacagtttggggtactgacaaagtcgccctgaaagaacgcccgtagacaagagggcggggtttcagccagttctgtgttacgagtactctactactaaacttgtgcttacttaggaccacctctcagccacttatttggacacgagttgttcacagctcgcttaaaatcaagtacaaacacaacttcagaaacccgcttctactcccattgtccccttccacgccccttcactgtagaaaatcgcagcaacatctggtatttcctaaaactctaccctgttcgttttcccccagaaactttaaatgtgaacatgcagcttggaagtattggaggactccaaaagtcacagactatggagttggatcagtggctgagattagataattcacatattcgcttttcccctctggagcttttcttactgtaccatcgccaccagccacccggttttgtattaagaccctggagggccgggcgtggtggctcacgcctgtaatcccagcactttgggaggctgaggtgggcagatcagaaggtcaggagttcgagaccagcagcctgaccaacaatggtgaaaaccctaaaaatacaaaaaattagccgggcgtggtggcgcgcctgtaattccagctacttgggaggctgaggcaggagaatcgcttgaacccgggaggcggaagttgcagtgagccgagatcgcgccattgcactccagcccaggcgacagtgcgagatcccgtctaaaaaaaaagttaataagaattagccgggcgtggtggcgggcgcctgtagtcccagctactcaggaggctgaggcaggagaatggcgtgaacccggtagatggagcttgcagtgagccgagatcgcaccactgcactctagcctgggcgacagagcgagactgcatctcaaaaaaaaaagagttaataagaaaggctgggcaaggtggctcacgcctgtaatcccagcactttgggaggcagaggcgggtggatcacgaggtcaggacatcgagaccatcctggctaacacggtaaaaccccgtctctactaaaaatacaaaaaaaaaaaatagctgggtgtggtggcaggcgcctgtagtcccagctacttgagaggctgaggccggagaaccgtgtgaacccaggagcagcagcttgcagtgagccgagatcacgccactgccctccagcctgggcgacagagccagactccatctcaaaataaataataaataaacagttaataagagacacccaagctggagtgcattggcgtgatctcggctcactgcaacctctgcttcctgtgttcaagctattctcccacctcagcctcccaagtagctgcgattacaggcacccgccatcatgcccggctaatttttgtatttttgtttttctggagatgggattccatcatgttggctaggctggtctggaactcctgacctcaggtgatccgccctccttggccccccaaagtgcaaggattacaggtgtgagccacggtgcacagccacaattgggtatatcttgatgagcacagcatattcctataatcatgaaagatacagagaaaaaagctctctcacactttctctctctccctctccctgtctgcctctctctctctaatatccatatatgtatttatatgtctgtctatatatatgaatttttggttttttttgagacagtcttactctgttacccaggctggaggctggagtggtatgctctcggctcactgcaacctccaccatcttgtattcaagcgattctcctttctcagcctcccgagtagctgggattacaggcacccgccaccacgcccggataattttttttttttttttttgagatggagtcttgctctgtcgcccaggttggagtacagtggtgcgatttcggctcactgcaacctccacctcccaggttcaagcaattctcctgcctcagcttcccgagtagctgggcctacaggtgcgtgccaccacgctcggctaatttttgtattttttagtagagacaggctttaaccatgttggtcaggctggtctcaaactcctgacctcaggtgatccacctgcctcggcctcccacagtgctgggataacaggtgcaagccactgtgctcggactgtatttttttttagta

SEQ ID NO: 1242379 - DNA, 4001 bp, Homo sapiens
cccctcacccccgggagtggcccagggggagagaggctacctgaggggaaggaagcacaaaagggacccgctgcagactcagggcaaagggaatgccatcggtgctgggacctgtgagcactacaggaggaaacgcgagcgtggtgggactggctccaggcacacaggcgaagggcaagagggttggacacgaagccacaaagctacttgggttcctccttcttctcgtttgcctttttctgcttctgctgcatgatctccgagtccctgggggtagagatgatggggcactgggaggtaccagagggcaaaaaggacaagatgcagggggatgaagggcacaaaggataagatggaagtggatgggactaagttcagcgtttggctgctgtactcccaccctaggagaacaagaggaagagagctgaggctcaaaaggcgaccagtctccatctggctgttgcccaaggggtcagaagtctggtgacacaggcccaagggtctctattctgtattgaggaccacacccagcaacaccagtgaggaggttgggagaagggaggagaaccgaacagcaaggagggccaaaagtactgggctgccgtaaccacaactgtatttgaaatgtgaagctccctgcccttgcccttaaggtcagacccagggacgctcagaaatcagactgagggcaggcgcccgcccccgtcctttcctgtaaggctgtgagctaacaatttggagggtggggaggaaataaaaccctagaggaagcaatgcactctgctcctcacgactagtccacattcaagccctgaggtagctctctttccttctataacccttggtctaacccaggtctccaccgtccctttccctcccctccctggggctacctctgcttgcgggcggcagcagaaagcccgtcatctcggcgctttcccttaaccgagtcgctctgctttttcatattcttctggcgggcgagctcacgctggttaccgcctaaggaaagaaaattaaaggtgagacgcgggggccgctctgcccacacaccggcgacccttctaccccagcgcggccagcagcaggatccaacaccacttcaatctccgggccccgacaacggcccatcgaggcccaggctgcttggggtaggggggagtggcgaatctgccacgggccaggtcaaaatacggactagagaagggaggtcccaaggggccagctggaggcgtgttttggggcggcgtggggcccaaacagctggcaaggtgtgtgtggacggtttgggtctccgtgggggatgggctggcttgtggagtgggggctctgggcctatcacaggggcgctggccttctccttacaccgcggaagatccgggagggcctatgcctaacccgggagggtggtcccgtgaagtagccgtgggcaaagggctcgatttccgggcaccgagtgtgagggtggccacagagcgcgcccagagaaacgccttgctagggaagctacggaaggtcaaagccggcgcctcgccggtggtgtttagggtgaacggaaagaaaagggcaaggagaagggggctcggtgctcacgggtcatggcgacggcagcggctccaacctgcctccgttacgtcccctcgttctgtcggacgttgcaggtcccgccccttctggcaacgtagcacagtcgttcctttcctccccgccccttcgcgcccgggagccggctcccattggacaagaaaaagcacgtggatccacgggtcgtgcttgagccggggtgggtaagtggcggagggtcgcaggcggagcgctcagcgtggggcggggcttcccgagtgagacgtagggacgggcctggagaaactaggccgggtcacgtgggcaggttgggggtggaggggtgcggctggcgatgtggcgctcccgcgggctcgagcacgtgaccgtgcagagtgacctcatgcggggacagtttggggtactgacaaagtcgccctgaaagaacgcccgtagacaagagggcggggtttcagccagttctgtgttacgagtactctactactaaacttgtgcttacttaggaccacctctcagccacttatttggacacgagttgttcacagctcgcttaaaatcaagtacaaacacaacttcagaaacccgcttctactcccattgtccccttccacgccccttcactgtagaaaatcgcagcaacatctggtatttcctaaaactctaccctgttcgttttcccccagaaactttaaatgtgaacatgcagcttggaagtattggaggactccaaaagtcacagactatggagttggatcagtggctgagattagataattcacatattcgcttttcccctctggagcttttcttactgtaccatcgccaccagccacccggttttgtattaagaccctggagggccgggcgtggtggctcacgcctgtaatcccagcactttgggaggctgaggtgggcagatcagaaggtcaggagttcgagaccagcagcctgaccaacaatggtgaaaaccctaaaaatacaaaaaattagccgggcgtggtggcgcgcctgtaattccagctacttgggaggctgaggcaggagaatcgcttgaacccgggaggcggaagttgcagtgagccgagatcgcgccattgcactccagcccaggcgacagtgcgagatcccgtctaaaaaaaaagttaataagaattagccgggcgtggtggcgggcgcctgtagtcccagctactcaggaggctgaggcaggagaatggcgtgaacccggtagatggagcttgcagtgagccgagatcgcaccactgcactctagcctgggcgacagagcgagactgcatctcaaaaaaaaaagagttaataagaaaggctgggcaaggtggctcacgcctgtaatcccagcactttgggaggcagaggcgggtggatcacgaggtcaggacatcgagaccatcctggctaacacggtaaaaccccgtctctactaaaaatacaaaaaaaaaaaatagctgggtgtggtggcaggcgcctgtagtcccagctacttgagaggctgaggccggagaaccgtgtgaacccaggagcagcagcttgcagtgagccgagatcacgccactgccctccagcctgggcgacagagccagactccatctcaaaataaataataaataaacagttaataagagacacccaagctggagtgcattggcgtgatctcggctcactgcaacctctgcttcctgtgttcaagctattctcccacctcagcctcccaagtagctgcgattacaggcacccgccatcatgcccggctaatttttgtatttttgtttttctggagatgggattccatcatgttggctaggctggtctggaactcctgacctcaggtgatccgccctccttggccccccaaagtgcaaggattacaggtgtgagccacggtgcacagccacaattgggtatatcttgatgagcacagcatattcctataatcatgaaagatacagagaaaaaagctctctcacactttctctctctccctctccctgtctgcctctctctctctaatatccatatatgtatttatatgtctgtctatatatatgaatttttggttttttttgagacagtcttactctgttacccaggctggaggctggagtggtatgctctcggctcactgcaacctccaccatcttgtattcaagcgattctcctttctcagcctcccgagtagctgggattacaggcacccgccaccacgcccggataattttttttttttttttttgagatggagtcttgctctgtcgcccaggttggagtacagtggtgcgatttcggctcactgcaacctccacctcccaggttcaagcaattctcctgcctcagcttcccgagtagctgggcctacaggtgcgtgccaccacgctcggctaatttttgtattttttagt

SEQ ID NO: 1242380 - DNA, 4001 bp, Homo sapiens
tgacctcaaacctattcaagggcactactgcagtaaatctcctacaccatcaaaattttggagatgttctaaaaattatttccgtcaacatggaacatgctatttctcccatcttaaaactttttcttgatcctatttcctccaccatgactcccatttctctgtccccgtattcagcaaaactcaggtttctttttgagatggagtctcactccagcctaagctggagtggagtggcgtgatctcagctcactgcaacattcacctctggggctcaagcgattctcctgcctcagcctcccaagtagctgggactacaggtgtgcgccaccacacctggttaatttttttgtagttttagtagagacagggtttcaccatgttgccctgggtggtctcgaactcctgagctcaggtaatccacctgcctcagcctcccaaagtgctgggattacaggcatgagctaccgcacccagcctcttttttttttttttttttttttttttttttttttgagatggaatctgccagcgcgcctggcctttttttctttttttgagacagggtctctctctgttgctcaggctgaagttcagtggcgaaaacatggctcactgcaacctgattcatggattcaagcgatcctcctgcttcagcctcctgagtagctgggactacaggcatgcaccgccatgcccagctaagagaccagctttatccattaccacaactgtttatcagattaggatattgccgcagagaaacagaaatagcacagattttaaagatcaactttattgaagtataatttacatacaaattttatgtgtattagccgggcgcggtggctcatccctgtaatcccagcactttgggaagccgaggcgggtggatcacgaggtcaggagatcaaaaccatcctggctaacacggtgaaaccccatctctactaaaaatacaaaacattagccaggcgtggtggtgggtgcccgtagtcccagttactcgggaggctgaggcaggagaatggcgtgaacccaggaggcggggcttgcagtgagcggagatcgtgccactgcactccagcctgggcgacagagcaagacttcgtctcaaaaaaaaaaaaaaaaatgtattttttttttatgagttttgacaaatgtataggtaattttatttgtagtagaggacgttaaggttcccggggattgtgcaggtccagggatttaacagagggatcctgtttaggaaacaggacaacatcggggctcttgggaaacataatcaaacaggaacaagtggagacaccaagggctggccagaggttggtgctggggtctcagtgcaccaggatctggccctctggaatgcctggcgacttcatggcagctcctggccctcctcagggagcggtctcaccactctgacgcgtgtttaggccacgaggtgagacctaggactgggttctggctctctgccctgcaactttcctgccactacccgcgcccgtatccctgcccaccaactgggggcgctccagtcggtgacagccaactttcactgctgccaccacaaccgcagggccccaattacctctctgttagaaatcggtttcagagcggtggaaccgcgggcgggaaaaagcccaggcgctgtctcgggtgccccttcgtgtcagccatcctctggtctctcgggtctccgaagctcggggctaactgggcgcgaaccgctgagcccgcctaccaaccaggccctttctcccgcccctctgcggctgaaaccctcaaggggttgcaggttcagctttcacttagagacagcaactccaaattcagggtcgctggggaaactaaggcaggactggggactctgagtgagaggtcagacgctggtcgcggactctttctcccgagaactggggatagctcttccgatagcccaaagcgattcatgcggatcctagaagaaagcgccgaggtccgggcggttggccggggagagcgaagcgccgcccacgcggctgggaaagcttggggtggcgctggcgggaggtggggccgggggcgggttcctggcggagggtggggcagacgtgggttaccgggtgtgccaaccaaaccctgaacagaggaggtggcggtggtggccctcgcctgtggcccccgtgctgcttgcactcgaactcgtcgccatggaggagctccaggagcctctgagaggacagctccggctctgcttcacgcaagctgcccggactagcctcttactgctcaggctcaacgacgctgccctgcgggcgctgcaagagtgtcagcggcaacaggtacggccggcccccttcttctctagtcactgcccctagggaccttgggcctcagccggcgaccctggagaaggtgcaggggagagggagcggcttccgcaagctctggcctccccacctctccaagtgaagcccgctaggcaggtgatcccgggctccggacgccggatcctggggacactgcttcacctgcgctcaacggtcacatcttcgctctccccgcaggtacggccggtgattgctttccaaggccaccgaggggtaagtgcgagctcagggtgtgtgagcgaggtgagggcgagggagcataaacgtgggctggaggtggaaggtgcggtcggggccggaggctgcgagtagtcacggtctgaggtagttccgataactgaactccaagtggggcgaggaggctgctggggttgtcccagggggctgtggtttgaggggactgtgctgtttcggcctcctggggaactcaggcccagctgcacctggtgtgctaacaagccctgtgggacccgtcttagtcttacttacggactggctcccggacgagtggcggcggcaggagggggaggggctgacttcatggggcttaccgtctccttccacccccagtatctgagactcccaggccctggttggtcctgcctcttctccttcatagtgtcccagtgttgtcaggagggcgctggtggtagcttggaccttgtgtgccaacgcttcctcaggtgagggggaacaggtagccggcaagaaagggtttgtggaaagtgggggagggaaatgtggagaggtgcttaagaggtctccaccctcctatttttttccaccatccttttccaggtctgggcctaacagcctccactgcctgggctcactcagggagcgcctcattatttgggcagccatggattctatcccagccccatcatcagttcagggacacaacctgactgaagatgccagacatcctgagagttggcagaacacaggaggctattctgaaggagatgcagtatcacagccacagatggcactagaggaggtgggtgaggccagaaattgcagggagttgtgataaggtggggcaaagcctgaagtccaaggtatcccagtactccagggaaccaagtgctcctgccactttccccaccaggtgtcagtgtcagatccactggcaagcaaccaaggacagtcactcccaggatcctcaagggagcacatggcacagtgggaagtgaggtactttggatggggtgggactaacatgggaagctttggcattgtcttcctttctaatctccactcttaaatgttgtaataaaagatccagttccacctcctaccctggtcttcatctgtcccattcccttaaaatatcctagaagccagacccatgttccaaacagagaacctgttcaggcactgccttcctctgccagccggaaacgtctggacaaggtaagttagaatggcaagggctttttttttgtaacattaatataattaaacagtggcaaagactattttgaaaagcacttttagtcaagctaaaatttagaaattggaagctcgttatatgggaggaatttttttagagacaaggtctctctgttccccaggctggagactcctgggctcaggccatcctttttttttttcttattctca

SEQ ID NO: 1242381 - DNA, 4001 bp, Homo sapiens
caaactgaggaagaatgaggaaaagaggcataaacacagatcttgcagcattcactcttaggccaactccatcctagagatggtgttcaagggtggggaacaaaaatcacagaaaagaagtctctatggttcttagaggattcctctactgcatatccggagtacttgtttggttgtcattgtataataaaggcttcttctgtgatgtttcacttattaagtctacatacccacaatctgaatctaaagagttctcccttttttggtgggaaagggcagtcattcttccaaccccatccccccaagtccccagtcaaaccaggcgctcaaggaattacaaagctacttttaatactttggggtgagccccacaggaataaaaaacactgggaaggggtaaccccctcacccccgggagtggcccagggggagagaggctacctgaggggaaggaagcacaaaagggacccgctgcagactcagggcaaagggaatgccatcggtgctgggacctgtgagcactacaggaggaaacgcgagcgtggtgggactggctccaggcacacaggcgaagggcaagagggttggacacgaagccacaaagctacttgggttcctccttcttctcgtttgcctttttctgcttctgctgcatgatctccgagtccctgggggtagagatgatggggcactgggaggtaccagagggcaaaaaggacaagatgcagggggatgaagggcacaaaggataagatggaagtggatgggactaagttcagcgtttggctgctgtactcccaccctaggagaacaagaggaagagagctgaggctcaaaaggcgaccagtctccatctggctgttgcccaaggggtcagaagtctggtgacacaggcccaagggtctctattctgtattgaggaccacacccagcaacaccagtgaggaggttgggagaagggaggagaaccgaacagcaaggagggccaaaagtactgggctgccgtaaccacaactgtatttgaaatgtgaagctccctgcccttgcccttaaggtcagacccagggacgctcagaaatcagactgagggcaggcgcccgcccccgtcctttcctgtaaggctgtgagctaacaatttggagggtggggaggaaataaaaccctagaggaagcaatgcactctgctcctcacgactagtccacattcaagccctgaggtagctctctttccttctataacccttggtctaacccaggtctccaccgtccctttccctcccctccctggggctacctctgcttgcgggcggcagcagaaagcccgtcatctcggcgctttcccttaaccgagtcgctctgctttttcatattcttctggcgggcgagctcacgctggttaccgcctaaggaaagaaaattaaaggtgagacgcgggggccgctctgcccacacaccggcgacccttctaccccagcgcggccagcagcaggatccaacaccacttcaatctccgggccccgacaacggcccatcgaggcccaggctgcttggggtaggggggagtggcgaatctgccacgggccaggtcaaaatacggactagagaagggaggtcccaaggggccagctggaggcgtgttttggggcggcgtggggcccaaacagctggcaaggtgtgtgtggacggtttgggtctccgtgggggatgggctggcttgtggagtgggggctctgggcctatcacaggggcgctggccttctccttacaccgcggaagatccgggagggcctatgcctaacccgggagggtggtcccgtgaagtagccgtgggcaaagggctcgatttccgggcaccgagtgtgagggtggccacagagcgcgcccagagaaacgccttgctagggaagctacggaaggtcaaagccggcgcctcgccggtggtgtttagggtgaacggaaagaaaagggcaaggagaagggggctcggtgctcacgggtcatggcgacggcagcggctccaacctgcctccgttacgtcccctcgttctgtcggacgttgcaggtcccgccccttctggcaacgtagcacagtcgttcctttcctccccgccccttcgcgcccgggagccggctcccattggacaagaaaaagcacgtggatccacgggtcgtgcttgagccggggtgggtaagtggcggagggtcgcaggcggagcgctcagcgtggggcggggcttcccgagtgagacgtagggacgggcctggagaaactaggccgggtcacgtgggcaggttgggggtggaggggtgcggctggcgatgtggcgctcccgcgggctcgagcacgtgaccgtgcagagtgacctcatgcggggacagtttggggtactgacaaagtcgccctgaaagaacgcccgtagacaagagggcggggtttcagccagttctgtgttacgagtactctactactaaacttgtgcttacttaggaccacctctcagccacttatttggacacgagttgttcacagctcgcttaaaatcaagtacaaacacaacttcagaaacccgcttctactcccattgtccccttccacgccccttcactgtagaaaatcgcagcaacatctggtatttcctaaaactctaccctgttcgttttcccccagaaactttaaatgtgaacatgcagcttggaagtattggaggactccaaaagtcacagactatggagttggatcagtggctgagattagataattcacatattcgcttttcccctctggagcttttcttactgtaccatcgccaccagccacccggttttgtattaagaccctggagggccgggcgtggtggctcacgcctgtaatcccagcactttgggaggctgaggtgggcagatcagaaggtcaggagttcgagaccagcagcctgaccaacaatggtgaaaaccctaaaaatacaaaaaattagccgggcgtggtggcgcgcctgtaattccagctacttgggaggctgaggcaggagaatcgcttgaacccgggaggcggaagttgcagtgagccgagatcgcgccattgcactccagcccaggcgacagtgcgagatcccgtctaaaaaaaaagttaataagaattagccgggcgtggtggcgggcgcctgtagtcccagctactcaggaggctgaggcaggagaatggcgtgaacccggtagatggagcttgcagtgagccgagatcgcaccactgcactctagcctgggcgacagagcgagactgcatctcaaaaaaaaaagagttaataagaaaggctgggcaaggtggctcacgcctgtaatcccagcactttgggaggcagaggcgggtggatcacgaggtcaggacatcgagaccatcctggctaacacggtaaaaccccgtctctactaaaaatacaaaaaaaaaaaatagctgggtgtggtggcaggcgcctgtagtcccagctacttgagaggctgaggccggagaaccgtgtgaacccaggagcagcagcttgcagtgagccgagatcacgccactgccctccagcctgggcgacagagccagactccatctcaaaataaataataaataaacagttaataagagacacccaagctggagtgcattggcgtgatctcggctcactgcaacctctgcttcctgtgttcaagctattctcccacctcagcctcccaagtagctgcgattacaggcacccgccatcatgcccggctaatttttgtatttttgtttttctggagatgggattccatcatgttggctaggctggtctggaactcctgacctcaggtgatccgccctccttggccccccaaagtgcaaggattacaggtgtgagccacggtgcacagccacaattgggtatatcttgatgagcacagcatattcctataatcatgaaagatacagagaaaaaagctctctcacactttctctctctccctctccctgtctgcct

SEQ ID NO: 1242382 - DNA, 4001 bp, Homo sapiens
agagtgcagtggtgtgatttcagctcactgcaacctctgcctcccgggttcaagtgattcttctgcctccacctcctgagcagctgggattacaggtgcgtgccaccatgcccggctaatattttgtatttttagtagagatggggtttcaccatgttagccaggattgtcttgatctcttgacctcgtgatccgcccgcctcagcctcccaaagtgctgggattacaggcgtgagccactgcacccggccattactcctcttcttacccacttgttatcttagaaaacttagcctactcctgccaagagtgtgggagggagagtacctgggaagagatgctcatcaggaatgcagaaggcaatagcacagagacctaacaggaacagcagcttgaggagccagaagctggttaggagggagaaagaaaaacagactcaggagaaaaggcaaaggacagtgaagagtgcctatggggaaaggcaaaagagaaaccaaaaatataggaaagaggacagacgagacaactaaggaggaaccaatcccaaatgagagggggttgggacaggcctactgcaccttattccaaattctaactcaaagatacttaatagcatctgggcaatgttttacagtttataaaggattgtgttaccaagataaccccactgttacctccattttagatgctagaagcacaaagtctggctcaaggttacacagcaagtacacgagaagcagggacttaaacctgttttctgtctttttacagtgctattacttcatcccggaatttcctttacccagcctatgtctactttccctcctctgtcccctccccacccagaaagtacacacaaacctattatgcagctgtgcccgcgggctggtgggggagtggaggtggaccagcaacacagcctgcagcaggtggaaggtggcggttcctgcacatactcggtacacagccccagagccactgagcactggacagtcagagaggccaaacaggtgggcacacaaccccgagggcatctggatctgggagtgtgtgtgagagaaatggcaggacaagtcataatgcatggaaaggtacctacttgtcacgggtatgaccactcatttgtctcctgcccccaaccgaaaccttttctatcttagggtttttccttttatctcttcccacctgacaacccgaccccctctcacttaccctgtgtgtcttgccccacaccctttccactactgtccttgacagcaggaggcagcagattgctgaggcccccacatggaggaggatgtagaacaggcggctgcaagtggatgcggtgagagagggccacctagagtggcagcagctggcacaaggagcaggcccacagcagcacacctgggagtagagcagatgcaaggcagcgaggtggagacttgctgaggaaaggcatacgttaatgtatgtgtgaggttaacccaggaggttgaattccaaaatttccccttcccctttcttccttttactcaggttctgtttcaagctgattccagccatttgggattgccgcccactgacaacttagtagggctttcattataagcaggcttgagatatctgacctttctctcgacctaaacacctggggctggaaacatggcgggagagatttacagattatacctggggcaacgaaccagaacgacattagaggagaaaagaggcctgtcgtttttattggcttctgcacgtcttcctccccagcttcggccactctccccttcgcaccctctcacctgacagaagggacttttcactaggacactgctgcctccgctgtgctgctgtgccaggcccagggaggtgccggggctggggccggccttggcacccaccatccttgtcccagggattaggcttaggtccaccagatggaaggcagatgagagcagcagttgcttctgtcctcagcccattggactgccactgtgttggggctgagcacccggtcccgggcagaatggagacgtccggaagagaacactgacctccaggttgcggtaaatgcaaatgccctgtgaaggagctttgtccttagggcctcaacactgcggccactcaggctgttctctccagattagggggcagtttgtctatctggccccctgtggattagcattctttattggtttaggattagacgtcattcaggttgaacggagttccctgaggtgggtgggtgcgtgtttatgtgttgaggggactattcctagtttatgaggtggttaaggatatcggtggggtgggctggagcggtgtcgggttaggtctgagagaaggcctcgcacaaaacactgtacaaacccgaaaggaagtctgagagacgaaccgccttcctccctgaagcttctagaactggagcagaaagaaggtgtggcccagggccagccccgcctcctccccgggcggaagctgtgtcagttgccggaagtcggcgtgaggtggggcttatgcggcggcgtggtgaaatagatatggcgaccgagggggatgtggagctggagttggagactgagaccagtggaccagagcggcctccggagaagccacggaaacatgacagcggtgcggcggacttggagcgggtcaccgactatgcagaggagaaggagatccagagttccaatctggagacggtaaggttggccaagagcatgtcggggcgggctgagagcagaggggggctctgaggctgtagctggaagccagcgctccaagacggggttctgatcccgttggcaggaggaggcaatagggtagagccgagggaaacagcggtcaccggagcgcgccgcttgcctaaaggagcttgatagtgggcttaaggggacctcaggtgcatagaatggaattaaacatagtccttgctacctggtaacacttgtcatcgtgaatccatgcatgaaccgcttgttttgttggccttttagattattgggaattgtgggtagcggtgcagtaactagacctgcctttcccataggccatgtctgtgattggagacagaaggtcccgggagcagaaagccaaacaggagcggtaagtcttcaggggcagccaactttaacagttcttccctccccggtccccagacaaaaataaaaaccattattaagcctttataccgttcttcaaatttatcaccaattcctgcagatctaggcgccacaactttactcttgttagcagaaggcctcctggcaacacctgctgccaagactccaggggaaaggagtattagtgggagtttttattttcaatcaagggtttatcaagatttatttacagggcacttctgggaatgacccttcctgggagtttatggtgttggttgagaatgaggactaatatatttaaatatttttgcagggagaaagaactggcaaaagtcactatcaagaaggaagatctggagctaatagtgagtggtagtgcctaactagtgtatgcggaggggaggctattctgcttaatttgggttgtttcctgaaacaagcggagtcagtatatttggtggcacattaatgcctgggaacctatgtaacatgatttttttctgcagatgactgagatggagatatctcgagcagcagcagaacgcagtttgcgggaacacatgggcaacgtggtagaggcgcttattgccctaaccaactgatgcgtgctttctcaaatatacctactggattaatttatggcaataaaatttttttttgtctttttcagttttatcatcttgggtcaagtagagtgtatactatatcctatgttgtggagaatttatatgttggagactaactgaatttaagtgacccattaaaatctagcacacctgtatgaaaaatcagtgtagaagaatacctcatgtgcagatgctaggtggcaggccagtctcattcatctgactagctctcaacagtattcaaggtacatctggagtctcagcagag

SEQ ID NO: 1242383 - DNA, 4001 bp, Homo sapiens
agctcccccagcacccttgtctttcatgcctctgtatttttgcacatggcgttccatctaccagagataccctcctaaaccccaaccacaccctcctttctgcctagcaacttgtattcttccttctatcctaggctcaaagttcacctctgtgaagcctccccgaaccccactcacctcctttgaaggccgtgtcttcatccctagtatatggccagtgctgctcaggaagtgtctgctgagcatgtgatggatgattgagggattcaggagtcaggacccagggaaatctaggcaatttgggccagtggggcctctgcactaatctgcaaggctaggttatggtaggatgagcttgcttgcccagagggcttcccctcttacctgtaggacaagatgtagccagtggctcggtcactgaggcggataaggaaggaaccaagagctttgtccctgagtagctgctccgtctgcctgggcagaagacatgccattagctggggtctgtgccctaatggcagcaggtgcagcctgacttaggcctctcttggaatccctgctggccatgcctttgggttccagacctccaaccctttatagaggagccactcagacctgtggatgggtctgtggcctgtcagggttcagcatgtggcctatctgagcccaaatgattaagttcaagactgtctggggctgggtcagggtctgaagccatatgcaacccccccaactccccactgcagcctcactagcaggcacattggttgctgaccctggccacccactctccacctggatggttgtgtagcaagaataaatccacacagctggagatgttgaggtttagtggggagtccctccctcagaaccactgtgtacagtgctgcaggatgtgcactacacacaagcttctgcagggagaagatgctgctgtgtctgaagcagctaaaagggactcattcctcttcctgtccccttcaatcccaggcagttacagagattttccacatggtgccaaatactttggaggcatgaagaaaagttccagctgtcttgtggtttggcagtacacagaccagatatgtattccctcactcacttactcaccaaataccgagcgcctgttctacgcagctaaatcatttgcaggaccaggtgctaaatgaaaacatggggcccctggttcaaaacgatttagagtttccagacagtgacagcagagcattaaaccaaatgtggagcccttttgaccctgtgctgctgcacgagtcagtgaccataaagctggccctggctctgtgcaggtgctgtgccaggacctaaggactggctggatttgccattccttcatcaggtgttttggctgcttggagacccagcccaaatagaaagccaaacctgtatcttggcctttatacctaggataaccatgcatccaggtttgcctgggatggccccatttatgacggttctcctagcttagttactaatagtgttccggtttggacgataaaagatatggtcccctagttactcatcaagtcagggcctggccctctttctgtcctctggcagcctggcagccccagccatcctcaacttgtactaaagtagaggccgttgccctccccgactctgcctacagaagccaccaccagaggatgtggcgctcctcagtctgttcccctgccccccgcctccaagggcccctgcctagcccagggaaaggatgggaaccagtctgatccagagttcccagaccattttctcagccccaaggggctgtgggctatgagggacctgtgggtagaagcagccttacttgcgggtgatgaatccatgaaaccagggaggcagggcaccgttctgcagaatgaagggggcctgtgtctccatgaaccacttcagggcaagctcctggagctcagccagggcctggctgtcccctgccccctcaggatctctccccaggctgagctgctttaggctgtcctccatgctggcaggcaccagagtggaagcagagcgcagccagtgcacatgcctctatatctgcgtgtgctctggctcatttgcctgagcccgtgccctacccaagggcccatagcacacagcagccccattgtcacctctgggctggtggctggttctctcctctgatgctttggggtggggcaccttggctggctgcagacatgggggaacaatcaccgtagcagcctgagaggggtagggaaggccctccgtggcttcctggccagcagataagctacctcactgggtttggccctgttccccacaacctcctgtctttgtcacaactaaagatcagaccctggcaaaagtccacagcactgcccctgggagcaaagcagtggatttaaattctaggtatccttccttcgtggaggctatttttattttgatggagaagttctgtgctaaccaagtcttccatccactcaagatttattgagtccttactgtgtgccatgtaaatctgggccctgggaataaagcagtgaataaaacagcactttgccctcatggcacatacattctagagggagacaaacaaatatatgtgtagaatatagagtcaaatggaataagcactccaagacaaaggcagaagaacaagagagcacatgggctgcattatgcagacacagagtcaggggtcggggtcagccttgtccaggaggtgacactgaacagtgaaggaggaagccaagcatgtacctaggggagtagactcttgtcagcagggggaaagcatgtgcaaagacgaagaggtgggactttgttgcagattttgaagaaaaaacagaagctcatgtcgttttaacagagaggggactttggagtagatgggtcccctggaaaggcagggataggcctgtggtaggaagctttggagcagttagggcaatgggaccatttgttcacacaaacatccctgagtatctaatgtgtttctgagtttcctagcagaaatccaggccgggtggatggtaaggcagcagatggtgcagtcagcctcaaggatcttggtgatactcccacttccaccacacactgatgtgagaccaccctgggcaagtagctgggactgacgtggggtctcaagaaacttactaaattgttgcagagaactcaatttcctcatctgtaaaatgggcatgaggcaaagctattttctagactctagggtcattatgaggactaagtgagagggcataatggttgataatgaaggggcatttatataagttcaaaaataggatgcaggtactgttacaatatgactgaagtgatttgttgtcatttcccctgcttaaagcccttgatatataactatctctgtctaactcattctgaagtaagacagagatgcttggtttcatttttccttgaggccagacctgtaatcccagtactttgggagcacaaggtgggaggatcacttgaggccaggagttcatggccagcctgggcaacatagtgagcccctgtatctaaaaagaaaaaggcagaactaatcaatggcgatagaagttaagatagtggttaccttggggactgggtggggagcgaaaagctgctggtgctgacagtgttctgtttcttgatctggttggtgggttgagtgagtgtggattgagtgagttgagtgagagtgctcactgtgtgaagattcatggttcatgcatttttctatgtctatgttctacttcagtgaaaaagtttaaaaaaatgagggtgttacagccagatttccttggttcaaattccagcatactagctatatgaccttaaccaaatgatctaacttgtcctgctgttaggaaggttagattagttaaatccttagaacagtgtgtggaataacatagtgactaggattagctattaatttgatgatgatgatgatgatgatgatgatgatgatgatgatggtgatgcaagattctgaaatacagaaggtctgctcctgt

SEQ ID NO: 1242384 - DNA, 4001 bp, Homo sapiens
tgttgtgccaccccaaaatttcatctattcaataaatatttattgagtggtcactgctcaacaattactgggctaaacattgtccctaaatgggggtgctgtctagagtctgcctttaactcgctgtgccttttctcacttttgtctacacatacatttttaaatctccgcttaggctggaaatcaccaaaaatctgtagctccagtaccagcctcaccccctgagctgcaggtcaggatatgcaccccaacccaggccagtgacatgtgaatgtcccaaagacccctcaaagtccctgggttcagtggtgaatccatcatctccaccctcacctgaatagcctctcctccagggctccttaacaccttgaatagcaccactgtccacccagtgcccccagctagaaacagcatcacccagtttccatatggaaagagtgtgagtgaggggacagcagtgcctttcagcctggaactggggctagaagaagagaatcttctaattgcagttgctttctatgggccaatttgtgggagaagcaggatgagacctcaccacaaatgtggacgttgaatgaaatctgtctaccctggctctagcaaaatgggggctggggttgcggggagaggtggtgagaagcaacagacccagcggtgctggtggggaacaggttttacaacgtgagctctgccatagctggaagagcctgcaatgttgatgttgaaaaacaaatttgcttgtcatcaacacacacacacacacacacacacacacacacacacacatcaatttcatgtctcccctcctgttttcctgtttcctctgctcagaacggctttcctcctatcatcccacaccctcagccataattcttcctcatacttaattctcaaatgacatgtctcctcctccgggaagctctccctgacgcccccactgtgttatttgtcatcctctgtgcgtggaggtgtgtctagcactgtttgtttacgtgtctgtctccgtgtctcccctgcaggctgtcagctctgtaagagcagaagcgtgatgcccagccccgggccgacaccgggaagacggtggggaggggaaggaccgcggtagagagccccagccggggagccgggcacagtccagacggggccatttcgatgcgcgcgcggggagctcagcgggacacagccaagcgccaaatacacagcatctctggaggcgccggtggccggtggaggatgggccccccacgaggctctcccaaccaaacggctggagactcgggggaggccctgccggcatcgtactccctgtggtcgtcctcccctcgcgcgggtaggggcccccccacgcccactccgtctccgcctcccgagtccccgcggccgccacctctgccctccgctccgcagaatctctccgatttacaacggcccagggcagagccgggggccagggaatgggaaggagaaggcgccaagacgccgaggagagagcaggcggcccctcaccccaccctcgcgccctcctaggcgggaagaaattgagccccgagagaggcccttcagggaacaggagtcccaaaggcccgggagcctcggggggccgcagcctccgcgtccccctccctccttccctcctctgcgcctccctacctggctggctttgtggaactgcttcttcagcccggccaccgacatcgcgactgcgaccggcaggggcggggtggtctcaaggctcggctgggccacgcggccgcgacgcgctcggggagcgggagcccgggccggtccccccgcggctgggctccgccgggcccgcctcccacggccacggccacagccacagccgctgtcacactcgcacacacgcgcgcacgccgatggcaacactgcgttccaaagcccctgcgcagcccattggccaagccgcggcgatatgcaaatgaagctgctggggccgcccacgcttcattgttgcgtggagacctgggctacttgagccgcgcagaagaccggcctgggaagctgggcgtggggatgtcctgggggtcgggggagtacagtcacacagtgcttcttgctgggcgcgggacgatatagatctagctctgagattgtcatgggtaccgggagagagatcagttctctctgcttctgtcttggtgccgaaccggctttggctcacaggcaacatcgcctccctccggcgcattttcgctcggtgtatgtttaagaaaggaaggctcagaaatgcgcctagggagggacaacaaatgcaactcgatgggggacctgtggtaggaggaagcggtctgtgggtggcgggctttcttctctctccacgcggtgctctgggtgcaatctgctcaaatgattttggtcttctgggagccctagagttatggagtaatttactaataaatacggtgctagctcacttggtgctctgagcccgctgtcaacggcactaaaagcaaccatctccaaggtgccataaagagctcgttgcatatccggcggagtccaccagaccaggaacccagctctctcggtaacccctaccagctgtgtcagttacagagtgtccatttgcacagagtccagaggtcgacgcactcacagctaagcccagccagggacatggagcattgcgttaacctcgtgttagagctatccccaaaaggtacagcatcttcgctgaatctggcttccaaaggtcccgaggattcccaaacctagaatatatgtttggcaacgcttcacactgaaaaacaaaaacatttcccaccttcagtctctttttgggcccttagcaggtcccatctggggtgacgagcagtccctgtctgccctggacacttcgggtatatgcctgtgccctggtgtccacctgccataacatttctccaggacaaaagtcatgcagttcctcccctagctgttagctcccagcgcccagtcggggctagtcctaaccctgacttcatcctagtgaggactgggcaagtaagtacacacctctctgggccttggtttcctcacttctacttgaagcatgtagactggaataaacagtgttcctcctctgatactggggaaaaaatgcttgaacttagtggagatcgtgggataagggcagccagtcagagggttaatgagcatgacttgggtgagtgttgtgggcttacctgcctgacaccagccactgatagataactaaaaagtgtgagggtggtgacagctgggtcagaatggcgtagcaagatgacctgtccatacaacagttcaaatgcctctcaacagtgggcttcaccgcaggccaaccactacataaggcagagagccagctgcagctggagtccaggattggcaggtctctcttgtcctaggctattcagggctgctcagcttcctctttctccatgctccagagaggtttaaatagcaccggttctatggtacctccccctagaccaatccggctctgtgccctttgggaggaggggggtgcttttttttcaaacagtttattggcatttcctccacagtcgttagtacattcaagtttctcacttcagttgattttggtaatttatctccttcattaatcaagtatagagttgaagatcatactttttaaacttcagaatctttcatatacattttctcctttgtaaaagtttttgtgatttgtcttaattttttcagtgaatagatttattggaggtttgctgattttattggtctttcaaaatatttttgaaggtactcatcattgctacagatttttctctctcattgatttttctttcattattcttacacattccttccttcacttttgttcagaagactagtgagagtttgagggttttaacaatagaaactgactctagctaacataagctggaaaatatgtattggagaaggatgtcaggcagcctggagattcacaggaggggtgtagggaacaaggtggaggggatgagcaggaattaggaatc

SEQ ID NO: 1242385 - DNA, 4001 bp, Homo sapiens
cctcctccataaggcccagcctgtgtgatgctcccctgcagccaccacagtgactttgctcctattcttggcctaccaggaatcccctcctttctgccaacccagatctgacatttcttccaagattcatcttctcctgagggttccccatgtgaatgaatcccagatcacataatctttccttttttctgaattccctcagcattctcatattagctatctattgctaagtattattatcttagtatttcgcatgtattcattgatctcattgaaatctgagctgcaaaagggcacaggccaaatcttcatttgcccacatcttgactgagcaaggacagatacaaggccagtaaggaccttgattttgcccatagctcatggacaaggcctacttgctgcagcgtaggcagtaaaggcaataaatgtgcaccggagagctaagactagctcctggcacaaggttagagactcggacgtgttttgagaagtgtttgttaaatgctgaaataaatttttaaagaataattcaagccccttacacaccatgtgtttctacagcacagaaatctttactgtattcatccaaaatacaatggccagtataacctaccaggtctcaatcactgatcagatttgaagtccttgactctttttggccagaatactaggtccagcggggacaaagtggtgccatcagctgcctctatcagaacttgcctctacacctgccaagtacccacaagttcatgtcctacaagttagcaccggttcatgtccttgaaccaaaggctgcctgactccagtacaagtcagatagttgtagggacatatataaacccagctcccctccgccttggtccagttgaatcatgtcctgtccaaacacagaacccaggcaggtaacattagaccccttgcagaaagcagagaagatgcccccttccacggaagttcttagagggcagagaggaaaatggacttaccctcacacagtagttcatgcccatccccaacaggtgctgtagaaagtgcctgtcctgcctgctcctaagtgttggctccccagggccaggaagcgggcacgaatcaggggttagggcggttgccctgtgtcccaccaggtcctgctgcggtggaggtgcagtcccggacctacttaaactggtttctggggaagaggggccgctggaacctgggtcccggctttcctggagcttcagccgaggcacctctttggtacccaggcaaaagtttttcagactcagcaaagtggccgggttggccagcttcatgcttgccatgcgggggatcaaggtgcacagtggggtggggctctcctgcgacggcaaggtggcatcttcagtcggcaggtgaggtgccagggcggggtggggaggctgcggcgagcccttgttcccgaccgagcctccggagctaccttcgtccaaggacgtgatcgactcgttccgaaagcggctgtacttggccctgtgcagcatcccggggtgcccgaagagtcctacatacagcacgagtcctgccaggctgtcctggccgcgttctcgcatagccttggcagtgctgaaacaggatactgttgcataaatcgcctcgtcgtctggtagataaacggtgcagacatcagatacctcaacgcccgatgcaactcacagcagccacctctccaactctgctctcgagctcgcccacctcggctcccggccccttaagggtgacagcccatgggggaaacgcctcccctgctctgatttcagtctctccctggcccaggcagaggcaccagtgttctcgccttggaatccttgtcgggagagcctagacccaggctcccggcggcgcgggtcgctcacggccaactcttaggcgcagaacccgggcgagcgccggtcggggggcccgctgcatcactagccttgcaggagcctagtagaaatatttagcacccgactcccaccctcaccccagccttctgttctgcacacaggaactttcgaacctgctcccttcggctctcacagggcggggcaaatgactggcctattaaccctttatttgttccagtgattgttcatttaaaaaggaaaaaaaaatgtatctatgaaccaaaggcccttttgcctgggttcgttgattccaaaggctgccctctcttggaagatcttgtcttgcatcccgttctgggccaccagccaggagtactactgacgggcgctgctccgcattgtttcactgacttgtgatgggtccgtgttcctcagatcccctcccagcctgcctaccctcgctcagagcttccctccctcctggattcctctcggagcttttttcagaagcccatttgcagccgaaagctgagatgtgcaggatgatacgcagcgtgttgaaatttttatgaatgaactttgccgaatgaatttctctgtgtgtgtgcaagctaataaatctgtgaatgaagctgagaatagctgtaattgactgacggtctcagaggtgcttggtttttatccaatcaggaggcagcttgatgactcatacaccataaatatactaaactagtagccgagagaaataaagctagcgggagaggagggacgtattttattttgtggtatctgatgaatgagttaaaaggaaaggcaatctttactacagatcattagccggggagcagcaggttaaaagatctattttctttcttgttgagatggccgggagggcagagcagaagagctaaaaattagacccattgttacagggatattaggacatatggttcacaactcctgtgggaagccatgatgcatttttcttagaaacatagttctttttttattgattgttggttccatcttccgtctggtgcgacttcctgtacctatcaaatgcatcctgaagacatgatgacaactgcaaaggcttagcacacaggaagccaaaaccagagctgggaaaaggaaatgcaggttcttcaggaatggagaagaggaaactgctgaaacactgggggtgtggggtgtcggggtggggtggaaatcacacataggaagagataaagaactctcagaaaagattgcattactccgtgtctcaaggctttgacatctgaaattgttcattaattaaaaaattaagacaaactggcaaccaaaggaattaagggtgccaccttcattatcttattgtccctaatgctggattaggcttatgtatattcatgactttgggagcctgagctcccttgggatccaaacacaggttctgaattaaatggttgagagtgaccagtgaaagcggcatcctcctcccaagctccctggtcccccagggaaataaagcacccatcacatcctgtctgccaagcctgttcagacatttctttccctggaaaggcctttctgcatcttcataaatcttcccttcaatccttgttgacctccttttccctgccctacatctcctcctggcaaaactgagggaagtagctaaatcagttggaccccacatccctggggctgaggagacaggctctgggcaagaatatttacctctcattcctcctcattcctcatctgctttcttcctctcatttttcctgccttcccctgggtccctgggtccctgtgttgcttctgttatgctatgatgacctcattatatgctccctttagaaagttactttacctctccgtgcctgaatgtcctcatatgttggcagcagccatctaatggggttgttatgagggcttacgaggcccaatgctccatacagtgcccatctcactaagtacatgtgggcagtatgaaaaaatggccattggaaccagagctacctccccttgaagctcatattcttaaccctcacactgcagagtttacatcattctaggcaactaaaaagaaaaattagtacaaagtgggagaagctaagaaactcaacattgtccaaagaaaacaattttttaaatcaggtgggcctg

SEQ ID NO: 1242386 - DNA, 4001 bp, Homo sapiens
ggcatccaagccactgtagagaggagaagggccaaagacagctcaggcccatgttgcctgtgccaaacaggcagtggttagagaggaggagactgactggtcagtgggaagaacagggcctatccctctcctctgtctcactgtcactacctccatcacatcacacaatagcaggggacaagaagcagacgagcacagccttggagaagtgcccttgaaccttcctctgcagaataagtatcctggcccaggatgggcagccatgccccatggcaaaaactaggggaaaaataatttgcattcctgaggcttctgctctgaccctgacagatctctctcatccaggaaatctggcggaacggcgctctctcagctaaaaagcctcaatcctggagccaacggattcggaaagcaactttgcactccaatcaaataaaaatgttcttctctgctgaggagaagggggcaggccccagaactgagctctcggggtgagtgaagaaggacagcagagccaaggcagcccacagagtcatcatcacagaatttaggggcctgggatggctttcagctctcactctgccagggagggataaggccaacccgaatcagggcagggccctgaggcatggtggatttcctgttctcctccctatcctggtgcctgcagacccaggaaaagctccagcctccctcagaatggaccagggggagagggaggccaggaggagaggaggaatgggctcagctgcttagccccatgtgggcaacaggtcctgagcactgactatcctcatacctgagaggacgagggaaggagggaggagtgggcctggaccccacgaagcccccttggcaagagctgtaagctgcctgtcttcgcctcctgagaacaacagcctatagggcaaaggccagctcgtgctgtgtccgcaaggagaaacccgtcttcacctcctttctggggcttcagcacctgcaaggatgcttaggctggagaaacaggaggaggaagaggaggaggaagcaaagaggcaacaggagggaagagctttgtgctggctatgcccagggggaagggtcagagatcaaagggcactgagccgctgcttccagaggggcagaaaggccatcaaccagtgggggttgggaggtgcgcctcaattcccgttagcaaaaggctcatggatcaggctagagggggctacgaagtggagagccagcccgggagggggagggtcaccagttctggggccattacaaaggatagggcagaggggcagagtttggggcttccgtctcagattagtcggttgagaatctgaacaaaggtgggtgaaggctcggaaccccggggtcaggggctcgcgtctgccagaagctgagacaccgaggggcccgggccaggccacctttgtccctctcgcagcctccagacccctgaccgccttccctcctggccatcccggcccggcgcggcactcaccctatcgctgctggcggggggtccggagatccgctcatcagcaggcggcgccgggggccccggggtctcgacccgaataaggcggtgtgggggagagccgtggcgcgggggcggcgtgggtccgggggcgacaggggtggcgagggcggcggagccggacgaccccccggagtaggggtcttcgaagtcgcgctcccgctgcagcctgtaggcggccaggatgtccgggggcggcgcggggggcgcggccggagagggcgcaggggggcggtagtcgggctcggggggcgccggcttgctgccccctccgccgccgccccccccgcggaagcccaggtgctcccggagccacttggctactccgccgctgccgccccctcctgggccggctcccgcacccccggcgccccggcgggacccccccgggccgcccccagcgctcccctgcgttcgcggccccgggcgggagccagccggaggagctccgctcagtaacatggggccagccagactgagcgaggggagcgcagcggcgggtggggggcgggggcgggggtggggaggggggcggggctccgccgggcggggagggggcggggcgcttcagtaacaagggagaggcggggctccgctccctaacagggtcttcctcctcccgtagctcggaagagtgtacgcgggcttccagccggtatgcacaggcaagaagtgaagtgggcagccctggggcagaggatgcgactactggactgaggttgaatcctttacgtgtcgccacgcggtcccctgtggggagcgcatccatccccatctgttcttttccccagctcccagctcgtgcgagacgcaaagaggggagcccccagactcctgactctagggagccttacgcctctcctcttccctctcccaggatctcgcaactgggaaactataatctaggaggaaaatctaggcgggcaagaaaaggggctaggttctgtaagatgtgtctgtaagcctcctcctcccgtgctaccttgggagccccacaacctcctcccatccaaccgtacgcactgcacatacccgaacctacgttacttcccgatccaggcaaacacatctcacatcacatacaaacaactccctagagacgcccacttctcccgtgtcgttttcacacacgcccttctcacacgcaaacagccctcgctcaaacatcccccacccacgggagcacctgctccaaacgggcccacatggccctgacgatagcatgcgcacgcacgcagaaatcccttccagccacatcccgggcttcattgtcaatcagattagtaacagaatggaaacagacaagtcaataaatcaagtctagaaacagtcccagtgttgtctatcacaaactccttatcctcttgaggctcagatgctcaagtgctaggcatttttgtcttagaaataaagccagttccggctgggcgcggtggctcacgcctgtaatcccagcactttgggaggccgaaacgggaggatcacgaggtcaggagatcgagaccatcctggctaacacggtgaaaccccgtctctaccaaaaatacaaaaaaattagtcgggtgtggtggcgggcacctgtagtcccagctactcgggaggctgaggcaggagaatcgcttgaacccaggaggcagaggttgcattgagctgagattgcgcgactgcactccagccagggcgacagagtgagactccgtctcaaaaaaaaaaaaaaaagaaaaagaaaaaagaaaaggaaagaaataaagccagttcctcaccataaatgtaggcctgaagccaacaccaacacatttgctcttggctctgctgggaaagcagctgtctcacctcactttaccccaccccctttcccccactgcctcagtgtctccgcactcctaggttcatgtctgcctttttttttttttttttttttttgagacggagtctcactccgtcgctggagtacagtggcacgatttcagcttacagcaacctccacctcccgggttcaagcaatgctcccagctcagcctccctagtagctgggattacaagcgtgcgccaccacacctggttaattttttgtatttttagtagagatggagtttcaccgtgttggctaggctggtctcgaactcctgacctcaagtgattccccacctcggccttccaaaatgctgggattacaggtgtgagccaacggcacctggccatatctgccttttgagggcgcaaaaagccaagaggccccaaaggaaaggagttcaaagcggggggtgtaaagaaggatgtaatggcaaaactgtgaatctcctgggattcccagggccccgagtctcaaaatatttgttgagttcctgctttgtgcaaattctagttgggcgaggtggctcatgcttgtagtcccaggtacctgggaggttgaggtgggagaattgcttgagcccagaagttcaaggctgcagcgagctatgattgtgccactggtcag

SEQ ID NO: 1242387 - DNA, 4001 bp, Homo sapiens
attttaagaagtcagaggctcaaggaagttagggaacatgtccaggaccattctacgtaagtggaggaaccaggtgattggaacccatgccctttgtgcaaaaggctgccaacctgccaccagggggcatcttggctgtcctgggagagagaatgctggagccggctttgggacagacctgaagttgtgctgaagtccctgtggctcctggagggcagggacaggaaaggcttcactttggcccttcacttcctacgctgcccctttctcccacacaagtgggctcacggccactcctctatgcctgctgccattcatcgcacagtgaactgcaaaccacacactccgaagaggcactcaaggtgctcagggcggggcgcagctgaggacaatagaacctttctccaagctgggcttgggcttctcctgatggggcgctggctgaggcagagactgagcccggttcacccagggctgccagcaccccaggagcactgcaccactgggttgacaggcgatgacaggaggtggctccagggcctgcagcatggggagaggccactcttgcctttccctaaatctcagtctaggctttgattctgagccagaccagggctgtaggagccagctgggctgggaggccgtggggtgactggcctgctctgggttagagcaactgggaatggtgacccctagcaaggcagagatgaagaaaggaacctcttcacctcggagaccccttctgcatgttccttccaccttgctattccctctgaggtacctcccaatggctcctactgtctcatctggggtcttcagctcccaccttgttctattcatgccctcagctcctttacaacctcctttgcgtctctgcctgcttgtgggataaccaccatctcagatcatccaattaccaccactggactattcatatctggagctctttgttgtttttgtctttccagctccagtaagcacctggcatacagtaggcactagacaaatgtttctccttgatcatcgcctatctccccttggagcccttcacccctagtcctccttctgccaggaagtagagaaaataaatccactcacccctacccgcccaagctgcttcctcccaggccaactggcacccacagccccaccccttgaccaaggcggctctgtggtcagcccaccttcggtgattctgtcagtcggcagccagcatcacactcttgtggcagctgcttaacagtgtctgactcaaccaacacgttatccataaaccttgcgatggctctccagtgcttcaggaaaaagtctgcagttgaagagatttgaaagcttccactttcctctttagtttctctctactcaccttggatcactttgttaccagaaagctgcatgttctttctacttcaaaggctttccctctgcctggatcactttccccttcctcctcaagagctaactcttatagattatttcttcagaaagcctttccatacacctcccaggcctgttaggtgtctctgtgctgggctattatcacactgcatggtaaatgtttgttttgttccatgtcttcctgcagactgtgagcttcctgagggcaggaaccatgtttactttcaaattcctgacagtgttaactccattcacataaaacaggaagaatggacaaaggaagtacttttccttgttcattcaggagaggaagcacaaatctggattgggtgggatcatatgaggggacagtctttccaagtgaagctgtgtcaccagaagctgcttggtcagcagaggtgcctgatccaacccccgatagtctccccacccctaatcctccactccatagagccccttcggcctctccctcaccaagcctgcaggcagcacccttcttacccaagtcctgggcccatgcccagagctgcgacccctccgaggctggcgtgggcctcctcagctctagcctgcagtgcccatgggcacccaggtggcaactctgtgggcagctcaatggctcctctgttccattcctggctccacacccagctccaggaagccccggccccacgccctgggctgggatgcccaaaggagccgcccacagggctgggagttgggagcagcagcagagatgccagttgggaaggatggcaggacaggcacccaccctgggcatagaagttcctgggcagaacccaggcctgctttcctgtggcttctaggtccccaggatagactgcttagtggaggaagctgctcctataggcttccgacccctttgacctaccctaatttgttattttgtttatggtccctttgccccactctgatgtgctcactactgtatcctgcatcaatctcagggctggcacacagtaggtactcaatgtatactaagggacgctcaacaggcgtcctctccagactccatcctctggagtgacatcacctttcagatccccattcaccttgacctctaatggctgcaggatcaggctctcagcagatctacatctgaatagaaatcaaagactctggcgcaaaggccaaagggaggaattgtccgcaaaggacctttggggaagacacctaaaaccacggcggaggggtgaaattaaagactttcaaaacttaaaaataaataaataaataaaaaataaaaccacggctggtatttaggcacattctctgatatagccagaatgctgctgaaatgctgaaagatttccaaactagtaaagtagctactacccagaggatcccatccctctccttcctgccacccagcagggtgcctccaggactctgctatattgtgtctgttccaattgggcattacccctcccagagcagctgtcatactttgaatctccttcctgctcaagcctctcctgtggtagctagcaggcctgccatctggttcctcttccactctgcaattgggccatgcaacacatccctgacccccaccacggggctccagagggtgtggatccaggaggagcaagaggggcacacgttacaatgtgtgccttgctctggaaggtccccaaagtctcccactgcccctttcctctgtttctttagtttacattgagtgtctggaaacctctttttatgtgtagacctctgtctttttatctgtagaaaaaggatggtaatagtacccatatcatagggttgggaagaggaaaatgaatttgtaaaagttcttagcccagaggctggcatggagtcagtgctgaataaatgttagctctgaggataatcttttctattcaggtattaaggcctcagagtttagatgcttgtccagggtatgcagcttgtcagcagcagagacaagatagggaccctggcctcctgacttgtagtatgttatcatagatttttcaaacatttggaaaatgcagcatcttctctcctctatttgtagatttaaaatacactttaaatctaaggagtcctgcagcaaagaaatcagtctacttttgtttaattctgtaatttcccaaaaatatttaaccatggaagccctttgtcactgaaaacctattaacctgtcacagtttgggaaatggtacattacttaccttcctcgagatcaaactttttatacccattgttcctgcttattggaatgtccttctcctattttatctgagaaatcccttgacataaaacaaatgtctttcccttttctaattacaagaacaatgccatgttcataaaacagttaaacattacagacatgcagtagatcctagcaaccctcataagacccttgggtgtgtctggtgtcaccttgggattgggtagcaagtggtggtccccagcattcaggaagtagtaaactcagtacagaacacacccctcattccttccctaagagtctgcttcctcttgttcattagcaaatgcttagtgaatacctcttctctgccaggcacctgctggtaggtgctgagggtccaggcattgggctcactctaccacct

SEQ ID NO: 1242388 - DNA, 4001 bp, Homo sapiens
caacacccacttccttccagcctctcatactcccctgacagccctgactcctcctgactcctccttccgcaatgcttccgccgtgccaggtgcccacctaggctgtgtcacggggccgcagcagggactaagtccgattttaattattgtccatcagtgctctcgcccccacggcgcctagaaccgggccgagtacacagcaggcagtggctatttgctaaaactcagaaggtgccattggcatttaacaagtgaattccagagagaacacctgtctctccaatgtcaccctctcccatcaatcctccctatgcagagccgcgggagggatcttgctaaacacgatttgaatattttcacttctaccctcctcaccctcacccctagacggcaggaacttcgtctgccttttccagctcatctcttggccctccttcagtgtcgttccccatgcctcaatttcactcattcaactcaacacgtcctcgagaagcgcctactacctgtcaggccagagcctttgggcgttgttggggtggggacttacaaagaagacagaagacttataaagaggaattaagatctttccttttcggtgaaacctcgtctctactaaaaatacaaaaaaactagatgggcctggtggcgggtgcctgtagtcccagctactcgggaagctgaggcaggagaatcgcttgaacccaggaggcggaggttgcagtgagccaagatcgcgccactgcactccagcctgggtgacagagcgaggctccatctcaaaaaaaaaaaaaaaaaaaaaaaaaaaaaaaaaaaaaaaaagatttttccttttcaagactcccttcaagcctctgtacacgaaatcatcctggctgcctgacaaattctcactgtgcctttaagagctaccttgatcctcacttcctttgctaagccttcttttcctatcattaggaatccgctcccagtgcttctgtggaaatttgtacgtatgtctactacaacactttttaaactggcgagtggtctgtgctttgtcttcaagaacgcgcccaggctcagaggacccggaagcctatatctttccaaagtccaatttagccagagccagcgtaaacgtcgctctcaaatgtcacaagggaatcggggtccattttccacaatgttgtgaactcaggattaaaaacggattggtacaataaaacaaactccccttgccgtgccattgtcctcacaatgccgtgactcggattcgaaccgaggttgctgcggccacaacgcagagtactaaccactatacgatcacggcgagctactagggacacaggacctcggcttgtcgcctgaactcttctctgttgaaagccccgcccccttgcaatgtcattgatttgtcattgtttgttctagcctatctccaccctcgcagccatctgagggcacgcaagagcattaatctctgctttctcgattttggtccacacttgcctgcgcaccagacacggtggccgatttctccaccgtggaggctgctcttggggttccccttacctcgcgcctcaaggaagttgtatggtggtgggtcagaactgattttccttcttgtaaaatttaagagctccagtcccagccaaagtcgttcagatagcatgatagtcagggcatggtgagcgtcagagagactttgggccaccattcgggcgtcctcaggggcttcacatcattgcaggcccggcctcataggaatcctttggttgcaaagcactttcatgtcccttcttttgcggtccgtgcgtacagccaagaggagacttcgggctagggagtccacagcgctcccggctgctcttgcgggtgaacgtgggtgcgggaggaacctggtagataatggacgcttaggaaagctggaatggccgccatctagacgagaagggcaacactgggtcagctgctcgtcgtggcgtcccggtagctcgccgtgatcgtatagtggttagtactctgcgttgtggccgcagcaacctcggttcgaatccgagtcacggcattgtggaaacaatggtacggcaagggcctctttttagacttagaaagccacacattcttctgggaagctaactctaaaagctgttacctggccagggctgaaattataacggacaatgaagtgtgcacaaaaagttcggtgcacactctggggctttcctttctcatctgctagtgaatcagtcacccccaccttccccaatatgtgattattttatttttgtgtagtttctgtgtggtactctttattttacccttgtgaatgaccgaatcatatattggatcctctaaaaaccttcacactagctaaaacatcaatactttgggacaaaggggtgataggaacaatgtgcaaacattaattaagggttagaagaatgcagattagaccatacgctgaaccgttttgcttcagatcccgtgacaagtgaaatatatgactgcactagaggtgctggttccagtagccactatgaggggtgctaatgagaggtttgtggccttcatctccacagtctcctaggtgagagggggttttctcctggagggttttcccctaatctacctcaagtttaagcacattttgtttgcttgttttatgtggacctaaaaaacccaaactcaacaaattcaagtctgtcatttggcattaggcaaaatggaagtgagttttggatttgactttcaggcagctggtggtggctatgtcactctcaaggagggaatgagagggcactgaggaatgagcctctccagctcctctcaggtgtcctgagggtggcaaggcaagcccgagatcattcctgggagagacagacattgcaatggggttgcgccccctctacccacaatcaatcagtaaagaatgaacagcacttaaaagctaggcactggcttcatgcctgtaatcccagcactctgggaggccgaggtgggcggatctcttgagctcaggagctccagaccagcctgggcaacatggcgaaaccctgtctgtacccaaaatacaaaaattagggcatggtggcgtgtgcctgtagtcccggctacctgggaggctaaggtggaaggattgcttgaacccgagaggcagaggttgcagtgagctgagatcacaccactgcattccagcctgggcgacagagcaagaccctgtctcaaaaaaaaaaaaaaaaaaaaaaaaaaaaaagcaaggcactgcgtgggggctgtaatctccccaggtctccagtctcccagttctctacatttggcgagtttaaaccacacaacaggacagctcacacctcgagagtgttctgcgcaaaatagaatggggaaaggtgagcctgagaacttgccaagctttggatgactgattcaaacgttatatgtctagaaaatcaacatcgccaacaacaaaaaaagaactggccaacaggaatgtggtgacttatattcctccaacccctcaccaaataactgctgtgacggatttcaatctgtgggctggaataaggtgtcagggtgggatgccaggaaaggctctggcttttcccctgaagaccagcccccactgccctgctgcaggtgcttcagtaggcaatgagctgctcccacaccctgaggagaaagttaggagtagccactctctaagagtactacaaggaaaaagtgtcaaccaagaggctgggcatggtggttcatgcctgtaatcccagcattttgggaggctgaggtgggaggattgcttgagctccggggtttgagaccagcctagacaacatggtgagaagctctctctataaaaaatacaaaaattagccaggtgtggcggtgtgtacctgtagtcccagctattcaggaggctgaagtgggagaattgcttgagcctgggagggggagattgcagtgagccgtgatcatgccactgaactccagcctgggcaacagaacaagaccctgtctcaaaaaaa

SEQ ID NO: 1242389 - DNA, 4001 bp, Homo sapiens
agatctcaaacccagcagaacctccggagtttcgctcccgaaatccactccgcactgtaatcccctggcttcaccccgaaggctactaggtctcgagcctcggtggaacctttgtgtggcttctcggctctccccgcccccctcgccaagggcgccgagcctaggacttccgggcgggagggcagttcgaaggagctaggcgggcctcacacatgtgcggagcgcgctcaagagcggagggaggcggggagcaagggtggacttcccctcccagctctctccgccggaggaggccgggctacccgccccaccaatcagaggcgggggcgggaccttgcgcctcacgtcatccgcaagaaccgtccctcctccctccgcgaaaaaaaaatcctagcaacttaaactccagcccggcctcccgataggcggagctcgggagaatgtcatccaatccacatccaagaaggagaaaaaaagggagtctcgcctagccagtggaagacaagagaaggcggggcctccgggagagccggaggtgggtgggagagaggaaaggggtccgcccctcagctcccctgcaggcgggttgcacaagccgccggcggagtagatagtaaacagtctgggccgaggagtgcaggcaagggccgcccggcgctcggtggactgggcccctgcgccgcctctcccggcgtcgccccgcccggccgggacggttcccgccggcgccccgcctacccgcccgcggccgccatcccggctgacaggcgcgccccccgcgcccctccccgcccgctgatgcatttccttttcccgattccgagcgtggagactgttttcccagtttccgaccttcactgcccctttcaggccaccccctcgtgggcgcgcacacgcccgcgcccccgcccccgccccatccgcgccgagcggtccgcagcagcacctcgcgggaagggggagcccggcggcggcacggtcgggggaggggaagagagcagcagtcgccgccgccgccttggggtgggcggggaagcaggcagctccatgtttgcaaggggatcagccggggccgcggacgaagccgccgagtttctgggggttttccgcaccaccgatgcgagctccttgctgggtcgcggcctgacgggttccggcaccgaatgctgactcgaccgccacggccagggagtttggagacccggcagctcgcagggctagcggcgaggcgcaggggctctttccggtggcctctcccgcccccggccgcccctcccgcaagtccggtgttgcccccgcccccagagtccataacaaccgcgggcccacagtgcccgcgcctctccggagcgcgcccaccgccccctccaagtttgcgggcaaaaacaaaaccctcggggcggctgccgcccttgtccagcgtgggtagccagggaagccgcgggccccggctcgctcgctaactccagctctcgagcaactccgagcgccgcgagctcagtgggccccgccgaccatgctcgagccgccgccccctgccgagcccgcacgccgcagctccggcccggttctagtcggtgtgcggaatcccccttttctttccagtatttttctttttaaaaaaacggcacaacaggagtcgggggtctcctgcccgccccttctccagtccgccgccaaaacctaccgaaaccgactgctcggtgagataaactaggctacacggccggcgcagggacgaccccaggccaggcccacccctctcccacggctccggccaggctgggaaacacacacactggcgagcgggcggcgccaagagctctccttcctggcctgtccctcgcctacctcggccgcggaactccgagcctcccctcagctcggtcccagggcccgcagggcccacaccacgtcgggccggccagaccgagcggccggcggactagccccccaaacgcctgagattggggggaccaaattaaaagcagctgtttaacataccttccgagccaggcgaggagtcctgaatgggggggaacgccccccacgggctattggctccccggcgctcacgtcagtcaccctgggcccgcctccgcccttcgccccgcctcttccccttcattgaacgccccctccttccaaaaaatataaattaattaattaaactaaacgcgagtgggagacgcatccgtggtagaggcccatatagctccctcgccgccgactcgagtttcttgaggtcctcggactggggggaggccgcctgggactcggagatccgctgggtggacgcggaggacgagccagcggagctacccggccccaacttccttcacacacacaacccatttggaactaggtaggagagaagggtaggagcaccctagtcactggctggagtgggcagactcctgtggctgtgtgacctaaccgtgttcggtccgctctgttaggcgactaaaaatgagtgatgcaaacaggaagccctgcgtccgcgggcaacaggcacttgcctgagcacctactgtgggtgaggcagacattcatacgtacctgctgctgggtgcaattacagactggatgacatgcttactctacccctccaagggctccagattcagccgaggagattctacgtaaggaactaaggcaaggcaggaatgtgtatgaaaataggaatgtgtatgtaaataggagctcagagaagagagattccttttcgctgaaggagaattgggaaaggtttcatgaaggaggtggcattcaagttgggtcttaaagatttcatccagcaaattggaggggcaggtcattttcatcaaaggacacaaaggggtgaatgcaaaaaaggaccttcatatgtggctgtagtaataaaaaaggaggggtggggagatggaacaaacagtttaagacttttagttgagtaaaattcttggacgtgcgcagcagaatgtgcaggcagcacggtcacaaggcccacagacccagaactatagtgtaagatgtttggcaccctggcagaaagatgggttctgacgatgcactgagagagaagtgcctataggcagcaaggggaggcccagaggctgttgtaatactgcgtttggagactgcagaagtgcctcttgtggaaggaatagctggggaaagagaaggcttcttttctctatcaaagccacccaatccgaaagctttccccaccttcagcagccctcaagtcaaagctttgactcagatccttccttgcctcatttgctttatttatcataacttctaaccaaaaggagtttctaggggacagaagccaccccacatgtctgtattccagagagctgagcctagagccagagcacacaatgtgaaacaaacaaaaaaacctgtttgttgaggcattgaggaaaggaagttaatgtggataaggtggggtgtgcagaatgtgaaggaccttggcatccaatgggcagaatgagggcctgctgccagttaggaaattattgggaagtctttcccaataattcaggagacacgaaaggaggattgaccagaacagtgacagtgggtgaaaagaattttatttttttttgagacaaagtctcactctctcacccaggctggagtgcaatagcatggtctcggctgactgcaacctccgcctcccaggttcaagcgattctcccgcctcagcctcccgagtagctgggactacaggctacaggcgtgtgccaccacacccggctaatttttgtatttttagtacagatggggtttcactatgttggccaggttggtctccaactcctgaccttgtgatccacccgcctctgcctcccaaagtgctgagattataggcgtgagccaccgcgcccagccggtgagaagaatattgaaggagagcctgtatttgagaaagactcaaggggagtaggtgagtgattcagtgtgggtagtagagggaaagaagtagcctgtggcctgctgtgtgaagagttgat

SEQ ID NO: 1242390 - DNA, 4001 bp, Homo sapiens
ttacctaaatagcaaattctttaggaaaccaagtttttttggttgttttttgaggcggagttttgctcctgtcgcccaggctacagtgcaatggcaccatctcggctcactgcaccctcgcctcccgggttcaagtgattctcctgcctcagcctccccagtagctgggattacaggcgcttgccaccacgcccagcttttttttgtatttttagtagaaacagggtttcgccatgtaagcctggctggtctcgaactcctgacctcaagtgatccacctgcctcggcctcccaaagtgctaggattacaggcatgagccaccgcgcccgtccaggaaactaagtttatatagcagaaccatgtgcacaatgaaagcattcaaaaatacaactgtcagagatatcggagtattttattcaaagtctgagttcttaaaaaaaaaaaacaaaccctactttataaacagaccagttttgagattaaaatgtaaatccaaactttcctgttataaatctcagccttgtaaagaggaggagcttccactgccttttcaaggctaacttcgtttaaagtcctaacgcaccgaaacagacgccaagtctactacccaccacccattggctcaaaggaagccccgccccgtacagccacggtaactgaacatcaagggaaccccagggaaggttttccctccgccacatttctagtctctgatgactccctgcccctcccctaccatcaccaccgcggatctagggttccagcaccagccacgcacgctcctacaagaggaccttgggcacttcgccccaatagttacaaccaagaggggagtgggggtgaccatgctcccactctcctggctgcacggtgccagacacgctgcatggagcaaagcggagaaagcagctccggcacagggcccttgtgcccccaggcagaaggcatgacccagccacaagagtaagtcctgacacctccacagctcccagtcggcgggtgcccctccctccccacggagacatagggcggggcagatctaggcgccgagactcccagccagacccgacagcgggctttccctagcacctcctcattgccaaggaggcggaaacccggggcctgggcggggtgcagggggggacggccaaggggagtggcatcacggatcagtacggcccctccggccaaccggatcccaagaaggcggaggaactcagacttcacgccccctccctgccgcgccctgaatctacacgcgggagacccccccctacccctccccgaccccagcaggccagagcgcggccgccagcccgaggccccgcccaccccaggaggaggggagggggtggtcggccgcaaactgcactcagcgcgaagccggccccgcccctttctccacaatcgcacgcgcgcgccggccccgcctctgagcggcggcgcgagagcccgcccccctccgcgcgcaccgggactacgctctcctccccctcccgcgcggagagctaccccgctccgccccccacccccctcacacaaccacacacctcccgcccgtctgctctacgggaagccgaggaggtcagccccccccccccaaaatacacaccctcgagtccggcgttacccgccaccaggctcccgcccggcccccggcccagcgtgctctcaccgcaaagctgcttcggccgctcgtcactgcgtgtccctctcagcgtgagccgcgagctcagcagggaggccccgagaacggcgcggggcacaggcccgccgaagcggactgccagctacctctccactaacgaagcggtcacaggctccggtgcccagactgggaaggagggagggagggagggagggaaactccgaggggggaaggggaggggggaagatggagaaaccgtctccgccgcctctaccgccgcggccgcttctctgttacccgggaaatcccgcccactcccccgaccccgccccgcagagggaagactcagcttcgttccaatacaggacgcaatacccgcccgtcaaagactcagccaaccaccgaggcctgtcttatgattttcccgccccttccccctcgactggtaggggagggggagccgctctccttctccacgcccctattggcggggagcttccctaactcaaccccgcctattggagacggactgctgaagcccacccccgagccccaacactattggaggaagcagggaagctcttcctgtctcattggaggacaccacataacccgccctgcagcgtctcagccacaggcctaacaagttggctcccgcctccgctggtcatcgcattggaaggctacccctggctctcccaccgccccagtaaggtaagtaaccgatgtggggtaaaatgtctgtaagtgaaacaggctccgcctaccgcactgccgggccaggccccgccccaagagtcggattggatatcttggcgctggtaggaccctccattggccagggcgcccgtctaggaaggagctaattccaccctgcgcgaggaggctgaaccttagcagtccttttgtggaatgtttacactagagactgaagctcggagttccagggcccgagataggagggggagcggagctcatcagcggagactccacatcctaggatttgaaggaaaggcagcccaccatggaggactccctcacaaaaaaaatgagagaatgagaactcatccttccgtccagttatctttacagtttacattctacacactgcgtccttgtaaacacaaatatccggagcagctggcaactcctttcagccaagtagagtacagaactaaggtctggagacctaggcggagaagtaaactccctagagctgaatatgcagtcctaagagggcggagataaccaaaagagaggcgggctctaacagccaccgccctggcaagcctccggaaggcggagcgtgaggcacaaggtactcacgatctcccgggtggatctggaggcatcctcagaactgagaaaggagaggaaaacaccaaaacaggccacggcataaattaacattggggacatgccacactcagagaatggataaaatttccgtagttggggacataagataacggctgttcaccttctccttggccgggagtgttaatagcagttcctgtgccctctctgtgtaggtaacagtgcctcgaacacacagtgagacaaagtgctttcaattcctagtttgcttttatttattcaccaaatagggcgtgggcctgacgctgatcttactttggggggcgctctctcagcgccaggagaggtgacgggattacgttgttaccgctctcccgaataagtagaaccctcctcccagagagctaagaccccaagggacacgcccagggaacccacgcctaggtccaacactgtcctccctctgcaatccagcggaaacggccaggaacgagctctggcagcaggtgggcctgactccagcgatggcttcgagccgcgaaaccacagcagcgaattgtgaactccaagggtagccgacaggtgggagcagcctcgccagtagccaagccctgccccaggacagagctctaaaaataagtcagaccaacgaagcgaccccagggccaaactgctcggaggttaggaggaagcggcactccagcagaactgacccacggctacttttaactttgcgccgccttccaccactagactgagtaccacagggcattcccaccatggtatcaagaactactcagaacccaagccagcattaggccgcccacgacttcccgtgaacacagggtaccacctgcgctaagatctcgcctaagggccccaggccagggcactaggttgtcagagtctcagatacagccaactaaggacagccgctgccatgcctaggaaagaacagacacttgcagcgtctgcagagttctcgagcttaagctcagggaagtcaaggggcacggaaatagccaagcgacaggg

SEQ ID NO: 1242391 - DNA, 4001 bp, Homo sapiens
tacagaagtcacatacagaaggctaccctgatccacaattccaccctcctctgaaataaaaagggcaacaacactgtactatgtagagtataaatagaaagtggtctagatggtctaacataagtacataaaataaaaaagaaaagacttttcacctatagttacctaaatagcaaattctttaggaaaccaagtttttttggttgttttttgaggcggagttttgctcctgtcgcccaggctacagtgcaatggcaccatctcggctcactgcaccctcgcctcccgggttcaagtgattctcctgcctcagcctccccagtagctgggattacaggcgcttgccaccacgcccagcttttttttgtatttttagtagaaacagggtttcgccatgtaagcctggctggtctcgaactcctgacctcaagtgatccacctgcctcggcctcccaaagtgctaggattacaggcatgagccaccgcgcccgtccaggaaactaagtttatatagcagaaccatgtgcacaatgaaagcattcaaaaatacaactgtcagagatatcggagtattttattcaaagtctgagttcttaaaaaaaaaaaacaaaccctactttataaacagaccagttttgagattaaaatgtaaatccaaactttcctgttataaatctcagccttgtaaagaggaggagcttccactgccttttcaaggctaacttcgtttaaagtcctaacgcaccgaaacagacgccaagtctactacccaccacccattggctcaaaggaagccccgccccgtacagccacggtaactgaacatcaagggaaccccagggaaggttttccctccgccacatttctagtctctgatgactccctgcccctcccctaccatcaccaccgcggatctagggttccagcaccagccacgcacgctcctacaagaggaccttgggcacttcgccccaatagttacaaccaagaggggagtgggggtgaccatgctcccactctcctggctgcacggtgccagacacgctgcatggagcaaagcggagaaagcagctccggcacagggcccttgtgcccccaggcagaaggcatgacccagccacaagagtaagtcctgacacctccacagctcccagtcggcgggtgcccctccctccccacggagacatagggcggggcagatctaggcgccgagactcccagccagacccgacagcgggctttccctagcacctcctcattgccaaggaggcggaaacccggggcctgggcggggtgcagggggggacggccaaggggagtggcatcacggatcagtacggcccctccggccaaccggatcccaagaaggcggaggaactcagacttcacgccccctccctgccgcgccctgaatctacacgcgggagacccccccctacccctccccgaccccagcaggccagagcgcggccgccagcccgaggccccgcccaccccaggaggaggggagggggtggtcggccgcaaactgcactcagcgcgaagccggccccgcccctttctccacaatcgcacgcgcgcgccggccccgcctctgagcggcggcgcgagagcccgcccccctccgcgcgcaccgggactacgctctcctccccctcccgcgcggagagctaccccgctccgccccccacccccctcacacaaccacacacctcccgcccgtctgctctacgggaagccgaggaggtcagccccccccccccaaaatacacaccctcgagtccggcgttacccgccaccaggctcccgcccggcccccggcccagcgtgctctcaccgcaaagctgcttcggccgctcgtcactgcgtgtccctctcagcgtgagccgcgagctcagcagggaggccccgagaacggcgcggggcacaggcccgccgaagcggactgccagctacctctccactaacgaagcggtcacaggctccggtgcccagactgggaaggagggagggagggagggagggaaactccgaggggggaaggggaggggggaagatggagaaaccgtctccgccgcctctaccgccgcggccgcttctctgttacccgggaaatcccgcccactcccccgaccccgccccgcagagggaagactcagcttcgttccaatacaggacgcaatacccgcccgtcaaagactcagccaaccaccgaggcctgtcttatgattttcccgccccttccccctcgactggtaggggagggggagccgctctccttctccacgcccctattggcggggagcttccctaactcaaccccgcctattggagacggactgctgaagcccacccccgagccccaacactattggaggaagcagggaagctcttcctgtctcattggaggacaccacataacccgccctgcagcgtctcagccacaggcctaacaagttggctcccgcctccgctggtcatcgcattggaaggctacccctggctctcccaccgccccagtaaggtaagtaaccgatgtggggtaaaatgtctgtaagtgaaacaggctccgcctaccgcactgccgggccaggccccgccccaagagtcggattggatatcttggcgctggtaggaccctccattggccagggcgcccgtctaggaaggagctaattccaccctgcgcgaggaggctgaaccttagcagtccttttgtggaatgtttacactagagactgaagctcggagttccagggcccgagataggagggggagcggagctcatcagcggagactccacatcctaggatttgaaggaaaggcagcccaccatggaggactccctcacaaaaaaaatgagagaatgagaactcatccttccgtccagttatctttacagtttacattctacacactgcgtccttgtaaacacaaatatccggagcagctggcaactcctttcagccaagtagagtacagaactaaggtctggagacctaggcggagaagtaaactccctagagctgaatatgcagtcctaagagggcggagataaccaaaagagaggcgggctctaacagccaccgccctggcaagcctccggaaggcggagcgtgaggcacaaggtactcacgatctcccgggtggatctggaggcatcctcagaactgagaaaggagaggaaaacaccaaaacaggccacggcataaattaacattggggacatgccacactcagagaatggataaaatttccgtagttggggacataagataacggctgttcaccttctccttggccgggagtgttaatagcagttcctgtgccctctctgtgtaggtaacagtgcctcgaacacacagtgagacaaagtgctttcaattcctagtttgcttttatttattcaccaaatagggcgtgggcctgacgctgatcttactttggggggcgctctctcagcgccaggagaggtgacgggattacgttgttaccgctctcccgaataagtagaaccctcctcccagagagctaagaccccaagggacacgcccagggaacccacgcctaggtccaacactgtcctccctctgcaatccagcggaaacggccaggaacgagctctggcagcaggtgggcctgactccagcgatggcttcgagccgcgaaaccacagcagcgaattgtgaactccaagggtagccgacaggtgggagcagcctcgccagtagccaagccctgccccaggacagagctctaaaaataagtcagaccaacgaagcgaccccagggccaaactgctcggaggttaggaggaagcggcactccagcagaactgacccacggctacttttaactttgcgccgccttccaccactagactgagtaccacagggcattcccaccatggtatcaagaactactcagaacccaagccagcattaggccgcccacgacttcccgtgaacacagggtaccacctgcgctaagatctcgcctaa

SEQ ID NO: 1242392 - DNA, 4001 bp, Homo sapiens
ctcggatctccctgcctttcccttttctcccaggggagtcctggaacccgctcggcccctttctttctgcctctggcccctccattcgggtgtctttcccaggctgtgcctctgtcccgctccaactatcccgctgtctttcctcccacaccttccccggggagaacacaggaacctattttccttcccagtccgagagctgcccccaagtccccgccagctcattccctctccctcggcccaggctcccccaccccataattacaatctcgttcggtaattattcttagcctcctaatgattttttaaaaggcatctcagaattcggcctggtggtgacaacgatcctggagccaggacgcccccagggtgccggggggtgggaggaaagagaggatgggctgggtccccctgagcaggacctgcctgtcctgcctctgttgtacagcgagggccaaagacgcctccgtttccagcagcccggccgcggggggcccccaggacctcttagacaaagggtaccgccccgcaccagggggtgtgcagcgtcgactctgcgtccccgttcagcaccaagctacggacagctccccgcgctctggccagtgccaggagacccacccagctcctgtccctggtctgagctggagaaaggcgcgtggacagaggctggggaagccccgctgctcagggctgggcaccggggagcaggtcgtgggggtaggagctggggctctactatgggccggcgtccggcgggttaatatcaccgcggaccgcactttaccgattgcagagccgattctcaacaagggccctgggaatagataggaaccacttattcccattttacaggcaggaaactgaggatccggcagtggaagccaacccctgcccttctccctagccaaggccctcagcccacaagggacgcaagctgatctcctagactcaaaaagtggtgcttggcacgctgcagagagagcctagcttgaagaagggacggtaaggagggcgcagtgctgcgtttcagtatcgccctcattagacgatgtagaggaggaaggcctggcacagccagggcacttgctcaggttcaggcaggcagtgagtggcagagctgggaccgcaacccaggctccgaagggatgggcgggactcctcttcctcagtgggggctctgggtcctgaggccctgtccagagcgggcaggcgtcgctgcccttggccttcctgacccccattattgaagattctctctcttttatccgcttcccggtggcaccaggggtcggaaagccggactctggatgcgagctgcgccttgcgcgcttctcctcccactggccgagcccgcgctgcctccgtgccccgggtttggcgtccatttgggctccggcttgggctgaggctgcgcggacgcgcctcctccgcaagcacatatcttttactagttgaattaacggcagttttcgtcagttaattaggtttaatttacataattagtacagtataaagaggattggggataatcacggggtacgtagcgcttactgtgtaaacacgtattctgaattaaaaatcagatgtaattaaggcgcgcaggccctgtttaggcagggttttaattgtaatgaatttctaattaacactcaatgattgccaaatgcaaagggctgtaaaattttcttgtagttttgctaatttagtgtttacttaatatctggatattaatccaacggccacatagggcagagcccggcgcggcggcggccctggcccaaggaagtgaaggaggctgggcggggcctgccgggccccaacccgagaccaaaagtgaggagaaggcgggggccttggagccggtgagaaggtgctcagagctccgggcccacctcactcctgttgcggaccagagactgaggctggagagggtccggatttggtgggaggccgtaccctctgggtttccgctgcctggaccaggctctttgggatcataggtgagaccagcgctcctcacggcaggggactccctgttctcgggaacatcaaaaggagggagaacaattgcggtcctggtgggcccagacccggttccgctgctgactccaggaagggccatggactttgcctgggcctgcatatctgcatctgtaggatgggcacatggacccccactttgcaggagtgaaggcgagtgaaggattgatccagagtccaggggctcatgaacacctctcttctagagtcctgaagatgggtagagcttggtggccctacttaggttaggacgcttaagcttctggggagagggagagccaggaggccttgggaatggtttgaaggtcttggggccgggctctgccctcctgaggctctcttgcacctggggatgcaagttaggctggcagacactaaggagggaaccctggaccagccttctttgctccaaccagacagagaagcctcccaggcctgagcagaggtattaggaaaagaagagctggggcaacatagatcccatctctaccaaaaaaaaaaaattatatatatatatatatatatatatatatatatatatatatagagagagagagagagagagagagagagagagagagagagaaagagagagtgagctggggcatggtggtgctcagctgtggccccagctacttgggagactgaggcaggaggatcacttgagcccaggagagggaggctgcagtgagctatgattgcaccactgcactccagcctaggcaagagaaggagaccctgcctgcctgtagaaaaaaaatcttttaaagtaaaagagggtggctgagcatctccagctggccccaggttttcccatgagtatccttctctcccgaatctcaagcttgggtccctgcctgcatcctggctggtcccaggggtgaggggctcccctcctatcagcttcagcttagccacagcctctttccaaggttctctcagcatgggggagactgtgtggacacttagaagtttccaatgaacccatggaaacacagtgagaaaactcagtgtcaccggaggcttccaccccacagagcaggctgccttacctccctccctgcatacacccctcctgagcctcctctaagcttgccttcatgccagccctcatccccctctgtccatggctgttttattttcatcactggattgttcatgggttaatatttcccggtcacttttttgtgtttctgtctctcccacgggaatgttgtgtctgcagttgcatacccagggcctggcacttagtaggtactcagcatgtttggcaaatgaaatgagcatttgagaatgagggttgtgagccccagaccaggtcccacttgacttgctggccacagttattggtcctgttggggtctagtggccaatgtggttcttcaagagaaggttctctgctccccagtgatgtttaggtcttgggattcccactctccacacagactcaaagtcatccaggcagagacctccaaaacacttgttcttgggaggtggggagctgctggcaggcttgccaagctttccctggttgcaaggggattccccaggggttcctccatcagcatcatggagaaagggctggaaagaaaataggctgtggagccagcaagacttgcactgtttgagtctccaaacccacaactgtaacgtattcatatgggcttcacagggacacggggatgtcataatttttatttttattttttgaaatggaatctcactcactctgtcacccaggctggagtgcagtggtatgatcctggctcactgcaacctctgtctcctgtgttcaagcaattttcctgtctcaagccttccaagtagctgggattacaggagccctccaccatgctgagctgatttttgtatttttagtagagatggagtttcactatgttggccaggctgttctcgaactcctggcctcaagcaatccgcccaacttggcctctcaa

SEQ ID NO: 1242393 - DNA, 4001 bp, Homo sapiens
ttttctgggaactagggacagttttgtaagtaagatggatagtgtttggaatagacctctccatttgactgtttcacattcattcatagtgtaatgaaagagaaggaaattatctgaagttatgaataagggaggagacttgcttgtgtccttcaagcttacctttgcgagttgctcgtgaatctcaagcaggctgggtcggttgaccttgggcccactgatgctgccggtgttacgatagtactctatcttgggaacggcatccatggtgttgtggccaaaagtttgtagatagtatgtgtttgtgtgagaatcataagcgtgaaaactggcatctgttttagcagtttctccactttggaggaaattgtcatagcactcctgattcccaggcctaaagctgattctgagtcttttctgagcttcatccccaaaagaggtttcttcataatgtggtgggtcagtattgtcatctgcagctgcactgctctcatggttctcatttatgacactaacttgaaagcgattggtattactgggcactgaatccagaaatacattggaagagttgttcagtgacatcttccaaaattgattttttactgagctatctactttgtggttgttttaaaaaatctatatatttcttcatcaaaataaacactaatgtgcttccattagggagctcctggcttttgttctagatgattcaataaatagattcttgatatattgtctccgatataatcttcaggatgttcttcaaagctgtcattgaaaaagaaaattaaacttgttccaagtaatacaaatatatttaggtaagggtgggatataagggaacagttttattttacaagacatacaattttaaactcatttcactaaaatttatctgtccaggaaccttagtcatgtgagtaattaaatctgataataaataactggaaaactgttccagcaaacagaacttccaatgcagtcattaaaatgttacctgtgtttgtagtatttgcttgaattcagtgcactggagttcactgtgactttagaaaagatgtaactttacttattgaatacagtaagagctgatgagaatattctcagcctaagacacagttcactgacagtactaaatgctgaaactgcaaagtattttgattgttaggaatatatactatacaacatataaaatgaaaaacaaaacttctaaaaaatatattcttgctagtttataaaaatctgtacatgttcaacttataaattccaaattttgttacctatgcaacaagtaaaaaattatgttttagaatatgcatttaaaaaatacatcccatcaagatgatgtctctgtgaattcttagatcttttacaagatccaaatgtttcatttgctcatacatttgtttgttttgcaaatactaacatgaaaccttaaaaaaatatgaatatagaaataagtcatatatctataagaaataagtcatataccttaaaaaagtcctctgctatgtttaggtaaaataatcatgctctactgactcattttaatgaaatgtcttcaataattgagaggtttatatttgactgtgaggtgaatagacttcacaataattttcgcaatttcatagtactggcctgtcttaaaacacttgctttagaattatatttccttattgataccttaaaatttggcttttcaagggaagttctagaaaaatgagataaatataaataaaaacttgtctctctcatgcagttattaaagctgtgtatttgaattaaaaaaaccctcaacttcatttctcaagtaacctttcctggggaaattataaatgaagctattatcgttttagtttttacaaaacacttctcttcatagtccttgacaccctcacctactcctcagaatctactttatgacataatattaagtatgatttttaccctgcccagaaatgttcaacttaccaccaaggagccttcttctgaggaaatgtaacctgcttcagcgtcacccaggaatatatgggacacttagctttcagccagaaagttaggcttctgcttattggttagaaactttcttgaaagagatgactgtgcaatgattggcctggaatagtactgtaagccccaccaggtcattagccctgaggaaacttaagtaccacatcaactggtaactagtagtaaaccattaatccttttagacaggaagtaacatagagtttctttaattcataaggagaattggatcccttaacagcaattgtccaaaaaatatgagcattgccattagtcatttgggaatagataaattgagttccaccgtcttacagatgagtcctagtgacctcctattgtttagcatgtgtatcaaaatatagttctccagagacaatttctatactctgtaactagaaagtagtgtctgaaatgattttatcttgcttgtagtagacattaccttgactcttttgcatgggaagtaagcagattaagagtggaatcaatgatttattgaaaatatttctattttgggaaatatgggaaaattttttttttttgagatggagtctcgctctgttgcccaggttgcagtgcactggtgcaatctcagctcactgcaacttctgtctcccaggttcaagtgattctcctgcctcggccacctgagtagctgggattacaggcgcccaccaccacgcctggctaaatttttttgtaattttagtagagatggggtttcaccaggttgaccaggctgatcttgaactccagacctcaggtaatctgcccggcacagcctcccaaagtgtcaagattacaggtgtgagccaccgcgcccagcagggaaaactgttttaagcaggaaccaaactgtgggtaagcatctcagtggcactactaaatgacctttctgtctccaactagaaaaacatttttttgtccaactcagtttttgagttttgttgaggaaaaggtttttctttttcagatctgcaagtaggtgattattaacactgcaaacaattcctccctcaagtctgtcactgattatcaatcaggatgattgaatgagtcctctttgtttcttataagaaacgatttaagtgatttccagttgtctgagtagctcggttgtggtgtaatatagtggctaggagcaagactcaagtcagaaggcccaacttatgtcgtggccctgccacttgctgtctgtgtgaactcagtcaagttactcaatctttctgtgccttaattttctcatctgcaaatgcagttgtggattataattgtacctaccttgttgtagagttattttgaggaataaatgagttagtttgtgtatggggtttagaacagcaacaatttgtacctagtgcttgctttcactattttagcgctatttacaattagctggggatttttacttagcacatacaagattgtgaggtgaatcattagagattgggatagatattttgtctataaaaaataagtgtaaaggtaagttagtgaactgatacaggattatagaagtgtctagagacacctaagtaaaaccctttagatcctcttcgttaagtaaatgtcatgctaatcagtcaggctaatgtcgtgaggctatatcagaaatagagacagaattacaagtatatacctataactcattccactcttaaaggtcaccagtacaaggcatttatctgttcaacaaagggttctgattcctcatatagaaagtgttttggcataggagtgtccgatttcaaattcagctgggtggggctggttgtttagatcaagacaaagaacagctaggatggggctggcacccaaaataagttctattcaccagaccaggacaggagccataagctggcatcctccaaccctttttggagccacttatttactctacaacctttttcctctaccaatgactgtgaatacctctgataccagtcaatttcctttttcttgctgactgactg

SEQ ID NO: 1242394 - DNA, 4001 bp, Homo sapiens
cagactttccatctaaagctcagagagaataaattacatgggaatcaggccctaaaagccttttcagaagtcttccatttgacagaatagcacattaggtctacccaccatcaccctgagtgggcttagctacttgtgtcaaggtctccataaaaatacagatttcaaaaaagaattttgcaatacacattcgaagtcttggaggaaagctgctaagatacgaccagtaactactccatgaaaccagtcttaaagcagactgaaatagccaatgatggctacagaacacatatccaactcactaaattttaaaatttaggattctgtgtgctgaaaacgattacattctttgatattcacttttaaccaaaatacccatttcatttctaagaagacaaaaatgaggaagttaaaatatacatttgccttccttcttgtcatacaccttcccacataccaaattactactgcaaagagccactatgctattattccaaagagttcctaagcatctcacaaagagatgccttggttcctgatgactattataatcataattatatgattatgatcttccagatccatagatggtcatcttggataaagaacccagtaatgaaagtatgctgcggtctgtgtttctacttaccctcgatgacatcctgggggtgagaagtccggtcactgggtggatccagtgcaacagttgccagcgaagtggtggccccagacatctcactcataggctcactccggcttgtttcaggcacgctttcccgggagctaaatcttactcgggaactagatcgagagctgaggtccggactggtgtctgacaaacctggaatgtcatcgatctttgtcggtgtcaccatgaaccgaactgaagccatcttggtggtggtttctggaggatgcattttgttctttttaagaacaaaaaaagtggggggaacctcgcaaaatcttcctcttacgctagctacttttgactgcaatacaaaagataacttgaaaaataacacatttcaataaccttgattcacaccacacaaaaagccccaactaagaatacttctactcagaattcaagccgactgtcctagaaagtgcatcaccaataggtgaatatattttttaagagagaaaaaaacaaaaaacaaaaagacaaaacaatgccaatcttgtgtgacttctttccttcagaatgaagagctacctagctaacccctctggtccggggctgaaggctcagtgccatggtctcagggcagcagatgaagcctccctcccctcagcccccagtttcctgtcgaggtagtcctttatctggtgagtgtcccacggttctagttgggcgaagtgcgtgcaggcaaacctttatcaggcgactatagcgtggatcagattgctaaaaggtgtacacccggccacctgttgtgtatcaggtgaataccccacaggtctggctggggggaggtgtatgcaaagccacccggtgtttttgatgtcgacaatccacttgggtctggtgggaaaggtgcacatgcataacgggaaaaataacccacactactgagagaagggtgagcagaggaggatgcaggggcagagcggattcctgtctccgagaggtcggtgggggtggcgcgcccgctcttctcctagcagaaaggtcctcggggtctgggaggaggttagcggatcaagacacctcggactgcagctcagagtcgtggcaagtcgtagctagtccactgagccacggtccgctcgctaggtttctcctgcgtgtgacaggacgagccaccccctttgccggaggcgcgttctcccctacccccgccccggcgcaggtcaccccctcgtcgttcttcctcagggtcccagtagaggaggagacggccacgcaggctggcctgactgggcagcagggtgagggagaaggaggtcgcaggtgcagtatcccggcgccagctgatgcgggtgcgcgcgcagctgttgtttactagccggtaactgtttcagagccgcggcgcgcgcagggttcgcgctgccggggctggcgccccctccccggcccgacgccagagcagcagttacgtgacctggcctcccccagccccgggcccgacggggtgcgcccgcgccgccgcagcccttcccttccctccccgcttgttcctcattcgaggtgaaccttgcgaagagaagcccgggggtgcagtgagagggcggaaccgtcccgcgggcgcccgaaagccccgcccagccgccgcagcccgcggtgaccgagtgcagcgcgcctgcgctcgccgcgggacacggcaggcggggcggggccgaatacgagtggccaggggcacgacgggagctgtagtccagggcacggcccgacccgcgtgaagaggggaataatccttttcctcggtccggctgtgctgcacactcactctggaagcatcctagagggcgggcgctgctcctcaccctcagaacccggggagccatttctctttcatgagtgtctctgaaaacatcattcatgatttctttaaccagaaacaccgctcctatacctgggaataaccctcattgtaatttttatgtagaggtctacatacaaataaaccacttttatgtaaaaaaaaaaaattaaaactataaagtaggcctggcgcggtggttcacgactgtaatcctagcactttgggaggctgaggcgggcgtgatcgatcacctgagctcaggagttccagaccagcctggccagcatagcgaaaccccgtctctaccaaaaattcaaaaattagccgggcgtggtggcgtgtgcctgtaatcccagctattccttagactgaggcaggagaatcgcttgagcttgggaggcggaggttgcagtgagccgagaacgcaccattgcattccagcctggggggacaagagcaaaactccgtctcaaagaaataaataaataaaaataaaactataaagtaccttaaacacatttgtcctactttaattttttgttgttgttcttgtccttttaataaatgctatgtccactttctagtcagactgaaagttccactaaataatacgtttttttatacctggagaagacgttgatgtattttctcaaatccattccatgttttcaccactacatttgtcgctagaatattttttcttagtgtttatttaatgtataaatggtggtgttcgataaattctgactcaccaatgttttgtttgaaaagctatttcctatagctgtgatcaagacctctaaatttaacaatcacctgggcccagaaactggcccccggttttgcctggggtcttggctcctcacaagtggttatgtttaagcagcactcctagcaatgggaactgtattcccggaagttctcttttatcaaatgacacacaaagtccaaatcctttcaaggattaaaggatcaaaaaggttaaaaagatcctggtaacaaaatgagaaatcctaatgtaaagtgtaaacctcctaaagtttgactctttataaagtctgggtttcttgattcaggcccacagctttcatccatcctcagcaggatcaattttttcctcaggcaggcctgccgttcattcaaacttcagacttttcctttataaagaaacacagaatttttatgaaacccaatttcctaccagtgtatctgcatttacttatatgtaccacctaattccaatatactatccctgttaagacttttcttgtttctgagcactaaccaagctctataaatgtatgtctcagacgttaataccccagggatctctttattttctcagggagacacagcctctggtgcaaaatgaagcctcattcctcaggggatctcttatggaaaaagtcctttttatattcatgccagtttgctttctctcctctatattcattaggaatattttcaggttaaagcttttaagtctacacaggtggtagcatggagcaatgc

SEQ ID NO: 1242395 - DNA, 4001 bp, Homo sapiens
aattttaaaatttaggattctgtgtgctgaaaacgattacattctttgatattcacttttaaccaaaatacccatttcatttctaagaagacaaaaatgaggaagttaaaatatacatttgccttccttcttgtcatacaccttcccacataccaaattactactgcaaagagccactatgctattattccaaagagttcctaagcatctcacaaagagatgccttggttcctgatgactattataatcataattatatgattatgatcttccagatccatagatggtcatcttggataaagaacccagtaatgaaagtatgctgcggtctgtgtttctacttaccctcgatgacatcctgggggtgagaagtccggtcactgggtggatccagtgcaacagttgccagcgaagtggtggccccagacatctcactcataggctcactccggcttgtttcaggcacgctttcccgggagctaaatcttactcgggaactagatcgagagctgaggtccggactggtgtctgacaaacctggaatgtcatcgatctttgtcggtgtcaccatgaaccgaactgaagccatcttggtggtggtttctggaggatgcattttgttctttttaagaacaaaaaaagtggggggaacctcgcaaaatcttcctcttacgctagctacttttgactgcaatacaaaagataacttgaaaaataacacatttcaataaccttgattcacaccacacaaaaagccccaactaagaatacttctactcagaattcaagccgactgtcctagaaagtgcatcaccaataggtgaatatattttttaagagagaaaaaaacaaaaaacaaaaagacaaaacaatgccaatcttgtgtgacttctttccttcagaatgaagagctacctagctaacccctctggtccggggctgaaggctcagtgccatggtctcagggcagcagatgaagcctccctcccctcagcccccagtttcctgtcgaggtagtcctttatctggtgagtgtcccacggttctagttgggcgaagtgcgtgcaggcaaacctttatcaggcgactatagcgtggatcagattgctaaaaggtgtacacccggccacctgttgtgtatcaggtgaataccccacaggtctggctggggggaggtgtatgcaaagccacccggtgtttttgatgtcgacaatccacttgggtctggtgggaaaggtgcacatgcataacgggaaaaataacccacactactgagagaagggtgagcagaggaggatgcaggggcagagcggattcctgtctccgagaggtcggtgggggtggcgcgcccgctcttctcctagcagaaaggtcctcggggtctgggaggaggttagcggatcaagacacctcggactgcagctcagagtcgtggcaagtcgtagctagtccactgagccacggtccgctcgctaggtttctcctgcgtgtgacaggacgagccaccccctttgccggaggcgcgttctcccctacccccgccccggcgcaggtcaccccctcgtcgttcttcctcagggtcccagtagaggaggagacggccacgcaggctggcctgactgggcagcagggtgagggagaaggaggtcgcaggtgcagtatcccggcgccagctgatgcgggtgcgcgcgcagctgttgtttactagccggtaactgtttcagagccgcggcgcgcgcagggttcgcgctgccggggctggcgccccctccccggcccgacgccagagcagcagttacgtgacctggcctcccccagccccgggcccgacggggtgcgcccgcgccgccgcagcccttcccttccctccccgcttgttcctcattcgaggtgaaccttgcgaagagaagcccgggggtgcagtgagagggcggaaccgtcccgcgggcgcccgaaagccccgcccagccgccgcagcccgcggtgaccgagtgcagcgcgcctgcgctcgccgcgggacacggcaggcggggcggggccgaatacgagtggccaggggcacgacgggagctgtagtccagggcacggcccgacccgcgtgaagaggggaataatccttttcctcggtccggctgtgctgcacactcactctggaagcatcctagagggcgggcgctgctcctcaccctcagaacccggggagccatttctctttcatgagtgtctctgaaaacatcattcatgatttctttaaccagaaacaccgctcctatacctgggaataaccctcattgtaatttttatgtagaggtctacatacaaataaaccacttttatgtaaaaaaaaaaaattaaaactataaagtaggcctggcgcggtggttcacgactgtaatcctagcactttgggaggctgaggcgggcgtgatcgatcacctgagctcaggagttccagaccagcctggccagcatagcgaaaccccgtctctaccaaaaattcaaaaattagccgggcgtggtggcgtgtgcctgtaatcccagctattccttagactgaggcaggagaatcgcttgagcttgggaggcggaggttgcagtgagccgagaacgcaccattgcattccagcctggggggacaagagcaaaactccgtctcaaagaaataaataaataaaaataaaactataaagtaccttaaacacatttgtcctactttaattttttgttgttgttcttgtccttttaataaatgctatgtccactttctagtcagactgaaagttccactaaataatacgtttttttatacctggagaagacgttgatgtattttctcaaatccattccatgttttcaccactacatttgtcgctagaatattttttcttagtgtttatttaatgtataaatggtggtgttcgataaattctgactcaccaatgttttgtttgaaaagctatttcctatagctgtgatcaagacctctaaatttaacaatcacctgggcccagaaactggcccccggttttgcctggggtcttggctcctcacaagtggttatgtttaagcagcactcctagcaatgggaactgtattcccggaagttctcttttatcaaatgacacacaaagtccaaatcctttcaaggattaaaggatcaaaaaggttaaaaagatcctggtaacaaaatgagaaatcctaatgtaaagtgtaaacctcctaaagtttgactctttataaagtctgggtttcttgattcaggcccacagctttcatccatcctcagcaggatcaattttttcctcaggcaggcctgccgttcattcaaacttcagacttttcctttataaagaaacacagaatttttatgaaacccaatttcctaccagtgtatctgcatttacttatatgtaccacctaattccaatatactatccctgttaagacttttcttgtttctgagcactaaccaagctctataaatgtatgtctcagacgttaataccccagggatctctttattttctcagggagacacagcctctggtgcaaaatgaagcctcattcctcaggggatctcttatggaaaaagtcctttttatattcatgccagtttgctttctctcctctatattcattaggaatattttcaggttaaagcttttaagtctacacaggtggtagcatggagcaatgctaattcttttttttttttcttttttgtaagataaaggcagaactgcagccaacattaaaaaactggtagcaaaattcacttactgactttggtgcttaagaaacatgtctccaatcattatccccttaattggataagataacttttaaaaatctttcagatccaatgttatatccaatcctgtaagtgaacaagctaagaaataaaattgcttgacaggaaacaagtatcccatttcacaatttctctaagttaactctttaaaatccttcagatccaatgttaagaaccctgcaagtaagtg

SEQ ID NO: 1242396 - DNA, 4001 bp, Homo sapiens
aagaatgcttaagggtaacgtaagaaccgcagactggacaaggaacctgttctgctggtctaacacattactaagtccacttttccaaagaataaaaatacaattctgtaacatgtaagtcacaagtctaacaaactaaactataaattacctaatgataattacaatattaagaaattaacactggtatagtctttacctggaatttttacaacctaaatacagcatgatggataaaaactaaaaccacaatttggaattaatttggaggaagaggaaatgataaatttgtattccatactgtaattttaatccagtgtatgacacactgtaaaatttgtcaaaaagttgaaaacagtaaagtctgagaaccaacctatgtctccataaaagaaaaaatgattagtcaaggatgagtgaattctaggactgtaaactttaccaaatctaccttgtctccagatactaaaaacacaaacagaattagggaactaaaatcattctggtttcctgaaccctttaggttaaaaggaacaatatttcctgacaccggaaaatggtgagtaagccttgctttcacaagtcagtgggtgaggctatggttttcaaacttgggtggaatattattttaagagtctttaagggaaatttttatcattaaaagattacattagttacaacacagcataaaactaaatatataaagcagtacaggtctcaaacttttaaatttcagagtccaaaaaatgttatgatctccccattttctctcttctctctcttccatcacctcttcccagtacctcaaataaaaccaagccagctgacacacacaaactggtttaggaagctaaaggtctgtagcagtcaacatgagccaggagtggcttgtgtgctacctgctaactctaatcatcagactttccatctaaagctcagagagaataaattacatgggaatcaggccctaaaagccttttcagaagtcttccatttgacagaatagcacattaggtctacccaccatcaccctgagtgggcttagctacttgtgtcaaggtctccataaaaatacagatttcaaaaaagaattttgcaatacacattcgaagtcttggaggaaagctgctaagatacgaccagtaactactccatgaaaccagtcttaaagcagactgaaatagccaatgatggctacagaacacatatccaactcactaaattttaaaatttaggattctgtgtgctgaaaacgattacattctttgatattcacttttaaccaaaatacccatttcatttctaagaagacaaaaatgaggaagttaaaatatacatttgccttccttcttgtcatacaccttcccacataccaaattactactgcaaagagccactatgctattattccaaagagttcctaagcatctcacaaagagatgccttggttcctgatgactattataatcataattatatgattatgatcttccagatccatagatggtcatcttggataaagaacccagtaatgaaagtatgctgcggtctgtgtttctacttaccctcgatgacatcctgggggtgagaagtccggtcactgggtggatccagtgcaacagttgccagcgaagtggtggccccagacatctcactcataggctcactccggcttgtttcaggcacgctttcccgggagctaaatcttactcgggaactagatcgagagctgaggtccggactggtgtctgacaaacctggaatgtcatcgatctttgtcggtgtcaccatgaaccgaactgaagccatcttggtggtggtttctggaggatgcattttgttctttttaagaacaaaaaaagtggggggaacctcgcaaaatcttcctcttacgctagctacttttgactgcaatacaaaagataacttgaaaaataacacatttcaataaccttgattcacaccacacaaaaagccccaactaagaatacttctactcagaattcaagccgactgtcctagaaagtgcatcaccaataggtgaatatattttttaagagagaaaaaaacaaaaaacaaaaagacaaaacaatgccaatcttgtgtgacttctttccttcagaatgaagagctacctagctaacccctctggtccggggctgaaggctcagtgccatggtctcagggcagcagatgaagcctccctcccctcagcccccagtttcctgtcgaggtagtcctttatctggtgagtgtcccacggttctagttgggcgaagtgcgtgcaggcaaacctttatcaggcgactatagcgtggatcagattgctaaaaggtgtacacccggccacctgttgtgtatcaggtgaataccccacaggtctggctggggggaggtgtatgcaaagccacccggtgtttttgatgtcgacaatccacttgggtctggtgggaaaggtgcacatgcataacgggaaaaataacccacactactgagagaagggtgagcagaggaggatgcaggggcagagcggattcctgtctccgagaggtcggtgggggtggcgcgcccgctcttctcctagcagaaaggtcctcggggtctgggaggaggttagcggatcaagacacctcggactgcagctcagagtcgtggcaagtcgtagctagtccactgagccacggtccgctcgctaggtttctcctgcgtgtgacaggacgagccaccccctttgccggaggcgcgttctcccctacccccgccccggcgcaggtcaccccctcgtcgttcttcctcagggtcccagtagaggaggagacggccacgcaggctggcctgactgggcagcagggtgagggagaaggaggtcgcaggtgcagtatcccggcgccagctgatgcgggtgcgcgcgcagctgttgtttactagccggtaactgtttcagagccgcggcgcgcgcagggttcgcgctgccggggctggcgccccctccccggcccgacgccagagcagcagttacgtgacctggcctcccccagccccgggcccgacggggtgcgcccgcgccgccgcagcccttcccttccctccccgcttgttcctcattcgaggtgaaccttgcgaagagaagcccgggggtgcagtgagagggcggaaccgtcccgcgggcgcccgaaagccccgcccagccgccgcagcccgcggtgaccgagtgcagcgcgcctgcgctcgccgcgggacacggcaggcggggcggggccgaatacgagtggccaggggcacgacgggagctgtagtccagggcacggcccgacccgcgtgaagaggggaataatccttttcctcggtccggctgtgctgcacactcactctggaagcatcctagagggcgggcgctgctcctcaccctcagaacccggggagccatttctctttcatgagtgtctctgaaaacatcattcatgatttctttaaccagaaacaccgctcctatacctgggaataaccctcattgtaatttttatgtagaggtctacatacaaataaaccacttttatgtaaaaaaaaaaaattaaaactataaagtaggcctggcgcggtggttcacgactgtaatcctagcactttgggaggctgaggcgggcgtgatcgatcacctgagctcaggagttccagaccagcctggccagcatagcgaaaccccgtctctaccaaaaattcaaaaattagccgggcgtggtggcgtgtgcctgtaatcccagctattccttagactgaggcaggagaatcgcttgagcttgggaggcggaggttgcagtgagccgagaacgcaccattgcattccagcctggggggacaagagcaaaactccgtctcaaagaaataaataaataaaaataaaactataaagtaccttaaacacatttgtcctactttaattttttgttgttgttcttgtccttttaataaatgctatgtccactttctagtcagactgaaag

SEQ ID NO: 1242397 - DNA, 4001 bp, Homo sapiens
aaaacagtagaggtggtggagaaagcaaatttaaaaaacaaatgaaatgaggtacagatggacttcgtttgcagcttatgaaattaacgaagacaacagcaaagacaaaagcctaaagggattaaactgtaagggtggaaaacataagcaaagaaggtgcagcttcaaatacacattagccttactatcacatttgggattaagtaaaaaataagtaaataaataaatacacacaggcctgagacagaacctaattgagctgaagttgagttgtagagaatcatattcaagttcaaagcagattaaacttgctttccactttccatcatcctattcagcaaaatgaaaataaccttgcggacaaagagtttacataaaatcttttttctgatattcccctaataaattatctcactagaaggaaaaaacaaaaggaacattttccttaaaagtttgcatcttcaaacaagattcataaaaattctcgaatggttttaagaaaaagataaccaaccgctattgacaccaaggaattgcaatgtgttacatgctataaaggaaagtgagaatcacagaatcacggaattaaaagtaactttgaggccggacgcagtggctcacacctgtaatcccagcactttgggaggcagaagcgggggatcgcttgaggtcaggagtttgagatcagcctggccaaaaaggtgaaaccttgtctctactaaaaatacaaaaattagccgggcgtggtggcaggcatctgtaatcccagctactcgggaggctgaggcaaaagaatcgcttgaactcgagaggcggaggttgcagtaagccgagatcaccccactgcattccagcctgggtgacagagaaagactccatctccaaaaacataaataaaataaaataaaagtaattttgagagcttattcccttattcttaattcatataactaaagacgctgctcacgatttacagacttgaaaaataaggggcttcaaattacaactatatttaatactataatattaacaaagatttaattgcttgtttaaaaattcaaaaccacaattcctctagcaagtgtgaactgttaccatttaaagaaaataatagggataatcacattcatcaaatactttttttaacctgatgctatgctagtcaccacaatgaccatctcttgtacttttgttctgccattaaaaaattcttagaccattcattattgaattatagtttaagctggtaaactgaggtaaaatactgaataacctgagaaatcacaagtacagtcaaagtccacggtacaaaactactgaaccatgctccctctttatataatattatgtaaactgctaagtttaaatgtcatccactcggtgggtttaaagtcttttccagatataatctaaactgtgaggaaaaagtgaattctaaattccacataaattgacttctgtgtctttctttttgcttgaaaactcttcaaacattgccactgattcagtttcacctgttggtaatgaacacagaactcattgtggggaaaaacaatccagtgtgtgagaaaagtaagagaagctatcagatacacaggggagtgaaataagtaactgaaaaacacctcaaccacaacacttttctctgtcctaaagaaggcattttgaattttgatatcctagttacttctttcatgaaacattttataggttccaaaagctcccaagttgcgtactcacctggttcatctgaatcctgaatccgggcttttatgtctgctaaactaggctcttgagagatcgaagccgctgccccctcctctgggtcctctaccttagtcacagtaaaatgtggcattgttatagttagataatactttgctctttctgtatttaaacttccttccagttagttttccctgcctacctcttccttgctgtcgtttcagactgtgatccctgcctacaagagacagtggctgggattcgggaagtactttaagctcacgtgacctacagccctgagggagtggggcgcttgaagacacgccttccacagtgtttatcattcacttaaaaggattaagcactccacccttgcttattgttattaacctgaagaaccccaagaacagtttagcctgcttcccaaagctgctgaaacctggagactggacagaattcacagtgaactactgtctaccgcttgctcctctatttccttcactgaagttgtcattcttatctgcatgtcatgatctcaacctctgccctcatatttcacacaagaaagattagagaacagttaactttttttttttttttttttgagacagggtctcgctcgccctgttgtccagcctggagtgcagtagtgcgatctcagctcactgcaacctccgcctcccaggttcaagcgattctcctgcctcagcctcacgagtagctgggactacagacatgtgccaccatgcccagctaattttttttttgtatttttagtagagacgggggtctcaccacgttggtcaggctggtctcaaactcctgacctcagatgatttgcccacctcggcctcccacagtgctgggattaacaggcgtgagccaccgtgcccagccgggaatggttcatttttatactgtcctctttaaagactgactggcactatatcaacttaaaatatgaaagatacggctgtgcgccgttgctcacacctgtaatcctaacactttgggaggccaaggtgggcgggtcacctgaggtcaggagttcaagaccagcctggccaacatggggaaaccctatctctactaaaaatacaaaaattagccaggcgtggtggttcatgcctgtagtcccagctgctcaggaagctgacacaggagaatcccttgaatccaggaggcggagattgcagtgagcagagattgcgccactgcactccagcctgagcgacagagcgagactctgtctaaaaaaaaaaagaaagaaaaagaaaaaaatatatatgtttaaagagttcagaacttttgtattgtacagagtggttgtttcaaagaaaaaaaaaaaagtcccagaaaatccctttaagtggcgtacagttcctttagcatacccttaaaataacatacttaattcttgatataatttatcagacaactgtatcaagttctcagctgacgactttagagtatgaggttctacctctgtacttagcaggggagttcagtaaattgagccctgtgtaatgtccatattgatgatgtagtataaggcctctgttattgggaatgccttccatctgacaagtaaggttgtgctaaatttaactgaagcaatgatgctttgaattcttagtcattcagttatataccacttcttgcagcactattcacaacagccaaaatatggaatcaacttaagtgcccattaacacatgagtatatgaagaaaatgtggaatatatatacaacagaatacgattcagccataaaaatgaaatcatgtcatttgcggcaacacggatggaactggaggtcattatgttaagtgaaataagccaagcatagagagacaaatatcacattttcattcatacgtaggagctaaaaatgtggatctcatgaatatagaaagtagaatggttgttaccagaggctaggaagggtaggggggaaggaggattaaagaggaaaaaaagaaggtaaatataaaagcacaatcacgttgataactgatttatgctagcaagaatactggccttgttttggaataaacaattttttttttttttttttaaagaaaaagctaggctgggtgaggtggctcatgcctgtaatcccagcactttgggaggccgaggcgggtggatcaagaggtcaggagatcaagaccaacctggctaacacagtgaaaccctgtctctactaaaaatacaaaaatcttagccaggcgtggtggcgggcgcctgtagttccagaaggctgagacaggagaa

SEQ ID NO: 1242398 - DNA, 4001 bp, Homo sapiens
aactagcaacactgtccttgtacagaagagacaggaagaagaaataaagtcccacagtctcatttgggatgagatttagcaaaaagaagtgggagttcaacaacccctagccttccctcgcctaccccagctgtggaaaacggagaggaagctgtatggggccactctcagaccagcggccatgtcagaaagacagcacctgggaaggaagagtctggagtggagcggcgatcagggcaacaccctaccatcactctaactgactggctcacagaggccaaagatgtgcctcagcccctggcctggctggctgctgcctccaggccaagctcactactgacagcagggagaggggggcaggagaaaacccactggtctggccatcctctcaccttctggtttgctttctgctttggcctggggttgggctctggccccttgattcaagctctcctcctccttctccttggcaaggcgaactgcaaatgagacaggacatacatcttacctggaattgtaggatcatccctgccacgccctttcagttaggacagtcagctgagcagccagagggcagctgcagagtgtgggaaaaggctgccatgggggttgtgacatctggattctgatcctacgaggcctagttgtggtgcctaattcccaaagttctgtcttacattctctgcattgtcactgactggctgtgaccttagggtaagtcatttcccttctcaaggcctatttcctctctggtaaaatgacatggttggactcaggaccaagaaataggatttatttcctttacaagctcaagtgatggcctgcttgggtactgaattgagaaggactctgacccaaactttgtagaaaagtaccatgattgattggtaatgtctgtgatagacatggaatggagaaataattgcagggagatgtttttgccatccttggactatattatctttgtagcttactttctatgaatctactagaggctttgttatagctccagggggacggctgatggccatgttcataagccttccctctccagtggaaaaggggaaatggttcaccaacaagctctcggatacaccctttttgaccccaggcacaacaagagcccgagaagggcctccttcagatccctatgcacatgctttgctggaggcccacagggcagcatgcacagaattgtgctgccctgatttccaggtgagaaacacgggacaggcaactctctttaactgggactacgtgccaggaaacatgcaaagcactttacgtgtataatttcaaggtgagaagggaagaaggaacaaggctgaggtgaaggagtccacagctgtgtggcctgggagggcgaaggcagtggtgcaagtgaagaacaaagtggtgtcatgggatctacgggctctattctgaatttaggctggctctgccccatgagcaccgggtgactttgggaagcctgtgtgccggcactaagcctcagcatcctctctaaaaaggcaataccgtcatatcctcaggggactgatgtgatgaggatccatgagacaaaataaataaaaacacttttactgctgcaaatgctggcctcactcatattgttcctttagcacaattctgaagcctgatgacctgggtttgaatcctagttctgccacttgcgctatagctgtggacctaactgggtgattccttaagctctctgtacttcagattcttcatctgtaaaatcttccagagttggtgacaaagtaaatgaatttatacatgaatatggtcaaaacagtgtctggcacctagaaagcactctataacttttagctgtaacaacaacaacaacaatgatgaaaacaaattgacaagagtagttgagagcagctgtcctacctgggaagcaccccacagtgatgatgcccggcatcccagagggtccgagttagaaggaaccctggagatcatctagtccataatacagacggactgagaggaaacggagaagctggaaagtgcaatctgggaagctgggtggatcaaaggctctgcctggctccaggacaagcaggaaacagataaatgggtctggaatttcctcctctctacctgtctcctaaactctcagttagttcagctgcagctggctctggcaataagctccatgggtagagccactatgacatgtgtggtccctcgaagtggcctggtgggcctgggtcctcatcagaactgagaggtggggggccaacacaccttcgtccagacaaacccagtgcccccttggcactaatcaaaccctgaagtcttctgttgagcaatgtgtagctgctgtcacaggagggctcccttggttctggtcttggcactgagattatctgctggctgttgctggaagggctagccataaacacaagcttccccctttccttctcatcctcatcacagcctagactctcacttcccatgttactgaggaaaacaggtcagctgcagggtctcccccaccctgtctcacacacatccaagtgaaatcaccagaaaagccatgggaccctggagaggataagccccttcacagggaaggtgagagttcagaccccaggaaacatcttttccacggatcagctctgtggaaagagctggaacacctgtaaagagtggaaacatctggacggccatctggaaacagcatacaaaaacacaaatgtgcatctagagagcctggggaacaaaggccctcatcacagccctgcatggtccccacccctcccatatgtcatctcagggtgtagaatcaggctgggctcttgagcacgactgaatcccagaggacatctgcagtcacgagagccattccatgccccaaagacacccagagacaatgtaccagcatgcttgtcctccctgggatgattgctgctggctcctgggcactcgtttcctcacatgcctctcccctctcagcagggccggatcatggctttagcatcaatctcctctgacctcagcctggcctgaacatcacataatcctgttaggacaagtaggccagctggaggctgttggtcatggagatgcccagctgggggccctccagtcccacccaagaggtctttatcatcaggactttgctagagtcagtgattcctctgggagtagccactgatgacccagagatacagctttcctcatggggccctggccagagcaccccggcactcatcaccagaggctgtcaggggctgcagcttccattctgcaaaccccagaggtactatttttctagagctgacatttggggatggcctctctcacatgtctgctgaggtttaccttgaggaattgctttttattttttcttttctctctctttttttcctaacagctccatcagcagcttagattaatttttttctccctttctctctctctctgttcttaccttgaggaattcctaaggaaggtttcatcacttgtctttgatgcagcttttcacagtatggtttatttatttatttgtttgtttgtttgtttgtttatttagagatggtctcgctctgtcaccaggctggagtgcagtggcacgatcttggcttactgcaatctctgcctcccaggttcaagcgattctcctgcctcagcctcccaagtagctgggactacaggtgtgtgccaatttttgtgtttttagtagagacagggtttcaccatgttgcccaggatgctctcgatttcttgacctcgtgatccgcccaccttggcctcccaaagtactgggattacaggcgtgagccactgtgtccagcctttttaaaaattatttatttatttatttatttgaggtggagtctcactctgcagcctaggctggagtgcagcggtgcaatctcggctcactacaacctccacctcccgggttcaagtgactctcccgtctcagcctcccaagtagctgggattacaggcgcctgccaccacgcctggctaattttttt

SEQ ID NO: 1242399 - DNA, 4001 bp, Homo sapiens
taaggccatgaccttggccactggcctcctgctgagctgctccttcacccagacctcgatatgcttgttccacttcatggtgaacacatagaaggcataggccagcagcagcagcaggctctcccaccaggcaatgaggctgtccaggaagaagaggatgagcattatcaggtcaaggatgtagaaggagacatcacggaataagggccaccaggtgaggttgaggatctctcgggagaagagggaacaagtgccaatgacaaagagaatgttgaacacagcagagcccacaatggtaccaatgcccacgttgctgtgggaaatgaagacaccgatgagggaggtgaagagctcaggagcagagcctccagcagccatgaatgtggcgcctgccacatcctcggagatctgcagcttgtctgtgatgacacccagggctggaacgaagtactcgtcgcaaacaatggccaaggccacaaacacatacatcatgccaaaaacgtgcaggaccacccagccctgccgccgctcctccacactgaacagatctggggggtactctcccttggggtggaggtctggcaagctgggaggcagcactgagggactaggactgagctcctctgggagcagggctgttgtgaggcttggggagggagtggtgagcatggctggggttggcttcacaaccacacagtgatggacctgcatggtcagctttgccctgaccgtaggggttgttgaggtgctgggtgctgtggaaggtttctttgccagcctccagactatggctggggctgttttgatggctgatacactggtcctgggtgaaggattcctaagactccaggcagcagtgaaggctttggtttctgctgggctgctgcctgtcatggtgcttattgtcacctgcccctcagaggtggctggggtatgcaacaggactgttccctggggagtcttcgggttgctctttcccactaacccccagggatgggctgagctgttactttccactcttctggggggaaacaggttgtttttttccatgacgctccttggagaagtcaagacgtttgcttctacctcatgtgtcagaaaagttggggtgctatcaaacattcccttgagagtggttggggtggtttcctccattattctcttaagagagttggtttcgagtattttataggttgctgtaatgtcactgtctttcactgttgtcctgggggtgatcgcatggcttgtttccattgtcatgaatgtggacggcacgtaagtgcctactcttctaccacgtggggaaggagtatacttcaccttttccctcacttgagttgggctgtagctcttcatttctcccctgggtgttggggtatacttttttactatttgtctgcttgaagttgaggtgtagtaagtcagtgttctactggatgttggggtgtcttccttccttctttctgtacctgctgctgttgggctgtaattattcttggttgttgttgggatcatcttggctgttcttttaggcatactggggatattctccactgtcatgctcagtgttgcttcatcactgcccactgaggcttggggtaccagcatcttaccccccatttcggagctaggttttgaagggctgctgctcatcatcatcatctcttcactggagaggtcccgactggccagttttataggctgatgagaagagactgctgcccacaatgaggaaaggccccggggtctcctaaggtgctgataagtagaaccgatgatcaacattcccagtaagaagaggaggcgactccaatgaagccgctttgtccggagtaaccacctctcttgcggccccatcctgatcaatttccccatgctggccagttatatctggttacagaaggcctctcattctgtcctaagatggaggctactctgggattcaggttggtgatcagagaagatttctccatgaagcccagccagggggtatccacaaccctaggtgggtaaaaaaaagagattatttaccactaagaggagatctgggatccataacaccctcatatagaaaaaagtgataatagaagccccaggaacacaaaagtatcatgcatggggtctttgcaagagtaaactactcctgccccctgctccagaggaaaatgcctactcttaagagaaagagtgcctaggggtcctctgtactatgtaggcatgccagccccccaggttcctgagctggagcctgagtgcactatggagtccaccaagtcctccctgggctctcagcaaaagatctgccagtactcttcaggtccaagcctaagatcctgggagctcagtcatccatagctggtgtcaggccacaggtctcaccttatcaaaggcaggaaggaggtagggagatatggctttaagctatagacaaaaagaggcagcagtggagggcattgccagggacattaaggctccatgtatttttttgaactgacttaaaacaattccaccatccagagtgggcaaagcttaaaagttaatgttatagagcttcccagagaatatggcatggtgggaggatcatggggaatggagttgaaagcctagactccctgttctgctgcttaccagctgtgtcatcctggacaggctgagccttggtgcctcatctgtgaaatgggcatgataacatatatattgtttatgcaaagataatctctagaaggacatctggggaagggaaactgaggatcaaaggtcagaaggtgacttattttcactgtatattctgttagtttgacctttttatcatgtgcatgttataatatttttaatttaaattaaattagaatatgaataataacagtgtcacaggaatgttgagcgagtaaaaacatatgaaaagcattgaacaggctgagcacggtggctcatgcttggaatccctgcactttgggaggctgaggtgggcggatcacttgaggtcaggagttcaaaaccagcctggccaacatggtgaaaccccatctctactaaaaatacaaaagttagccaggcgtggtggtgcatgcctgtaatcccaggtacacaggaggctgagacaggagaattgcttgaacctggcaggcagaggttgcagtgagttgagatcataccattgcactccagcctgagcaacagagcaagactctgtctcaaagaaaaaaaaaaaagaaaagcactgaacagaaaggttagttttatacaagaatgaaggagggaagaacatgaaaggccctcaaagaatcctcattttataaagaagggcattgaggcccagcccaagtaactatttattaaatctctaattaatgtccacaaactactacaaaacaataactggaaatgattagttttgcatatgatatattagaagtgagctgagtaacccatggaatctgtctggtacaactcctcatctgagatatgaaaacacagaggtccagagaggagatgtgacttgcttaacatcacacagctagtgagtagccaagcagatgagcctcctaactcccctttctttcttgcatgccacactaatcagagatgcaaaggtacttgtcttaaaaagcaagagagggacaagcaaaaggaaaagtaggaataagtgaacttccttctttgtccctgatttctataattttctttccactatctccctgcagccccccgatccttgccatgaactcaacactttgcagcaagcccactcgtatccccagcagaaatttcagagggtctctctctttctaatgttcctgtgttatgtaacagagctgaactggcaccccagctgatccctcctacctaattacatcatttaccttcagaccttgacatctggctgtcttctcagctctggaaacttgtcagaatccaatatctcaaagagtgggtctgaagctggacagcagggaacaccccattctcctgcccccagctctcctatggaatcctaattc

SEQ ID NO: 1242400 - DNA, 4001 bp, Homo sapiens
aggtctgggaatctgcattttcaacacgtgctctgggagattgagatatctagacttccctttgagctccccagtacctagcccctgtgagagccatggtttttctgtcataaacctttcctctgtcagactggggatcaaacactgcctttcaaagcctttgggacagcagtccactgtttcaaggcaggaaaaaataaagggaatgagagattatgcaaaggaaactatttattgatttcctttaatgtgtgtgtggaaacacgcaaatgctgagggtcgtttgagtggggaaaagaaattcatcagccagtgatggcttgaaagacaccccctttaaaaccttctaacctttgtgctgatgttctctgatgttatagtcactgaacaaccttctgatttgtaatgggattccactaaggaggaaaaacaaacaaacaaactagttgccctaagtaacacagtcctcctggtagctgtgccttttatcatcaatttaatatattgattttttgctttccaagtctcccaaagcctgttattcagaagaactaggtcacaagatttgatcatccatcagtgaactaacttaagctttagggttgggtaaggtaatgaatcagaccctgcaactgagccagaattaccacgaggacagtaaccctatggctaagtcgttgtcacattaggggtaactagacacttgcttacccacacattcttggccacatccctcccaatagggcaagattagaaatcatgactaagttatcaggctgcagccttacttacctggagcccaatgcctgctcaagcataactaggtcttgacatggtgagatcagccaggttggggaaagaagttttgaagcaaatagggcagtctgcagggccctggccccagtgctggcagggatattcccagggacaggaaaaaactacaagcaactggccccacaatctcccacataacaagctgtgagaagtcagacagatttgtctgttcagttcaaagcatcctccttcctcgtcccatctcctaatctcgccccatcctatcagctaaaagaaaaaggcaaatgcctgaggccttctagaggcctttctgtactcactttgtaacctatgtggttccacattgttctttgaaccgtaactacccaggggcctgctggcatccatctaagcctatctctagctgggattccctggctccctacatggttagaaagaaagtcacctcttgccctcttaaggacctcactgaggcacagactacaatggagacaccaggtggccagagtggcaggcaagagcccatgttgccttacagggaaatctgagcacgcatgccttgtccagggtgagaggaacgagggccctctgcttccctcaaagaggggataggggaaataaagtgagcatttgggctgaggagaccaagaggccaagtcttgaggtaaattgggctcaggtcagctaagaaggatatacaaagcatacctcagccaggaattacagttttggggtttttccccccaagattctcgtgcgttagcctcccaagtagctgggattacaggcactcgttaccatgcccggctaatttttgtattttagtagagagcggggtttcaccatgtttcccaggctggtctcaaactcctgacctgaagcgatccgcccaccttggcctcccaaagtgctgggattacaggcctgaaccaccacgcccggccaggatttgtagttcaggaattgcagtttaaaaagaacaggaagaggattctgtcaaccggttcagaggatacgagagagggggctaaagagtgacgaggaaaatagcaggaagggttgggctcgtgcaccgacggggcccaggggagtgaggggacaaaagtgtgaagcggacacagagtcaccgggccaggtgaggcccatgggtcagtggggcagaaggggaaggaaagagcccgagaatggggagagattcagggcaatgcagagagacacggcaggaaacccagccaaggctcgagagaagttggggatttgtgggaggagaggggtggccgcggattggccatcgcgaagagaggccgcgccccctagcgtccctccgggatgagccagaaccctgcccgggcgaccctgaagctctccaaggaccgccccgcccagcgcggagtgcaggcgccggattcccttctgtcgcgcggccttatagttccggctgtggcgcgcggacggaaagtttatgccgacggaaagtttatgccgacggactgtgtccggcgatgggcacggggtgagtggggaggccgagggcccgggactgcctttcgctgcttgttggggttacaggtgaaggggttatgggtgaagaacaacccagggccagcgcttggccttcccgccaccgtggcggccgccccgcgctgtctgtgaggcgccagttccggggcgctgctcccggcctcccctcgctctgaggctcggggtccccagctccgcgtaaactgcacgatttcgccctctgctcagctcccctctgccccctctttccaagagagacttccagatcccacattttcttgactgatttttaaggtaaaaatacatctcccagatgtgattttcagtctggacttttagagatgaaattatatctgagaactggggagggactcccggaggctgacgggaaagccaaagagcaggtgaggcactagaaattcaggtagaatcctgctttgagagcgagactgctgagaatcagttctttatgaatgagctaattatcaccttcagggaagaattacaaacgtctagctgatggacacttggtattcaaggccaaataggtggctagggcctatttctcagactgttcctgagaaagaagagccctagttgtttgaacagtacacgtgggaagggggtgggggtgggagacttgggggctcagaatccacccaagtgaggaatacatagtgttgtgctcacaaaattggtagactgtggtgggcagggattcccccccacccaagacggagtctcgctctgtcgcccaggctgaagagcagtggcgcgatctcggctcactgcaacctctgcctcctgggttcaagcaattctcctatttcagcctcccaagtactagaaccacaggcgcacgccaccacatctggctaatttttgtatttttagtagagatggggtttcaccatgttggtcagactggtctcgaactcctgacctcgggtgatctgcccgcctcagcctcccaaagtgctgggattaaaggcgtgcctggccttttttttttttaatcaggcctatactgcttgagtgaactatccttcaggaactttcagttccctcctttactccaacctgagtactaaattgatctcccacgactttgtaactgttaatgaggtgcatttgggagtcgacacaaatgcatcacttgggagaaagagccagctccagaggtgtcttcagagaaggcaagactgccagctgtcatcactgtcaacagcagatttcacgggctgaaagtgcttttttgtatttgatctaagtctgtgtaaactgtttcctcccattctcctaagaggtgagggcagtactcctcatgatcctcaacttgtaaaaaggcctccctgcatgaatgggactaccacaggagctgggcagacgtgagggagtcccccatatgtctgcttgaatgaggagaagaggaaatgtgtttctggtgtccagagttaacatttataatgtattttgctaaataatatatggtatatctggtgatttaggggtagttcatcagttgttatcaaattgttgggcacctactatgtgccagttactgtgataagttttgaggagacatcatgggcaaaatgtggcatggtccctgcccttagtgagcgtatgttatggtctaatatagtgtagttgaaccaatattgtgcaggacctcactttttttt

SEQ ID NO: 1242401 - DNA, 4001 bp, Homo sapiens
ttatttaccactaagaggagatctgggatccataacaccctcatatagaaaaaagtgataatagaagccccaggaacacaaaagtatcatgcatggggtctttgcaagagtaaactactcctgccccctgctccagaggaaaatgcctactcttaagagaaagagtgcctaggggtcctctgtactatgtaggcatgccagccccccaggttcctgagctggagcctgagtgcactatggagtccaccaagtcctccctgggctctcagcaaaagatctgccagtactcttcaggtccaagcctaagatcctgggagctcagtcatccatagctggtgtcaggccacaggtctcaccttatcaaaggcaggaaggaggtagggagatatggctttaagctatagacaaaaagaggcagcagtggagggcattgccagggacattaaggctccatgtatttttttgaactgacttaaaacaattccaccatccagagtgggcaaagcttaaaagttaatgttatagagcttcccagagaatatggcatggtgggaggatcatggggaatggagttgaaagcctagactccctgttctgctgcttaccagctgtgtcatcctggacaggctgagccttggtgcctcatctgtgaaatgggcatgataacatatatattgtttatgcaaagataatctctagaaggacatctggggaagggaaactgaggatcaaaggtcagaaggtgacttattttcactgtatattctgttagtttgacctttttatcatgtgcatgttataatatttttaatttaaattaaattagaatatgaataataacagtgtcacaggaatgttgagcgagtaaaaacatatgaaaagcattgaacaggctgagcacggtggctcatgcttggaatccctgcactttgggaggctgaggtgggcggatcacttgaggtcaggagttcaaaaccagcctggccaacatggtgaaaccccatctctactaaaaatacaaaagttagccaggcgtggtggtgcatgcctgtaatcccaggtacacaggaggctgagacaggagaattgcttgaacctggcaggcagaggttgcagtgagttgagatcataccattgcactccagcctgagcaacagagcaagactctgtctcaaagaaaaaaaaaaaagaaaagcactgaacagaaaggttagttttatacaagaatgaaggagggaagaacatgaaaggccctcaaagaatcctcattttataaagaagggcattgaggcccagcccaagtaactatttattaaatctctaattaatgtccacaaactactacaaaacaataactggaaatgattagttttgcatatgatatattagaagtgagctgagtaacccatggaatctgtctggtacaactcctcatctgagatatgaaaacacagaggtccagagaggagatgtgacttgcttaacatcacacagctagtgagtagccaagcagatgagcctcctaactcccctttctttcttgcatgccacactaatcagagatgcaaaggtacttgtcttaaaaagcaagagagggacaagcaaaaggaaaagtaggaataagtgaacttccttctttgtccctgatttctataattttctttccactatctccctgcagccccccgatccttgccatgaactcaacactttgcagcaagcccactcgtatccccagcagaaatttcagagggtctctctctttctaatgttcctgtgttatgtaacagagctgaactggcaccccagctgatccctcctacctaattacatcatttaccttcagaccttgacatctggctgtcttctcagctctggaaacttgtcagaatccaatatctcaaagagtgggtctgaagctggacagcagggaacaccccattctcctgcccccagctctcctatggaatcctaattcaaggcagggtcgggtgtgaagggcagctcaggggaagaatatccgatcgtggctaatacccacctcctctaagaagcttatcagggcattgtacaagttctgggtcccggtacacctgaccaagcctgagagagtgggccttccaccagggacacagaggggctcactgtgggcccacaaagtcaatggaggaactggggagatttctcaaacttgtttctaagctatgagaatgagaggtggtctagggtttccatgcttagatggtggaaagttttgaaaagattcagaaggcgctctgagaaaacgaagggaaagtgactggggcttaagagatcagaagacctcagttagcattaggctcgacttgctactgtgtgattctaatgtaatctaaaagtaaatgtggggataataatacctgtccttcctatttgtaaggtgaatgtgagaatcaaaataaaaaacaaagattatagagaaaacaccaagcaaacttcaaagcaattcatacctgaaatctattttattaggcctaaaggaaatccttggtgtagagggcactaatggatctccccagagcaggctgggacatcccaagatacctgaggagttggtgccctgagccccccgcgcctccagcccatgacttggagctgatcaaagtgggagtagggtaaggtagtggggatcttgtgatcctaaccattgatctggaagccctttcaatcattcagctaactcggcctgacatttactgactgcccctttctccctttcctgtttcctccagagtacctgggtgcatgatgctttgggttactttcatctgaaatagcagttaatcctcacagcctcacctctaccctgcttcaccttgagtggcctggaacagtaagaaggtcacgagctccctctgctgaagcccacagaagggcccacccactgtggaagagctggcttcatctctgagtatgctggggtcactctggatgttggaagcctgggatcaggacctgaggtctgctagttacatgtccttgcctttatgctgctgtgggcagaacaaaatctagttctttcccttttcatgccactatgtaacacagtctcaatctggcccagaaagatgaaaaaaggaatataattcacaaagtaaaatgagtgatcttttttctgaaataactcctctatttttacaatgttgtttattcaatataaaaaattcaggggagaaggaaatcctcagaaaagtgattcctttctctcatatgttcataaatgttgccaaggagttcttcctggtgtctaacctaaatcctacccgctgggggtaaacccagtttcttctgtcttattatcatgggattctggcacattttgaaattcagcaggaaatttggctgctcaaccaagaatggaagcatcctctgtactagccatgtgagtttggacaagttatttaacttctcagtggttataaacctctcatcctgtaaaatgaggatgataatgacattacctgtttgatagggttgttgtggggattaattaatttgtaaaacatattaatagtgccgggtactattgttgtttttctgcttttaggtatcacaatcagattgtgttagaggggtcagcaggtttccatgcatttcattgttacaacactctaccgtgtatttatttgtgcaatcacctgattaatgtgtgcaactcttactagcgggtgaactccaagaagacagggaacttgcctgtcttattcaccactgaatccccagagcccagaacagtgcttggcaagcaatgaatgtatttaataaataaatgagtttatttatttattaatattataaataaagttatttattaaatacattttatatatattaaatataaaaagcataacccagtgaggaagatgctcagagatgggggccctgagctacacatggatggagaggagaatgcccactcaaaaagctcatgatcttttgagagcaaatggatggagaatggc

SEQ ID NO: 1242402 - DNA, 4001 bp, Homo sapiens
atggcagcaatgtgtgtgtgtcgggggcggtgggtggaggttgaggacgctgctgttactgtgcagtcttgtgaatatgcaataggaaacccaatccttaattttgacattgctttttgctgtaatgtgggcatgctcagccaaataaataaccaaacatgagaccaagtctagaaacacacttttgctcatatggcacagaacataactgctatcctggtgtttagggaccagtgcaccagtgaaggtctatgctcagaattctgggcaacatatactgctgaaggaacagagctcagaggcttggaccggctgatcttattttcagaaaccaataaatggagctcttaatttttaataactgattttacagtcatctgatgtctaaggtcacttaggatacaggacttattcatctatctgtttattggttcttaaatatcaattaatttccttaatggtaggatgctgggaaaggaagatggggagggtggtccttaattgcatttgtttatcactttttataatcaaagttatagcgagcttagagtaaaaataaaaaaaagttttttgaagcataaaatggcaaatattaggagtttcattgtattaggagcgcacacaaagtacatacaagtgaaatcttggaacagttcttataacaaacatccaggcagtagacaaactagagatttctggaaataggcagaaaaataataactgccgggttctaacttgaagaaactctgattcacattaactaccaagagaaaccacactcgaccagttccttaagacacgggaccccacaacaagaagctggtgctctgcaaccagttgagaagtacaggacagctgctgagctatttcaaagacagtcatatctgtgtggcacactctcccagaaggttacagggcaactttccagccacttacattcactgatgatttccagggagggtaggaagtattcatcacagacaatagatatggccatgaacatgtaaacgataattaggaaatagattatgatgcctccatctctgcgctcctgtctcgtgaaaaacccttcgggaaactccgatgatggagaaataacacattgggtgctatttcctgttaaggaaaaggaggtgaaagtttgaagagtttggagtcacacattccaagcccacagagagcttccttaagaaatctgtaagtgtggggtaaccgggtggaattttaaggacccactgaaaatgtataaagcgcttctgaatataacacagttgtagagttttcaaaaaatttttttgggggactgaaaagagatatcttaatgaaatatgttgatgatggtgaagaattaaaaagaggaaatcatgaaatcactcctccttgtttttatttctgaatctctcttccccaagtagaaactgtatctctgatacatgaagatttctattgtttatacaatttcgttttctcattgcagagcctaaattgttcacaggcctgcaaagaatccatccactgttgcagagagaatttctaagatgaaagattttttgttttcaccaaaaagtctccaagaacaaaaactggagacttggcctactatgatctctgtgaattactttggagtatatttaagaacttatttgaaggatcaaaagtgtttgatatctttttaaatgctaaaattcagaagcgtaagtaaaagtgagcccattgagaattttcctctttttgtcccttcatctgtatgtggtagcagcagcagcagctgctgctgcagagctaactgaccccaatgtccacctacctgtggcccttgggagacgttggggcagggaggtccctgagagaggcagatgtgcagtggcccacaggatgccgagcaacagagcccttctcgcccatgtttggcccccttttgtctgcatttctgctgtgctcttactgcagcgtgcagcttcaggaagggagaagaggaggattaaactggatcatgtgaggagtctccttcctgcccaataccctgcccagggcacatctcagcaaggccagcacaggagaaagggcgagtgtagccagtcaagcttctctgatcaggagacccaatctccagggaggccggaggagacggaggagagctgacaaccattgtctatagctatttccatggcctacagtctctaagggcagattaaggcagcttgtactttatgaaaatgtgtggttttatttaatgtcttcatactggctctgcttttgactttctctagatttgtaaaaagttgggtttgcaactgcttcccatctctctccagccctttcccctagaagttgtttgggttgatattaatatatgtacatgctttggctagctcggcatcctttcatatttctgttttagcctctcatcttcatcttcagttagggccaaagggagaaaggccagttagggcatcattgcaatcgtctagctgagaaatgatagtggcttgaaccaaggctgtggcaacggggatggagagtagctgacagtttcaagaattattgagatggagtggatgctatttgatcattgataggctgtgctttctgccagagggagctatctaaaatgcaaatttgacgtacaaggtagtgtttaaatatagactactatcttccctatgctaacatttatgaggcttgccaagatatttagaacttttggcagtgtagtaacctatagctaatagcacaggctatggaaccagaccacatgatttgagccctagcactgctacttactagttatgtgacttttggcatgttatttaacctttctgctacacagttctgctatctgtaaaacagggatcacctgtatttgggttgtggtaagaattacaaaaatgaacgcaaataatttgctcagaacgacctctggctgacgtcttcattccttcctttctttttctttgttttgtttgttttccttccttcctcccttccttccttccttccttccttcctttcttctcctcctcctctttctctccttccttccttccctccttccttcctttccttcgttccttctttctttcttcctttcttttcttttctttttctttctttctttctttctttctttctttctttctttctttttctttctctttctttctttcaattgaaatagaagcgtttttgttcataaaaatttttgtagttttgcaactttcatggttcctttgctttgcagaaaaaacacaaaaattgatatgcctagtaagttttctatttagaaactagctttatctgatggaacggagtaagttgcttcctgatgtttgtgatcttgggtcggaagaaagtctcaaaaactacttttttttgtgggaattggtatccattataaacctctccaaaactgtcatttctaggaactagatattcagatgtatggtgtgattgtgaggctgtgatgatgagtcaccaaagcatagcccagtatagagcagattctcaacaagcagagttccagctgtctacactcgcaggaagcagcaccctgatcactggggagtggcctacatgccagctagctaagactaagggaagaggtcgtttagttttatgctgagtggaagtgtcttgcgagcctctcctcttcaacacacagtacttcaatcaattcataaaacatcataaacaaataaaataccaataatataaaaagctcaaacccaaagtgaaagcttccaatgcacattgtcagctaattcaagagagagagcaagtgtctgaaggtacgagccaattgctatggaacagcagaagtgccttgcacatagttagtactccatcaacatttgcagatcgattactttgcaatgaatggtcttgaaaacacattgccagaacatgcatatgcttggtctaaacaaattaccatctaaatatggatttaccacgaaaagagattttaggagatgaattagatttgcttcacacacattctt

SEQ ID NO: 1242403 - DNA, 4001 bp, Homo sapiens
acatggtgaaaccctgtttctaccaaaaataacaaaaaattagctgggcatggtggtgcatgcctgtggtcccagctacttgagaggctgagctgggaggatcgcttgagcctgggaggcagaggttacagtgaactgaaatagcgccactgcactccagcctgggcaacagaacgagactgtcaaaaaaaaaaaaaaaaaagatgtaggaaagagcatggcttcgaagttggatagagctaggttggaattttaagcctcagttttctcaactgtataatggtggtggtggtggtggggatagtgatatgttatctcccggggtaataaaagcatctactatagggcttagcacagaaatgcattctagaaagctgaggctcctcggctccctcgacccctaccctgtcacccaggtctttcagcccactcctgtgtaggcctcttcttactgactgagagaaggaacccttggtccttattcaagtgcagagacaagctctctgggaggggaaagccatcagccctgtgagtaacaggttctctgtcacttcctgaccttgtcatcacttaagttactgtttcaagtctggctgaaatgtggcaggagctaaccacagaactgaaagggtcactattgtgatagatgcagtgggggctcacaacggtcctgtagcagatccccagtatcttctccctggggatcaggtggggtcacctttgttctgcagggaggggacaggatgctaacagcagttgagagctggaagcaacattgaagcctgcctcattagagaggagcaaaccaagggacagagaggagaagtgactttcccatgatcacacagccagtcaagcagcagaggtgagaagagcccctctggatccactagagttcgcactcaagatcctctgcattttaatgcagatgttataagtattgattaagagcttggaatttggagatagatggctgggcatgaggcttcacctctcaggacctcagtggtctcatctataaaagtcctataacaaagcctacccattgtgaggattaaaaaccacactgcctgtagagtgcttaacacagaacctagcacattatcagcttccacaacaggtggtcctaaaagatcattatttgcgattcaaggaaacactgccaacctttttctatacctacagttccgatctgaacctccctctgcgaaccccttatgccacgctgtggctcgtcagtcaaggcgccgagaagccctggtgccagggcagggcgatcctcggggctcacctggcgacaccagcagcaccttcgccccgcagcactggaagcagtgcagcagggacttcgcgcggatgttgtaattgaggcacgccatggcacagcccagcttcaccagccccagccacagccacacgtaggccggctcgttacccataaggagcgccacgcagtctccctggcgcaggccgaggtggtcgtgcagcgcccgggccacttgattgctgcgccggtccacctgcgcgtaggtgagagtctcgtcgcggaagagcagaaaaggcttgtgtggcgtctggcgcgctttctccaggaacgcccgcaggatggtgcgcgccggccgccgcttcccgtagctgcgcaccctccggcccacggcggccaccttcaagaagtagcctatgtcctggaagaagtatgggcagcagaggttcaccaggagcggcaggaacagcagtcccgccaggactgtgtagatggcggaaagcatgacggctgcggggccctctgtcccagcgagggcagagggttcaccccgggcgtgcagcgcggcgactgggcgggctccgggcggactggcgggctgcgccggggcgcacgcggcgggacgccgggctcgcgtgagatgaaggggaagacagagctcctccgctgcaggtaccgccgcgggctccggagcaggtgtagtcgtatgcgcgttgccgggggttccgggcaggactggccggctgagcccgcccccttgtggggggcagccacctgctctcccggccctcccacgcggtcctcccggggctgggcaggctgccctgcggctcaccaggagcctcggccacttcccagctcgagtctggaggtctggggtcaagtctggacctcctcgcgttgtgaccgaagtactttacctctaggagccacggtttctttaaatggtgatgagacgcgcttagcggacgttgggaatattaaaggagatattgcaggcgtggggctattatttgttaccactaatagaatggcttatggagatgacactgttattaccgataaagtgccttataaatgtcagacagtcctattatttattaatagcgggtaccaggtgccactgccaaaccagaatctcatctctccttcctggtcccaagggctttccgcctggtctctctttgtttctcagatttgcttcccagcccgactgccaggcggtctcctgtagcgaaggcttcaaggttgaacagaaatgcctgtggcagtcacgtccagctcatcccaagccctgccaggtgagtgagggcaggacactctaacctagtcggccctgcctggtcgggggagtcctgatttcgtgaagagcagtgctacaccgcaccacctgaaatcaagctttgacattattttacgattttgttctgttaagtgatcctgctgttccctcatgttgaaagttgtcaagtgttgtcagcacagttcacacatttaataagtggctctgtcagagaatagtatagtacagaggacattgagtaagtggtattggcatgactcaaaaaccatttcttttagaggaaatgtgaacctttcttttaatttgccttagtgctacttctgtacgaagtgaatgctcactacttgccactgaggagggtcaggatctaagtagtgttttattttcatcctctactgtcctcctgtgttcctctatcttaatttgatacgataaatacagataatgcttattcctcccagacacgctgctaggagcttccctatgttacattttgggagcctgagttattttatacaggtggcactttcatgctcatttacagacaagaaagggaagcttaggtgaattgagacagccggtaagtaattcgtgggttttggaaatggtatctgtttggtcccggggaaccaactcttagcttattcttagtaactatactatgctgtcctcctattctctaggtttctgtccatgtcctctttttttttcggtgtgtgtaaaacacacaaaaatgtttcacattccctccaggccaccccctgccgttttttagcctccttttcgtatccctagtaactgcgcaagcaacctttcccttttcctgactttttcatttctgatccagctacctggttgcatcatttccctggggatgagctgggggccttcatcatccctgaggagaaagcagtagaattaaccaaagtgagggcccgacagaaaccattctcatgtgcacttctttcatggtgaagctcagagccagcccttcctttttcatcccaatgccaccctcgtcccttgatggctaatcgcttctgtgtagccacctgcacccctcttctcttttccttgaacagctactgtctacccagagtgctagattaccacaagggtccactttttcccctcttattctgaggatcactttaacctcagttacaagtaaaagaaaacaagacccaagctagctgaagcagaaacaggaatttaagtagtaactggagagtccggggctaagacatcaaggattttaaatgctgacacctggatctagttttgctttcactatttctcctctgcacctcctctgttctcattcaggctctctggtttttgtccaaagatggctgccaacagcccttaggggtacatgctttctggctcaacttcagagagaagtacaggaatctttttcttaggagttctcat

SEQ ID NO: 1242404 - DNA, 4001 bp, Homo sapiens
tccagggtcggagtaggttgggcctgccacccagttctgcccagcgcctccccagaggccagggccacagccagggtggggaccccaacacggtctcagggatacaggaagcaggcccacttgcaacctggctccctgcagctcctgcccactggctgctgcttctccatcagagatgccctcctctgccctctccccagttcccaaactgacctcttccaggcctattagggccgcttcttccaggaagccacctatgtgattatttccctccccctccttccttcccatggcctcctttccccagccaggctgttagctttttgcattttatctttcattttgcatctttctctatctccctttctcactagatggggatttattataacagcaaccaattttcctgtgctggaaaatgaggaaagcagtgtagctgtgagaaatagtaaaagtgtttcaggtctgtcaagaaaacaaaaccaaatcacaccatttccccttcatttcatctttgttaaatgaatacctaagccaacggtgtgcaaagcgaagggctgaatgctttagttttccagtcctcacactaaacattaaactcatctgacgggattcacaacatctctttaataattaatggtacgcgctcaggacaaaatcctctatgatgcataaatacttgctagtaccggcacctcctggttgttttggaagtttggagaggatggtggatggacaccccctctttttgaaaacattttttcttcatctgtcatttgaattaccaaagcattacaagtgtatcattaaacatttaaacattagagaaatatacagaatgagggaagttaaagtccccggaatctgagccctcagggatgaccactattgagtttgtgtggcattttcctcctttttttttttttttttgagacggagtttcactcttgttgcccaggctggagtacagtggtgcgagctcggttcactgcaacctccgcctcccaagttcaagcgattctcctgcctcagcctcccaagtagctgtgattacaggcatgcgccaccacacctggctaattttgtatttttagtagagatggggtttctccatgttggtcaggctggtctcgaacttccaacctcaggtggtccacccaccttggcctcccaaagtgctgggattacaggcatgagccaccgcgcctggccttttctccactttttttttcctaaatgtatgttattttatgttattcattttccaataggggatcacacagtaacagtgttctcataatttgatttttctagcagagttccgcacactgttgagagcccatgtgttaccttgattgaaaactagccacagagcaagactctacctttaaaaaaaaaaaagagggggggcacggtggctcatgcctgcactcccagcactttgggaggccaaggtgggcagatcacttgaagccaggagttcgagaccagcctggccaacatggtgaaaccccgtctctactaaaaatacaaaaattagccaggcatggtggcaggtgcctgtagtcccagctactcgggaggctgaggcaggagaattgcttgaacccgagaggtggaggctgcagtgagcagagatcacaccactgcactccagcctcggcaacagagcgagactctacctcaaaaacagaaaagaaacaaaaactaaatgcctctgagcagcactactgtctccatgggtggccaccacagggatgggcctggagctgtcctcgaaggggtcttcgccaagccctagtgaagaaaaaaaggacgctacctgcttttccactttgccctgtgctacccccttcccctcctttcttcagtcccgccttccctcctctcctactgtccttttctctcacccttgtttctgtcagcatccagagggaagccaggaacacaacacatccagcagcaaccatgcagtgcagcttataaccttcacatcgttgtgggccctaatctctacaacaaggatttaatgggctgtgtgtcttggggtggaccttgagcttggagcccaaaggtctccactcctgactgccaaagttaacttgctgcctcatctggtggtgggtaatagagcacatgaggagtcagcgtgctcctgcttaggaagtacctggcagggagtcaagcggcatcaggctggcaggtgtcattgctgtcacaggtcccatccggggtgtcctgacacactgctcccctcctccaggccaggagactccgggcttctcccctgctcctcctctcaaggaggcatggccagcagggatcccagaccccagaagccaagcggtcttttcaggtggaatgtggcaaaaagccacaggctggggagttgggaggctggatagattggggtggagaccccagggaaagaccaacagctggaggacctcaggtgtcccggctgtgcccctccagctgtgggacctcagcatgtccttgggcttcttggtggcctgtttcctaaggagacagcctctgaggcccggcacacccgcagacgcccgctgagtgagacctagagctgagccaggccagggcagagtggggagaggaccacataaatatacatagataatttccctcaccatccagcagagctcagaagggttgacagtaaaggggctgctccacccctccaactctatcccattcctcagaggcaaccacctaacttttctggttttagttcttctgcaggccacctcctgttttagggaattattagtcaaagagttggagaggatcccttctcgccaggctctgacataataggttattttataagtagtgagtgaaacattcaaaaagcacaagaactgtcagaagagttgctcagcaatctctttattttcttctcatgattctgcccacactcatttcttagctcttcacaggcgaggtctctttcattgcatcgattcgtgtatccaagcactggacaaataaagaggcttatcactcgtcaagttccatgaacatgacctcatcattcttctctcctaaacctgggatgattggcagaaagggcatccatacaactttttcttctgcatttggcattgaaaaatggacttcccgtagtctgtagtagaaatattggaaagtagcaataatcctagcactttgggaggccaaggcaggtagatcgcttgagcccaggacttcaagaccagcctgggcaacacagggagaccctgtctctacaaaaaatagaaaaaattagacaggtgtggtggcgtgcacctgtaatcccagctactcaggaggctgaggtgggaggatcatttaagcctgggaagtcaaggctgcagtgaaccataatcacaccactgcactccagcctgggcgacaggagtgagaccctgtaaaaaaaaaaattgatgacatagagctaaatacaaagactaaagaaatatcttgggcttttatactctttgcttgtgactcttctagttttcctgtgggaacggactagcccaagtgttagagcacactgctctcccggcaactacagagctagttcagctggtcccaggggaagaaagcattccagtaccccaaaggctggaagcccccagcctgcttggcatgattatccaacggtttccgatatagtttactccttgacccactctactcactgagaacatctgggcacatgtggtcatcatccaatacaaaatggaaggccgagtctggggctcatctacggcagcaacaagaggcctggtagaattaggatgccgggtcccacctgcaggagtgcttaaggccaccaggcagggcgaattttacccaagcagttcagagctcactgttcccaaatatttaatatttaattgattgtacttaaaaagtgtatttcccttgttgttctttttaccttctattcctcttgcctctccagctcatattagcattttatttattcatttattttt

SEQ ID NO: 1242405 - DNA, 4001 bp, Homo sapiens
ttttagtgtatgacttctgcactcttttataaatacccactgttttccagaccatggaacattgcttctttccatatgatctattttactcaaacaattttctttgacattacttctgggaccagatccacaaacaaattcaaagatttttctcactcctccttcctagacccctgttcacatagcactgtggactgtaccttcttcattcttgagactcttctcttttgacttctaagatcttttttactgtctttattatccttataataagtccttctgtgttttctccccaggtttcccttcctctccaccattcccaaatctgagtattccagaagagctactgtttttttaatgatatggtaaattaatttctaaagggattaaaatgaatacctacctgttgtaatgaaaataaatgtataacataaagcaatctgcaaaatagtaagtatacactcaaaatctgttagccattattaccattgttattatttttattttcagtccaaccaacactgatactgctgaactcctttttttttatggagtttatggcacatgtttaagttaattaattatgtaagatacatatatatatgtacacatggtaaggtggagcggttgtgataataccacaagctgcctgaaggggcagcccaccctagatcctttcctaactgaacaagattccaaaacaccagtacctctggtaagtggaagggcccagtccatcccccaggctgtgtccttgtgcgtcagtcctcttgcttccctcaggctctacttctttttcctacaagcacagagagcattgggatcagtcatggagccctgccagggatgatggggattgagagcagccaaataccctacaggagcccatgcagcagcccacagctctgcagagagaaactaaactggtgattaccatgagctccagccccgggttcactgtgccagtctccactgtggacagagcaatggactgtcttccacttgctttctccatctcctgttctcctcaactgaaaaacaaattcagggccaagcctgaaagattggtcattctgttctgtggggatggggagaatttttaggaccagttacccatggaaaacgcaaaactaaaagtctttgaaggcttagttgatttctttaagaactgagaattgagaagattggatgtgtaatttttatataataaataatgaaaaataaaatcctatttcctcttgtgaatagctaaagaagaggcagtaagataggagaagagaaatgaaaggcagtggaattgaaatgaatcagtgggccgcccagggccccaggatctgggctataaaggttcctacttggaccctcaaagaaagagtcacagggtaactactccttttagccccagggaggccccactgagcttgctgagtaagaaggaaacagggaggaaggcagttgggaagacccggaccctaaagtattgctgaacagataacaatttacaggccttcaaattcctgactataatgtagcataagaattggttttttatgccccagagagaactcatcagtgaaattaacaaaacttacatttaaaataattagtatgaatgttaatgatcccaagtaaagtttttaaacaaaataagcaaacatttgggcctcagaataagcaaatttaatacatggacattcacaattagaatataagttcattctgagatatttatttactttgcagaaaattcccttccccatggaattgcttttgaaaatgtgatctcttcaagcatttgaagtataatttcattaaacacacataaccaacttatattgtgtaaattagggccttcctgactaggcacaaaactacctgcatttagtttaaatatgatctctttaaaaatttgtaaattaggcacctgccctcccccaaacacctttacttaccccagcttgtggaattgattccctctggctcctcagtgaaggactgaaagaaaagctcagctgcgagggaggaggggcagcttgggtggggcatgggggctttcctgccattggttagttttatgtcttgggccctccttcgctgagcctgccctcaatgtagaggaggactgcacctctcaagttaaatattatatgtttttaagactgttttgcaggcctaagacttatgcagaggtggcgcccgcccgtaatcccagcacttcgggaggccgagacgggcggatcgcttgagaccagccaggataacatggcgaaaccacatctctacaacaaatacaaaaattagctgggcgcggtggcacacgactgtggttccagttactcggcaggcggaggtggaaggatcccttgagcctctggaggtggaggttgcagtgagctgtgattgcgccactgcactccagcctgggcgacagagtgagaccctgtcagaaaacaaaacaaaacaaaagaattctgtaagaacttctaacaggtacattcctgtaagcattacccaccactggactaggcactgggtagcctgtaaaatacagtaagagccgtctctgcacccagaaaatttaccatcattttgtgctggaaagacatgccctagaaaacaataaacagcacgactgtacatgattccatgccaaatgactgctaggaattattttattaatccattcaacaaatacttattgagtaaccactattagccagccaccgttttccgtgtgaggacataaaaatgagtgagacaaggtctctgccatcaaaaaacgaacagatcagtgaggaaagacggatgtgtcaagaaaggctttgcaggtcgagcgcggtgaatcacgcttgtaatcccagcacactgggaggcagaggcaggcggatcatttgaggtcaggcgctcgagaccaccctggccaacatggcgaaactccatctctactaaaaatacaaaaattatccgggcatggtggtgcaggcttgtaatctcagctactcaggaggctgaggcaggagaatcatttgaacccaggaggcagaggttgcagtgagccatgatcatgccactgcactccagcctgggtgagcgagactccatctcaaaaaaaaaaaaaaaaaaaaaaaagagggagagaaagactttacagagctggtaacacttatcctggcctggaaagaaagaaagaaagcttcctatgacgccctctggataaaacttaggacccctccctgcactctgattgcaccatgttgttgctgaaccctatagagcacataccatcgcctactagacagtgatctcctcaagcacaagctctctgtcttttttttttttttttccttagacaaggtcttgctctgtcacccagactagagtgcaatggcactatcatggctcattgcagcctctaacttctgggctcaggtgatcctcccatctcagcctctggagtagctgggaccacaggcgtgtaccaccacacctggctaagtctttttttaattttctgtggggataggggtctcaatatgttgcccagtctggtctcaaactcctgggctcaagccatcctcctgccttggcctctcaaagtactgggattatgggtgtgagccactgctcctggccaggttctctatcttgttcttcactgtatccctaggctcaaggcccaccacaatattattaggcaatcaataaatatttgtaaaatatgtgaaaacaacatcaccaccacagattctggcttagattatttggtatgtagatgcggattccaaacaccaaagtaaggacatatttctgtttccccagttctgcatgtgtatgtgcgcagacgtacacagaatccctcacagagtagatgtgtgttgtattctggatcgagagcaactcactttacctttctgggcctcttccatctttcccaccctgcctaatcctatctcataagattatcatgaaaattaagtaatttaatacagaagaaagaactt

SEQ ID NO: 1242406 - DNA, 4001 bp, Homo sapiens
tgtatattctcatacatatgtatgcatgcatgcctaaatgagtcacaatgtgaagtgtatttcttactacagtgaggtcaaaaaatgtttgaaagccactgagatagaaggaccagccactttgaacgccttagaggcaaaaagagctttgtgagttgtaagaggaaaaagaagaccagcatggctgaagcgagccctggggaggagtgttatgaaagaaggtaggaaatgtatataatttttcccacatagaaccctccagtcaaacatcttaaatctggactgccacctgtttttgtcatggttcatcatttaagagatgacatgtaagaatcatctccctgcttttatgtcactttgtaaactgtcactgagaagttagtagttatactgacgtgattgaaaataacctctaaactaagaatgtatcttatattgagaacggattgttcgtataattaaaaaatgaacaagaaaaccaggctcatagaactttggcggagtcctctggttcatttcaggcccttcttacgaggcaaaaatttcatgttagttggtaattaattttgcaaatctcttggctataaatacaaaaggaaatcgtataaaagaaaccacttaggtcaaatgtagaggaaaaaaatgctgggactgtagatgtggctcttccattaactccctaagtggccctcacgacttattccactggtttgtgccctggaaatccttacatgtaaaaaaaaaaaggaggtggagcaggtgttcagtaaggtcccttcatactgtaaaattctatgatcttaagttatttacgatcatttactattttaaacgttgcgaaaattaacctggtattttaccagacctttgtaaaaagaggaagttacatgacatacaatgaagataacgtccttaactttacggtagatgacagtggttgaacaactagaagagaaagtcaaagttatctcggggagtttatattgtacttagattgagctgcactttggaaccgtgtggccttttcacatgagatcagtgtcttgataaatacaaacttcctgaaaagatgggttaaacctcaaagcctgtgtaactacagcttgacaaagactctcgaggaaaggtaaacggaaagtgagttggcaacacaactcacctacaagttctccaatcatgaaaagcaagtacagaacggcagcaatggtcaacctggctttcacctttctctgcttcagtatctctctctgtttgctgcagttgtcacaggagtccaccttcaaactcagctgactgttggtcaaaggtaagtcttggtccagtaaggaatcatcgtcggcctggagggtcgggtgcgccccgttaacaggcctttccggggcttcggaaccgtcatcggccaccacaactcgaagtttgttgaaccgagaaagcccctcgtcccccgcctcatccgagaagtcaaaggcgctggtgtcatttaaaaacagcggcgcatcatccttccttagcatagatttgaggcgcttccacgcgccagagccggccatggcagaggctgagcggccgcggtgcggaacggcttgggggaggcggacggccggcggcgcctacttcaccggagcgccagttctcgagggcagtgccgcgcgtccctccccatcctgtggaaaacgaaacacgttataaattaaaggcgcccaaccctgtcctcaagttccgaagccgctggcggcgggtcgcagggccgaccccgacgctccgccggggctccgcgagggggcggcacatctatttaatacctggggcgctgccgcggggccgcaactcatctccccgcccccggccggctcagcgaggcgggctcgcgctgctccacccgcggccgcaggagagtggggtcgtgctcgcgcccgccgcgcccgctgctggaggccggctccccaggtctgacaggttcggggccggacgcccacagccaccgcctctccccgccctgcgcgaggccacgcgcgtgcgccgggcgaggcgcgcgagggaggggtcggcgcgaggacacgcaggcctggcgcgcagggctggggcgcccgcgatgggcgggggcgcgcggcgcgccccgcctctcgccccgaggctggattgggggccactgcgccgcctccgcccaggggtcactcactggccaactgaggggactttgggcggcctcttccaccttcccaggctgggaggcaagtgcggtcggagggtcacgccgggggctgggcgttgctgctaggagttccctccaccgaaagtgtgtctcaggaatctcgggtcgggatctgggttgcgggtgctcggcagaagacaaacccagcacttttcttgctaactgaaaaggcaagcagcttttctctcctcgaattgcttgtctctggcaaattggcaacatttgctgcagtcaactggagagggcaaggctgtcgtcgtcagcagttctgtgtcctactgtttttcagcaaatatgtattgtcctctttgtgctctctgccgtgttccttttgcctccaaggtatttacgatatggactaaactcaagcatagaaaatctagtacaggcataccttggagatactgcgaatttggttccagaccaccgcaatatgacaaagtgaggtctcacaaatgtttcatgtcccagtgcaaatacaatcatgtttataatgtagtctattaagcgtgtaatagcgttatgtctaaaacaatgtgcataccttaatttaaaatattgggagagaggaaggaaaaagtatatatacatttgttaattgctctgaggaaggagggtcgcatgagcccagaggttcgagattacagtgagctatgattgtgcctccgcacccctgcctggcgacagagtgagaccttgtctctaaaaataaacaagtaaataaaatacatgactgctaaaaaaatgctatcagctgggcgtggtggctcacgcctgtaataccggccctttgggaagccgaggcgggcggatcacctgagatggggagttcaagaccagcctgaccaaaatggagaaaccctgtctctactaaaaatacaaaattagctgggcatggtggcgcatgcctgtaatcccagctactagggaggctgaggcaggagaatcgcttgaacccgggtggcgaaggttgtggtgagccgagatcacgccattacactccagcctgggcaagaagagcaaaactcggtctcaaaaaaaaaaaaagctatcaatcatctaggcctttagcaagtcatattctttgctagttggagggtctttgctccttgttaatggctgctgactgatctggatggtggctgctgaaggttggggtggctgtggcaattccttaaaataagacaacaatgacatttgctatattgattgacttgttttcatgaaagagttcttgatggcgtgtgatgctggttgataatattttacccacagtggacctttcaaaattggagtcaatccagttttctcaaaccctgcctctgctttatcaactaagtttatggaatattcaaatcctttgttgccatttcaacagtgttcacagcatcttcacaaggagtagattctatctcaagaaaccactctctctgcttatctataagaagcaactcctcatctgttcaaattttatgagattgcagcaattcagtcacatcttcaggttccacttctagttctcttgctatttccaccacatctacagttacttcctccattgaagtcttgaatccctcaaaatcatccattagggttagaatccacttcttccaaaatcctgttaatattgatattttgacctcccatgaatcacgaatgttcttaatggcatctggaatgctgaatcctctccagaagtttttcaatttactttacctaggtccatcagaggaatcaatggcagctatagccttatgaaaggtatttcttcttttttattcatttattt

SEQ ID NO: 1242407 - DNA, 4001 bp, Homo sapiens
ttttgtctatttgtatgtatgtttttttttttttgagatggagttttgtttttgctgcccaggctggagtgcaatggtgtgatctcggctcactgcaaccaccgcctcccaggttcaagaaattctcttgcctcagcctcctgagtagctgggactacaggcatgtgccaccacacctggctaatttttgtatttttagtagagatgggatttcaccatgtttgccaggttggtgatccgcctacctcagcctcccaaagtgctgggattacaggtgtgagccactgcacccagcctttgtatgcatttttaaatgtaggtattattgtacttataccttttgagacaacaattccaatttttgatatttaattaatggaactaatcagatcagtgtacaaagacgcaggtaagctattgtccacagtggagtggtgtttttttgttttttgttttttgagacagagtctggctctgtcacccaggctggagtgcaatggcaccatcttggctcactgcaacctccatctcccgggcacaggcgatcctctcacctcagcctcctgagcagctggtacaacaggcatgtgccaccacgcccggctaatttttgtattttttgtagcgatggggtttcatcatcttgcccaggccagccttgaacttctgagttcaagcgacctgcccaccttgtcctcccaaaatgctgggattacaggcatgagccaccgcgcctggccaaaatatgtttaaaatatgtttaatattgttacagtaaacacataccaaccaacaaaaaaccaaaatgacaaattggatacaaatccagaaccgagagtcagccctcctcagctatgttagatgccacagaaacaagcgacatatttctttcttttttttgagacagagtttcactctttttgcccaggctggagtgcaatggcatgatctcagctcactgcaacctccacctcccaggttcaagtgattctcctgcctcagcctcccaagtagctgtgattataggcatccaccaccatgcccagctaattttgtatttatttatttagagacagagtttcactcttgttgcccaggctggagtgtagtggcaccatctcagctcactgcaacctccgcctcccgagttcaagtgatcctcctgcctcagcttcctgagtagctgggattataggtgcccgccaccacatccagctaatttttgtattattagtagagacagcatttcaccacattggccaggctggtctcggaactcctgacctgaggtgatccatctgcctcggcctcccaaagtgctgggattacaggcatgagccaccgcacccggccaattttgtatttttagtagagatggggtttcaccacgttagccggggtggtctcgaactcctgacctcaggtgatcggcctgcctcggcctccaaaagtgctggaattacaggcgtgagccactgcgcccggccaaagacatatttctatcaaagcacgtatccagtttgcttctaaagtgagcatcatattgtcatttgcatgattaaattaaactttatgccttatttgcattttgttagttttgcctttaatgttcttttcttgttccaggatcccatttaggatgtcatactgcatttagttgtcttgtctccttaagcccctctgggagatctctgcattttaaacagggcttaaccatcgtgccattggactgtgacttctgccaaagacctgggccacccatccccaaggcaagatgaggacactcaccccggatcctgagttcctgacgactgccttgatctgctgttgggagcagcaccgatttctgtatcttccttttcctcctctttatgggagaacaggatagtctttgcacttgagctctcccaggcagtaacagctgtcacttaggggacagtgcctggagagcctgcggcagctggacccatctggtagctctggccttagcacacgcccaggcctggagccttctgtatcactccagggtgactgacctcttgaatgagtgcactcagagtgcaaacaggctccacctgactttcacaatccgaaagcaccagtagcccagtgctttcattgttatgtgttggcctcaagtaaagagaaaacatccggatcctctggacaggcaggagaatggactgcagaggacctgcggtctgtgggttccatcactgcagggggatatgtagtgtgcccactccaggtctctattgcccaatatcatcaatatttaaccacggagcagggagccaggctggccttttacagcctgtgctttctcatagtgaaggtcatggcatgatgtgaattcctcacaaggagctgtaaaatatgacctttggaggtgggggttgggaaaggctgtgtgagcaccagtgacccagagagtaggaagcaggccaaggcaagtaacttgatggggaagcaggaatgaggtgctcctcccacctgaccagcaccattcaactctgatagtctatggacttttccaccaactggctccgtgcatcttaggcaatcattgttggtttagcaaggagtgggcttatgtgaaataagcccactccttttttttttttttttttttttttgagatggagtctcgctgtgtcacccaggctggagagcagtggcacaatcttggctcactgcaacctccacctccccggttcaagcaattctcctgcctcagcctcctgagtagctgggactacaagtatgtgccatcatgcccggctaattttttctatttttagtagagatggtgtttcaccgtgttagccaggatagtcttgatctcctgacctcgtgatctgcccacctcagactcccaaagtgctgggattacaggcatgagccaccacgcccagccgcccactcttatttcttacttcacaaatgaaacagaggctgagtgaggtcacatgtcaagcccaaactcctctatgagttaaacattagtcaacagtgtgtactgtgtgtgcatggggcagaggaaagaagacccaacagggaatctaggggctgcctggaactccagctcctcctcattttgtaatgcattcatttattcattgaataaatgttacttgagcatctactgtgtagatacatggtaaataagacaggtgagggccctgctccattggagctcaaactccaggggagatagccaacaaaaaagtaagcaaaagcataattaaaagataattatagcagtgatcatttctgtgaatatcttaaacaacataataagatagaaagggatgaggtgggggagacatgattactatattactacactaaaaactgaatgatgaggggttaaccatgcaaagacctgaaaaagcaggtacaaaggccaggcgtggtggctcatgcctgtaatcccagcactttgggaggccaaggcaggtgtatcacctgaggtcaggagttcgagaccagcctgaccaacaaggtgaaactccgtctctactaaaaataaaaaaattagccaggtgtggtggcaggcgcctgtagtcccagctactcaggaggctgagacaggagaactgcttgaacccgggaggcggaggttgcagtgagctgagatcgcaccactgcactccagcctgggcaacagagcaagacttcatctcagaaaaaaaaagaaaagaaaagaaagcaagcaggtacaaagacactgaagaaataatgagcttaatgtgtctggaacaaaaaggtggccaatatagctgaatcatagtgatgagggggaagtggcatggaataaagtcagaggacagacaggagtatccactcctcatggtgggccttgtaaaacagggtaaggagtttgtattttaccctaaaagtgatgagaagccactggagggtttaggcaggaaagtgacataatctaattgacatttgtctaagatcacttggcctgctgggtggaaaatggattgtag

SEQ ID NO: 1242408 - DNA, 4001 bp, Homo sapiens
tatttaaatattttaacagttaaatttcccctaaggaagtgccgataaactgactcccaaaacacaattatcccctatccctcaaattccaagggctaataggtactgtctgcaactgcatattataactatagacacaataagtgtattttatagaacagaaaacaaggtatgcttttgactacagggttcacttgcagtctacaagttacgaatgcacaagacagagaccgggatgtaaacgcttttcgtctcagaatgagcaacagaaatgtatttgattttcaaaagccctgaaattctgtcaccccaggaacagagctgagtttgaagaccccctctctcacaaccacctaacttcctcaacaccggagaccaagcactgcttgtatttccctttaacagtgagccctgagccttaagagatagtttatgaatggtatacagcccccagcgtctggccctcatgaactttaccccaaggccaggaatgagggattaatcatagcatcaggatacgcgtggttctatctctggatgtggttattcaatggccaaaatcttgtccaattctatctccatcaaacttgctcaggaatactcaaagtctatgacatttgattccagttgcgggtcaatagccaagtaatgatttaacactataaactctcaaaaaaaatttcccgtttagacaggactgtacttaggtgtggaagcacgctctctggaactcaagttgcgaccacctgagcagaggaggcgaaagcgacaaagtaggtacctgacagtgctgagtcattacaagctgtttcctctgaaatgttacgcacccatgggccctctgagcattaacatcccctttctggaggcaaataaaatacatattcattgtggaaaatggtgcaaccttctgtaggcgacagaccacgatggggaatttagcactaagagtggatagcaggaactacacaaactcgcagctgctctctaggtaccgtaactttatcccagacgctcaaagagggctatagggataccgggtggcaatattccccctgcagccccggctcaggccagggccacactagggcgcatttcactctaagctgttatatccccctgtaattggcggatgtagaaagcgcccggagaaaatgatgcataatagatttgttctcgaggaggatgcaatggagagtagaggacgcaggatgctaactggtttttcttcccatgtgcaggtcacctgaaaaccccgacgctttttcgttcctctccaaggagaaccctgaactcaccgtctcgctccgctcttatggggggagaggaatagtttcacgcccacctgcccgccgcctctcctcccccggcaccccctgccccagccggacgcgcgcgagctgctaccggcatcaacggtcccgcccgctacccgctcgctggcagccccggccggcagctcccccggcggccgcctctgcaccactcgccaacctccacgccgggccgaggtcatgcccgcctgcccccagcgccgggcggccccctcgtcgggccaggcggccgctcgagagccgggctggggaaggggcccgcggcggagttggctcggggactcaccaggtaggcgcccaccgtgccctgcgccagcatcagggcgcactcggacaccaggaagatcttgatgttggaaaagcaggacaccttctttttctttttcttgttcctctgcgcctcgtccccctgcagctcgccgctccggccgccgcccgacgaaccgcccggcttcttcccctgcatccttcccccgccgccgccgccgccgccgccgctgccgctttcccgctcgccccgggtgtcggggccgctgccgggcgggggtgcgcgcctcgaggctgcgtgctgtccccgccccgggttcgcggcggccgcccccgtcctgccggggctggagaggtggaaggcacagctcctcgccgccgccgccgccgccgcgatcgccccttcctcctcctcctcccccgcctccgccctcccctggcctcctcctccggctccggctgtgccaatcacaggggctcgtcgcgccgcccgccgccgccgctgcctcgcctcccgcggccgcccgccgctgccatcgcccggttccccttgcccgccggccgcgcctgctctcaccccctcagccccagccccaaggcctgggcctgggccgccgctgcgcgccctcgccgagccgctcctcgctgccggtgcgcccccggggaggcacgggaggcgggcttgggatgcggagggcggcccggcggccgaggctgggagggtccggctgccgggagaactggggagacccggagtccttgcggagtaaggggggtgcccctgagggcgggaggcggcgcccggcccctaggtggcgctgcggggcacggggccccgcggcggagactggcggctctgcgccgggcgcggagatggggtgcggaggcgcccccgcggggctgggacccggcgctcgggaacccgggtgcccaggcctcagagggcaggctgttcccaggaagggagaatactgagtacccaggaagggcttggcgcgcgctcttctccgcccggggatttctggggacagatgttgtgctctgggtcttggggaggtgccagaggtcagagctgcttgaggcttctgccgcctgccggtttctgccccagctgtccccggccacagggggtgttgaaaaggccccagaccgaaaggacagaaaggggaagttagaggaatacgtcgggagccccacggaccgttagtgccccagcctcggtgtccaggcgctgcaagatcgccgcggccccagcagagggccttctccggcccttcatccgcccagggccccgctgctggagcgctcagcaagcggccagccgcaggcctgctgggtccccacccgtcccctggctctgtggccctggccaccatcctcggccttgacctgaatgcctggcccatggcagccgctcctaattactccccactctcaccgttaccaaggagtgtgggccacagggcactaccaataggatctgctagttctcaactgcagcgtttggaagctgagagaaaagctcagagggctggacaggtaccaggaaacagcaccttccacctgggccattgggggactcaaggaatcatttaaaacggtttccttaataattgtgtcaaagaaaatgacccactctcccaagcgcctgtgtccaaatgcaggctcaacttcaaaactgaatagcaatgaacccgaccatatttttcctttctcccgaagaacttgaatgagaatggagggtgtaatggtggggatgttgttttgccatggcatttaaatataaactgcttcatccttctgtggctccagacgtgatctcacccaggcttggtgtcgctttgagatgccctcaccttgtctaggccacctcctatctgaattggctccccccacacttgaagtctcttcccgtcttccccacttcctgaatcagtggtcacaccattcccggccagtcctataatgagaatccttactgcccccttctttcttccccacaccctcctatcactcggagccaacttctctgcaggatctttatgtccccctctttccctccccatcactttgcttcatgggctacctccccacttcctcctgagaagacccttgacaagctagctctgttccctgcctctgtgacggtaagctgcaaagctgagctgagacttgtctacgaatggtgaccccattgctaatgaaatgtgcggagtgctttatagtcttcaactcttatttacattctttgtaataacaagagctaatgtttactgtgtgcttattatggccagacaccattctcagtgcttcacccgcatttacaacgtaatcctcacagcaatcctctaaaccagatactattattagccttgttttacagatgagacaactgaggcc

SEQ ID NO: 1242409 - DNA, 4001 bp, Homo sapiens
aatacctaagttccattcatactgcaaaacgttcatttaaaaccacttttagctagtcactaaatcattatatcctagaaataaatatattttgctctagcttaaaagttaaaaataagaatctttaacatccctataatttaaaacttttttaagctaattaatcatggatttttccctctaccttgttagtatgattggtgaggtctttttgaatttcactaaaaattaggaggtataatggcataaatgcaaattaagttcaccaagtcaaacaaagtactaaacataaaggttatagaattttaatatactaaagaaaacagcaaggaggcaaggtaaaagatttggtaggaattccatcaaaactctgccaattgtggggcaaggtagacatgtgttaaactgtattttattcaggtcttcacactatgaagcatcattacacaacttgactttgtaattttttccggaagcaataaagaactgttctcactttctaatcagcttcagccgaatcttaagggctacaagtcacccaaagcctggcaacagtaacttttcttccttgacccaagaaggcagactgccagagggaaatagcaaagagtagcactatataaacagggcaagaggcacaagagcagaggcaagttatataaccaaaatatattttaaaacatgttcataactcgtaacaacctttgcctttagttggtttcttgtttggagtatcagttgaaacagttaattcaatattatctggatcgcctccttcctcttcaatagcctacattagaaagagaagttaatatgctacacaatctatctaaacttattttataaaaacgaaatgaaaaaaaatttagcaaacctcaagcctcaagacattagaattgccagtcatttcatcaaccgacttcaaaaatgagcaattaaactacacgaaagagtgagagaaactttcaggggaaaaaaatcattaggtatcaaaatcgcaaggagttttaaattctaccgtgtcaagataattaaatatcacatcatactggccaaaaatccaaatatgttctattgcagaaaagttgctagctactaaagtaaataactaaaaagagttttcctagtttctgtaatgcaaacttactgctcctctgctacaattccaacgctcactcaaaccagaaagctaatcaggaaagaaaaagtaattattgcgctgatgcaaaaactaaaagcctagtggaaaacaaaaactctgtcacccacccatcaactcccactaccaattccccctcaagatggggaagaaacggttgggcacaattaaacggtaacttcgcagaagtcaccaaagtaaccattccctctgaggccaagaaatgcacacgctcaccatggctaaaggctggggagccagcgcctcccaggtctccgcgatcgcccttgggaggccgcgccggccggccgcaaccctcgcagcctggcggggacgtcccggggaggcggaggcacgctgggctgcggtggccggtccctcgcaggcccggcccggcccggggcgcggggcgggggcaccgcggaagggtccccgtcctccacgctcgcgggagccgcccctggcctccctaccatgccgttccgcaggtcccagcggctgcgggcagccggaggctgcggcggaagcggggcgccgaggcgcggcctaagttccccttcccggtcctttccggtcctcgccgggcctcacctgcttgagtcgggagatgagcacggtcttgactccggtgatgtctaagttccgccgcttcagctcggacttcagatcgatgacccgcagatcggtgatctttttaccttccgcctgacccgaggcggccgaggctgccaccgcaccggtagcggcagccatcttagaagagcagcgcgctgccgaggcagcgagtgggctgcagggcggcggcagcagcgccaacttccacccaggcctcggcggccgccggcgccgcgcagcgctgcgcacaatgagccgctggcccctcccccggtccgccaccctagcgcaacctgcagcagcagccgccagcacccggatgacggccgcgcgtgcgcgttggcgcagggaccggcagcggcgcgctcggtcgagcgggccgcggccacttgggcggtgcgctcccttgtgtggactgggaggtcgggcacgtcctaccgcagcaacgtccgccgcgccgccgttctctcgtcgcttcgttagccattttcttgcaacgtcttgagtcttgagcaacaacgatgtgcgggcactgaatgacatagtgcgcgcgttactcaacacaaaccgagggggcgcgtgcgcgcgctgaacctctcaaggaaatactttatcagttctgctgaataatcgaaaaattgtcgccggtgtgcaccaacgaactaggttccccgagttccattcaaaagacctcaaagcagttctagggctgttagtccaaagaataggaagggctggcctttgacacatggctcattggctgtctcaggagaaaacatcatcgccctgcccatggcagcttaggttattctagggctgcccttcctcacttgaaaaacaggaaaacttctttcttgttggcctcaggtttgctatcctccccggtagacctgatggctcaacacgaaattgttcaatgaaagagaaaactagcttataagtacttgttgccgttatcatatactgtgttcactattttgccccccaaaatttgggattccaagaacagtgagcatcttcttatggaggatcggcctgtacaagtgagtacctatttgtaattttaccttgtattattcattatcaaagtgcaagcattgataaaataaaacgattctataaattccataaggtgattatgatgcacaattaactatactgtatttcctggttttacaacttaaattcctgagatctgactcactttaggttactttttctgattggctcaaaaaaaaggaagactggacattataaaagaatacctgacattagggtagttctttacagtttataaggcactttgacgtacagtaacccccttaatccttcccaagtctgtcaagtaaatctccgtgaggcttagagagattaaatgacttgcccatgttcacacagctggtatgtggccgagctgtgctcaaatcccaggctcctgattccaaatccagctctgtctctgctacaacattggattcacaataatagaagtttagaatgcaagactccttagaaatcttctggcccatcacttgaggtcaggagttcaagaccaaactggccaagatacagggtttagtagaaaccccgtctctacaaaaaatacaaaaattagccgggtgtggtggtgagcacctgtaatccccgctactcgggagactgaggcaggagaatcacctgaacccggaaggcaggggttgcagtgagatccggccgctgcactccaccctgggcaacagagcaagatcctgtctcaaaaaaaaaaaaaaagtctgggtgctgtggctcatgcctgtaatccctgcactttgggaggctgaggtgggtggatcactagaggtcagaagttcaagaccagcctggccaacatggtgaatccccatctctactaaaaatacaaaaaattagccgggcatggtggtgcatacctgtaatcccagctacttgggaggctggggcagaagaatcgcttgaacccaggaggcggaggttgtagtgagctgagatcacgccattgcactccagcctgggcaacagagctagactccgtctcaaaaagaaaaaaagaaaaaaaaatcttctggcccagccctcaagattttaagagatttatctgggaacttacagttacactctctcttttttttgtttttgtttttatttttattcttttgacagggtctcactgtgtcacccagactggagtgcagtggcgtgatcatggctc

SEQ ID NO: 1242410 - DNA, 4001 bp, Homo sapiens
atgtacaaaccaaccaatcaatttcaaaaagtctgaaggtgcagcagacacagcccttcatcttcaggaactccagagacgggcacagaagacacggaacatgtaaggtcaatataagagttgcatatgactaattgccaggtgagtattaatatgcacaagggtgaaggagagaggatgagcaaacctcttcccctttgcctacatcctgtatggattcacaggtagagggccgtctgcagggtgcggctcagaggagggaaagggcaggatgggccagtcatctgggaatgcttcctggaggaggtgcctgaggaggaacaggactcagatgggactggaggacgttctgatggctagctgtgtcaagcctgtcacttaacctgtcagcctcttggtttccttttttacagggggaggcactgcagaaacagagggaggagacagaaaaacaaaacacctggtagacagttcacattcgacctcagacagggtaaatatttacttatccattcatgagcctggccctggggagcgacctcggcttgggccacctgggtttatgccggtgtctgggcttgatttgaggctcgaggtggccggtatttagcccacggcacagagtccagccctataccttgtctgtctgagagctaaatggatcccatttgatggcagtggaaaaactgaccaccacgatgaccctactgctcacgccaaaacataccaggcagtggccgtaagagctgccctctaatgagtgcccacctcgtcctggaatattcaagagtgtgcctgtgtgggtggtgactatcttctcctcaccaggaggtcgtagggagacacactgccccccactccacaattcagtgaggccccaccattcacaccatgttacaccaaagggatgcttgaaccagacctgccagactctactgtcggagctctcccagctaaccacagagctgaggaagagacatactcatccgacaaacatttaccaagggcctactgtgtgccaaccaccgtccagggccctggaacatggtgtggacaagacaggaaagggctctgtccttggggagctggcatttatggggtgaagatgggccttaaacgcagaatagaaaatcaaaaccatctcagtgggtggtacaggtttaatgtctgagggggaagttggagcagggtcagcccctgggccacctgaacatgaagatctgtaacaatcactgcaaagcatgtttaaaatacctatttccagactgtaccccaagagttccattagaaatctagggagaggccaagaaacagacagctgtggtaacgggctaggagactggcagcaggaggtcccggacccctggaagtctagagtctgggcacagtgccccagcatggccccaccactcaggaggcaattgtgagcaatcacaactcatgcctcaatctcctcatctgtaaacagagcatcctaacacctggcctgacacctcgcaagatggtgccaagacgcaaagaaggctatggaggtaaactgtaaagggctgaacgaaggtgagctgtgcacattctcaaacacgactgctggtaagatgaacccagaaaagaaaagaaaaaaactacgcaattccctaaggactcagggagtgtgtgtcgagcatacagtttctgcttctcagtgacaaataccccacacctaacccaccctgccaaataagataactcttactcaaacgtggttgctcaacacaggcccgagtgtgggtttccatgcagttgtcccatcctgtgggaatgtcgcatcctgtgggaacccagcgtgtggggttcctggtgaagcgagcggcggcaataaattaccccagtgccgcggctcttgcccacatgttgctcttatggtcagtgcgcttcagcccagcagtgacctaaccccagcaccagtgaactcagcagcaggctcctctgtcatcctcctccagcaagcacaagctcatatttcaggccgtttgctcccctgggcatgactcagaggagtcagttgtcttaaaaaaatgcttttcatatttcaaatcaaaaataaacaccacgcactctggatgcaagccatcacagatgtctctgttaagctattaaagtgaaaaggcccaataacgcctaaaaagtggttaactcctatcattctgttcccaccggcttcatccacccacggtgggctacaagagtggtcctgaggccaggtcacaggactgacatctggctcagccagtaacaatgaggacagaggtccatgcattcactgggactggagaaggtggaaagcaaatgtcctatggggtgatcccagagagaagatcgtggatctagccacagaaaggcaacagcgcttcaaagaggctctccgtacacacactggagccgctcttaatctctataaagaaagaagcgggtggatcagcaaccagagctgccaggccaggaggttcagcagcaaacccagtcagtgcccaagcaagaactgtccagaggggaaggtccggcccagcagtgggtgggcctggatggcatacggggatgcacccagccaccagggcctgtagccattcaacacaactgcttcccatgactccctccctccctttccccgacccacccagctctctgaccatttggctggtcgggtggggtgcccataagcagacagagcaccctggttataacctcacagtggttacgcttgtcaataaatatgcttgatgtatgctttagctttttgctaagagacaggagccctgactccaagactgatgaaatgaggtttctgaattgttcaggccaggctcagatgccaggtaaattcaccaagctcaggtccatcttctggccaccagcctctccccggctgccctgtgccacatcttctcttccaagccctctagatgcccctcattcaggcacagagcagagaggtttttcaagatgtttcaacatcacaggtagaggtgtacctttgaaagctaattaaaagcagaaacttcactgtcagccctgtttaatttctattcaaacacagtctcagatgaggccttggtcagctgtgtgacgtggtaatgaggcattctgctgatgaatattctcattcaccaaaggacaaccaaaatctttttctttttctaattccctttgaaaatatttccagaaagtatttgtctactcttcttcctcaacaagtccatcttctctaaagataatagatttttttttttctaaagactgacaatcctccagcctcttggacccaggttgtgaagttaattctcactgtggagatcaacaagctgtgtaaactgcagaggtggatggctggccgggtcatctagacacctcagggcaatcattagcaatgccttctttcaaaggaacaaaaaagctgggtgtggtggcatatgcctgtaatcttaccacttcaggaagctgaggcgggaggatcacttgaggccaggagttcaagaccagcctgcccatgatagcaagacctcttctcaacagaaaaatacaaaaattagccagacgtggtggcctgcttctgtagtcccagctaatcaggaggtcaaggctagaggatcatttgagcccaggagtttgaggctgcagtaagctatcattgcaccacggcactccagcctgggtgacagagggagactctgtctaaaaataagagacgaaaatccaaaggaacaaaagcttctaaataaaatcgacaacaacctattttccagtgatttgtttcagtctattctacagcatatccgaaagttggaaagcaggacacactattttccctttgtttccaggctttttggatactctgggatgttttattatagcttttcaggttagcagttgaacccactgctttaaatgtagaggtccttcacctaaaaagaaggcaaagggttgcagaaaaacattgagtatattctttggaaatgtcaaaaaaa

SEQ ID NO: 1242411 - DNA, 4001 bp, Homo sapiens
gcctcccaagtagctaggattacaggcatgtgccaccacacctggctaattctgtatttttttttagtagagacggggtttcgtcatgttggtcaggctggtcttgaactcctgacctcaagtaatccacccacctcggcctcccaaagtgctgggattacaggcatgaaccaccacacctggcctaaacacattcactttccaagcacagcttccacccatgcctgtgccatacctggtgacagcagatatgctaatctgactgaagttggtcagggtgaaataataattctacttacccagcatttttgatcagttaacatttcccagggccttttaacatagctggaatcgtacctggcttaggagggggagcttggggaaggcacaggcatgggaagaaaagcaggtgatgcaagctgctttccataccaaaccctagcacccagtcagcccaggacccaccagggctgctacagctttaagtacaccttaattccagccacagtcattaaggaagttttctatttaaccctaaaatcaaagtattcccttcccaaactttaaagggttaaaggctagggaagaaatgatttcattgagggaggaggggtagagaatgctcccctccccctaataaaaattctggcaagagcagacacagtggggaaaagcaagccaggaaacctaatattgccgtcttgacattttataggaaaacctgacgcaacgagatatcacggggcatctgaggtttattttttttcccctaatgtgagcaaagagaagaaatctggttcttaaaatcctcaagatccacgtaaacttaaatccctctagcccccttcttttccacagtgagcacagaacacaagaatcgctgccgccagaatctgtttttaagtttcctttggtagctgcctcagatatgcccaagcccattttatggggcaacggagagctaatataaggcacaatctgtgtctaaatgcatttccgacacttcagtctctcaaaggtaattttgcaaataggcacagtgaagggcttttgctttgaagtgggctgggaatcggctacagttccttaaacactgatcaaattccactaaaagagtaaagagaaagcacattcaaagaaattatatttcatatcttccctgatcaagtcaaccaactgctttggagggttaatgggatggtgttttcacatcttccagggaggggaggaggtgaggggtatttataaattctcagctggactttttggttaaagctgctcttattgatctagacaaacacaaattatgatgcctggcatggcttgtatatacaaatagccatgtgaaaacagtcacaggcctaattgaaggagacagcaagaaatcaaaggaagaaagaaagaaggaacaaatgcccagacccacagagcagcattccagctgcccagagaggctgagcaggggcttttcctttaaggggagatggatgtttacttacacagatgaattcagttcccctgggttcaactgtcccagggaaccgctcagtacagcgatgactggaaaggaacaaatagctcccctccccagcacgctctccccacactctggaaccctcttccgcaaatccactgcgatggcaagcaagctccatcctggggccgggggagggggggttcaggggaggggagcagggtcccagagcccagaaccaggcagagggccctgagcgacgcctctgcttcacccacacagggggtttcctacagttgcttcctgacatcctaagagtccacatccccacccagagaaagagaagcccggagaaactctgacagatctctggccagcaaccctgtggacgggtggggagacgagttcaagaaagagaaaagacatgtcccggcacggggctcctacctccccatccaccatgctttccggtgtaccagagctgcgcctttccacgtttgcctagggtgcaggcaagacatgtttgtgaagttgggaggtcacagggacgggagggagggattctgatgataaggacaatacagcccttcctagaagtccgaattctagtacctcctattttctctgtcgctaacagaagagccctggcaacacccagacagaagaaatccaaagggaggacagtactttgcaagcttgtttcaaactcttcaagaaagcaccaagacattttgacctgccattctgaccctatgggccttctggccagattaccagagaaaattcggcttgagagaaatgatgcaccccaaacaaagctggtgatcaacaaaggtaaaattacccaccaaaaacatttgttgaaaataataagcaaactgaaaaagcacactccttgctacatttaaaaactgaccctgaaaaaatcaaacctcatagaaaaaacttcaacacaaaataaaactgaaagcaactaaaactgcagaccatgaaagtcactaaccaaaaactgatgaaagaatccaacaactcagatatgcaaaattttacccaggacaatggtggaaagaatggcagaagctaacatgagtactaacagcaagcaagccaacagaatcagaaccaaattttgtggtaaaatgcacatgggaaggtagtgatcctaatgaaaataatttcagtttaaaaaagcgaaaaggaagaacttatgaaggaacagcttcatattggtacacagaaaatggctgtggtactaaatcaacttgcagtgctgatatcacctggttcaagtgtttatatctgtgaaccaaataggaacatctactgggaaaaaaaatgacaaaacaaaaaaacacccttgtcctttttcagaaaagtggtcaaaagtcaagccttggcaaaaaccacaaacgcagcctgctccgtcttacacttcccagcttccttgaaggaaccaggactcctctgttgagcacttgtcaccttgcctagatcagcaccagacaccagaaagaggtcagaccccagcctgatgaactggcatggtgggtagaccaccaggagatgcccagccctgcccattgagctgacctcaggcaggtgatggcctctaaccaccttggggacacatatcctatggtcaatggggcctgtctgctacgaaacctgaagagaccatggtaccactccccacctggagaagcccagggatctccatcctctgcccttggggggatggggagaaaatatctctatagggtggaggttggggtaatagggcagtcagcaatttcactctttacttctccatgtgttctaaattttccacaataattatatattacagttatgttaaagtggggagggaagcattaaagacaaaagccaaaacacctgctctaagaataactgactctgggccgggtgcagtggctcatgcctataatcccagtactttgggaggctgaggtgggcagatcacctgaggtcaggagttcgagaccagcctggccaacatggcgaaaccctgtctctactaaaaaatacaaaaattagccaggtgtggtggtgcacgcctgtaataccagctactcaggaggctgaagcagaattgcttgaatccggaaggcggaggttgcagtgagccgagattgcaccactgcactccagcctgggtgacagagcaagactccaactcgaaaagaaaaaaaaaaaaaaaagaatgactgactctgggatgtgtttcctcacatgaaaggttcagatgaccctgggagctcaagatggcacaatctttaatgtatctgcaattatgcagggttgaaagttccaagttttaagtcaaaggcaatgaatttataattttgagatttcaatttgagagcagttaggtttgttctgtgatcttgaatcactgatctggccttggatattcagccttcttttcccaaaaggtgatcatttgctttggtggttcaaacacattgcagtggggttatttggctttacaaataatacactacaaaat

SEQ ID NO: 1242412 - DNA, 4001 bp, Homo sapiens
tggcgaaaccctgtctctactaaaaatacacaaatgagccgggcgtggtgctgcattgcctgtaatcccagctacttgggaggctgaggcaggataatagcttgaacccaggaggcagaggttgcagtaagctgagatcgcgctactacacgccagcctgggcaacagagggagactctgtctgggaaaggtgggggaaggaattgcacaatctcttctgggctgtgtgcgagggcaggtggctctgctgtgtctagcggctctgtgtgtacgaggcatgcccaccaccatcggaatggaacatctgcgtggttccctctccccttctcctcctctcccaaccacacacaactcagtacacattctatgtggcagctggggttcaattcaagaagctgctggtctggagccaatttggtcctataacaaatgatatgggaaacatctggagatgtagcaggagagaaataagccctgcccctcacggcaggagcacacacatcacatgtggttgtcacacaaaaatactggcttcaggggtctccactggtcatcagaagaggcattagttccattcagcctctccttgcctcccatgtgactgcttgaggtgatcaaggccactctctaccctgctgctggtgacatctcactaaggcacaggccctgcttacagcctgcagcggttcccatcagccctgactaaatgccaagtggtctggctagcttgaaggtccaccacactgggacccctgtgtggcaggccctcccatcttctccccactggagagagtgtatcctccagccacgctgagctccctgggctagacactctctggactccagacacactgagctcttactgtccccagaatgcaccaggctgtcctgcccaacccccatgactctgcctggcacaccccttgcccactctaacagcttggctaacacttacacatcaccaagactcaacctggggaaaaacctggactgcaaggtgctgctcctccccagaccgggtgaagtggccctgctgtgtgcctggtgccatgcggcatcttccatcagggcatacacgagatggcccagtgactactgactgtcctgtcaatctcccccatcatctgtgagcagctcggaccctcttctatgccctgccccttgcacatcgcggttgctctacaaatactggagagagagatagaagggagggagggagagggcgaagaggaagggatggaagggatgaacccaccagctgctaatcagttaagaataagagcatgaccctgcatgactgacctgcgtccatgctgtggttcatctggtggtcactggtttctccatcttcactcaggtagccagggggtggggtctctgggaatcagaaggaaggtggtctgttaaaaggccttcacagcttggctctgagacaccttttgcaaagacatcacacatgcacaccatgatgctagcatccgtggctgtaggagctccaggtcttggagtagaggttccagctcttggttctgttgtcctcgcccctgtccacctctgactcccgcttggatcataactgcctttgctcacgcaggaccggatcaactcccaagtctgaaatgtgtactcctagagcctctgccaggctaacttatcctggtccttcaaggtgagggttaagccccaccccctccagggaggcgtccagacttgcctccgcctcacccctttctgtcctctgaagatctgcaggctcagacccaccctttggtccctactatcttcttctgtgcagaccaggtgttattatttgttgtctctaagggacgtgtcctcactcagcagttaggttgcaagttcaatgacggcaaagacagtgtgatctatttctctgaaacctcccccagaccctgactgaagccctccaagatttgctctttgaacagggagtagttgacttacccgcgggacgccagggctacccgcaaaggatctgagaaggttggacagtgggtctcctccttaacactctgacccaagcacacaggcctgtagccaatctcagcccagtaaactaacccaggatgaacgtcacgtccaaattagaatgctctaagaggaacgcagcaggattactgccccagcaagcaaaagtgactagcccaagtgctgccaagcacagctttcctggagtctgaaagtgctggtgattcacacgttatttgcatgtaaatgaggggcttctaaaaacatttgcagtctttgacggcaaagcccatttctccctgcagagtgaaaactcaaagtcacttcaattcccacccaggttggagcccctcaccgaggcctgatgcccaggcgaatttacagagccagctctccgcacttgctgcctggccctcagctcactccccgcctctgcagacccccagtctattgggactgaacaccagtccgggcctcaagggcggtgagagaaacagtgttgctatttccgcttccaaaataaatgactgcaccaaggccgggcggaagggtcacgctgctcctctatgccaagaaaagcatcactagtgaggggggagctgaggtcatgggtcctctcccaacagggatgcggttctgagtcaggggccctcaggccagagctgtgcgcaaagagggggtgagcgggggacggccagggggcagagattggggccacaggactgatgtcggggctgaccgctgcccctgcctcccaggccagcctgtgccgcccacgtgcctacctggaatattgctctggggctcgatgcctgcggggaagttagtgttttcggggatggaatggctgtagtcgtccagtggggggaactcggccgggatctctgtgtggcgtggcaccaacacaggaggtagaactgtccgggggagacagagcagaggtggctcagtgtcgatgccagaccagcaccaaagtccccgcacccccaagtgcaccgcagaccctcggggggatggggagccggggagaggtgatgacccctggcacctgctgtccccacaggcaggccaggcagcatacctggtgtctctactctctggtagtggtagggattcacgcagacctcgtccttcttcatattgaaggcgaactcacacagctccatggcccgtagctcgtggtggctgtgcaggtctggccatcgccacaggcggcagtagatgacatgagggagccccttccgatgggacacctgcaaccggccatccagggacctgccaggacggggaggggcagaaagagagggaaatgtggattgtgcttgctttctgcagagtccggcctcctactttcagacacttggaaagctctctctcccctcatttctcccagatccagaggtccaggagatcagagcactgctagctgagagtgctgggagggatctcaggagaagacaacaaaggccccgtgaggactcccagctggcagagcgggcctcacccaccagtccccggtgggttccccaactttgtactgctcttcagggagtggcattccatgggaagggcccgcacttcagtcacttcagttgtgcttggaaaaggtccaggagccactcatcggcttcctactcagcccagaggtgtggagaggggacagggctggggaagacaatgagagttctttaggcacagatatgaggactacagtgatccaaagaagagtgacaaagtacaaaggctgtctcccctcattcactcaggtcttcccttgcacattagaaagtcaggggaaaaaaagaaaacttgcctttcctcctctttttttttttttttttttttttttttttctgagacggagtctcgctctgttgcccaggctggagtgtagtggcgccatctcggctcactgcaagctctgcctcccgggttcatgccattctcccgcctcagcctcctgagtagctgggaccacaggcacccgccactacgcccagctaattttgtttttg

SEQ ID NO: 1242413 - DNA, 4001 bp, Homo sapiens
tggaaccaaatcccaggtctctctgaccatcacatcacaccacctcctctgaagtcaattctggctcccgatcacacgcccagagacttccccagacagcacaccgccttccctccccctttattgactggatccacccagttaaaaaaaatttaagtccgcactcccaccatatgtggcatttatttccaggggaggcctgccctcggttcccgtggacagatgttgctttgtgcctgcctgactcgcctggcagcccctgtacaactgccccaagcaggtggccaaggatggagtccaccctggcccaggagcagggatgacaatccctttgcggctgacagtccctggtgctttctactcattcctcggcagcctgggacccccaaaagagccagcccccaacacacacgctctctcccttggttcagcatcaaaggaggctgagaggtagagacaggaagccaaggtacccgcacccccagttcccagccaggcacatctaagctaaggaaggccctgggggagtgaagtcactgaccccttctatcagccatctgtgggctcccgcccgacctagctagcgcgcaacgggaaggataaaggagatccagacagatggcagcgcgctttgggaaggaaggctctacaggaatgcgagggccgatgcgaggcccactttggggtgtgttttgttatctgcccggctgcagcctgcccctctccctcgttctgcacggtttcaaaatctcttggaccaaaagaagggcaaaagagtcgggatgggggggtgggaggtgggagaagaccctattttccgccacttgtctctcccatttggaagtcagagcattgcactgcaaccaaagtgcgtgcatgctcagggggcgggagactggcacaaccgagtctaaaaatactcgataaaaatgctaatcccgaaggcaaagaaagaacgaagaaggaatctgtcaatcactaggctcccgctcctcacccacagccccagctgtacggaccgcattcctgtagaggaaagtggggagacccgactgaagaaaagaaacgcaaagacaccaccacctccacgagcgcgggccgcgggggcgggaggcggcggcggaggaggggctccggcccgcggagccgaacaaagcgggcctcaacttccagccccagctccccggagtgggggcggccgagtcccgcagcaacccgctctcccctcccggaggtggaaagggaatgtgaggtgtggaagccagagtgccgcgtggaagcctcgggctctgatctttgcaaatcagagatggttttgtttggggtccccccacccccttcctgcccgcgctctcccactctcacacacacgcacccacacagtctcactccctccctctctctccctcttcccatctccagccccactgggtcggccccgcagtgccagggggctgggccggcgtgaccccgggtcccccccgggcgggcccccacctggggatggtgatgcacttggtgttgacgttctgcgtggtgatggccttctccagctcgtccagctgccccgtcttcttgagtttcttgaccaggctcttgaccgccttctcgcaccatttctcctcctgcccgttctgctcgcccttcttccagcccagcaggcgcttcacgatcgggggagtgaaaggcaggatggacgacatggctggggagggcgcgcgggcggcgaggagcgcccccggcggggctgggctcgacgggacgccgggggcgcagaggggagctcggccggggcctgccgcggtcgcccaaacttcgcctcaactctcggcgaagttgccggggcgccgggccgggccgcggcgctgcagcctgcggggctcggcgcgcggccctgcgcccggagcggctcccacggcgaagagaagagcggccgggcgggcggacggcagcagtgcagggtcgggaaggccccgaacgcggggcggaggcggcggccgcgagactccaagtggcagcagaagtttgggtttccgcacggggtagctgtttgggtgccgcctccgggaaggaaagtccaacccccggccaaacttcgctcgcctcgctagctttgatgcgcagatccctccgcctctgcggcctcaccgccccgccaccctcctcctcccggctcgccgctcgctcgctcgctggctgggccggcccggggcgtgcgccgcgctcccgctcccgcccgctcccagtctgtgtttcatgcaaatccgcgtgcagcctcctttccaagtgctgtcaccgccccctcgccgccggggctccccgcctcctcccccgcgccccgccacctcctcccgcgggcgccctgcccgccccctgctccggggagggcgcccggccggccaccaccccgcgcccagcacgcccacgtgggcgacccgggcggcggcagtcctggctggagcgcgcgggaccctgcgcggccccgacctgaagtcgggcgggcgcggggaggaagtcctgggaaacacggcgagaggggcctcgggcgggagggctgagcgcggcccgtggcgtccgctctcggagtccacactcgggcggctcggttggagttgcgggccggagagggttggactcgcagcaagtaagcgtcgtccggacgcgagtgcaccctggagaggacccgagcccgagagggggcgcgcggaaggcccgggcccaggaagttggggcccgcacttggcctcgcgcttgctgatccccgtcaaggcccttggccggcgccggcgcccctgggctgtttttattctctagtcggtgagatcacaccggccgagagcctcgggaacgtgtgcggaggaggagggggtgagaagtgggtcctcagaagtggagagctggggacaccagtgacaacctggacaatggctggagccaggggtctcttgagccttgtgaaccgagtgcccggcagaaaatgagcctcaaggacatctgttgagttcttgaaggaatgaatggaggggctttcgaatttatctttgaaagaaatttacataacagggtgtttgttgctggatctcctgatagagaaggatcggaaatttgataattgccaataaatggaagagagttttgtttccaaagcaatgaactcacaaaaaagtggggcaagacaggagttttcggagagtttgtgtattcaaaaaaagcaaaacaacaacaaaccaattggcacattggggagctccgcggcttttctccccaccaaaagaattcaggggcgtctgcccgcagggccctcggcggttttcaggagctactccaggcccctcggcctttctcttgctgcctcccgcagccgactagccggtgtctaagccctttgtttgtttttaacagcaggaatctcccacccccacccctgctttgttaaaaaaaaaaagttatctggaaccctcaagtgggtggggagttacaaagccctgtgaggtgtggcggaatccacagtcagcccagaagcggcaggggcccttgccttgctccggagaaccgcctcccacaagccaatccgcagctgctgctgcagaagtgcgctgtgctcctcaccctcctctcttcctaaatacccgcctgaaaaggagaatacgtgaaagccaactgaggcttgacaacctggcttccgttccttgctggtcctcctgttaacgcgctgccgctgtggtcttaggtttcactctcctcttcccgtccgtcaagagagacaaggatgacacaatccacatttattgattgctttcttcattccgggtagtccgcctgctgccctttgattcagtcttaacagtggttggtgaggtagatgttcctgtgcctcacgtttacggaggcacagagagattacattacttactcagggttccaagtggcagagctggaatttgaacccaatactttgttgaagcctcagtctccgatcttgagactgcacccagctgcct

SEQ ID NO: 1242414 - DNA, 4001 bp, Homo sapiens
ctgaaactgcacagagaaaactacgacatgtacccttttaagtttaccggagccttgagataaagttgccacttgatgtgtgtgctgggacacccactcccctcggccggtctgaggcgcctcccctggtggctcccacgctccaagggcacccgggggagcacccgcagctgcgccgacccgcagtgtcacagagagaagggcacggaaggggatggggacggggacccggggcccccccggccggcgcagcgcgctcaccgggcccgcagagccggctgaagtggtaggggttgcagcacacggtagggccgtcggcggcggcggcgaagctgtggcagccgcacaggggcttcagctccacggcgtgctgcaggtcgggccagcgaaagaggcggccgagcagcagctgcggcggcgcgggctggccgcccaggcggaggtcggcgcgcggcaccagcacgcagccgcccggcacgccgccgcgggactccaccgcctccagcagcgtgtccagcgagcgctccttgagccgcttcagcagcgagtacgtgacggttttgagttcctgctccagcagcagcagccgcgagcgcgcttcgcgactccgcccgccgcccgccggctccagggccgccccggccagggggtcgctggcgtcccggggcgcgccggcggcgtcccgctccgaaaagagacagcaggtcaccgtctcgcagtcactctcgggcagccagcccgggcctcccggctccgccacgtccagcagggagctcccagcgccggcccctggctccgacatgggcctcggggggccccctgcgcgccggcgcctccccgcgccctgggcgcctcgctgtcccactgcgtcccggggccgccgcggggctaccgggcggacttcggagcggccgcagcctccgccctctcttgcccgcggggccggctcagctcggctgcccaagctcccatcctcgtcgccgccaccgccgccgccgctgccgccttcctcccggtcggggaccacacgacttcgccaaagtcgccgcaccagccccgagcgtttggacctgaacatacgatatcctttggcgccaggggtgggggggaggcggtctccggttaccgggggtccgttccctcagcgaggcgccggctgcgcgggtcgcagccccacatgaagctccgccgcggagcgccgtgcagaccgcgcacagcctgtcgtcgaaggggcgccgcagggcgacaacatgagggagctcgccgaggcgggacggccgggaacacgcgcacgccgagccgcagtccgcgcgcggccagcggctacatggaccacagcggcggggctgctcaacaactccagcccccgcgctttaggggggctgcaggcggcgcgccgccagaaagaccccacatgggccggcgagccttcaaaagttgtgcggctggtccatgagcacaaagcgctcgcgcgaacccctaaatgtgtctggaaagccctgcctttaccttgccttttttttaaaccaaagcgcttaactacatgggcttttcccgcaggatccgaaaggcaggcttgttgatacccccagctcccttcttactccctgcaaaaagaaaaaaaaaaggaaagaaagaaaaggaaatcccaaacaaaacctaaatccctggatttgcatgcacgaaaggccaacgccgtctcaggtcccaggcgctagatgcacttggagcgagtttctcctggacgcgggtgtcaacacatgagtggaagctgtaaaaatcccaaagagctgctgggaatccttaattaaaaatgcagtccaccgatgcagaggtcgcagcccgccccacgctgccctcggacgcttcgtgcgccgaggctgccgaggtcgccccccctcccccctccacaaaagtgcctcccggtggccccggggtcccagcgaggtctggcgaggcagcgcccggcggctctttctctcggctcagctccctcgatcgctcccccgctcggctctctctctcttttttgttctcctcaaacgcacactgagggcccccggaggagcgccgcggagtcattggctgcctcccatcatatgccagtctagacactttggcggctccgcggcgctgattgttgcgcaaacaaggtttcaagtttcttaactcttaaaggagaacacgtcccattgcagggccggaggctccaaggggccggctcccggggcgggccgagctcgggcccccgccccacaccaccccggcacccccgcccagggcctgacagcgcccgcggcccgctttctgcctcgcgttgcgcccagagcacggatgcgagcgagcacacacgcgcgcgcggacacacacacacacacacacagggttacacgagccacgagcaggcgcgcaaggctcggcggacccactgagactcggacgcaaacggggcgctttgcctctccctggcttgtgcacaaacttacaaacacactttgcactttaaagttgttccaaacccccatcctagggtaggctaataaaaatgggtgtgcatgtgtgccttccagggttgagcctctgaggagcagggggcggcggatatgttggggtagcggatcttccgtgactgcactaggggctctacgctccttgcacaaagtcgggggtcgctctgccgggccaaacagggagctcaggacgctttgcgtacggtggctccaggctcgcccggagtggggagatggagagggtggggtagaggcggggagtgtctactcgctggctcctctcggtcgccacggccctcccttggagcgaggcgggccgccggccggccgggccccctccaggccgggtgcttcctctcccttctcaagtttactctccgcacctcggagagggctgtaggtgagggatcacgctttccctagagaggtttccacgcgaaaatgggggtgggttgggggcgggatcgggggcgcggcggcagcagcctgacgcccggcgcgggaagggttaaggccgctcctgcccctggagccggcgcggcggggtacctcctcgggcgcgctcgctagtccgagggtggcaaaagttcaagcttgtaaagtcgggattggtcccgcgcggaggggaaaaaaggcctgggcccccctccccccccgggcgcggcgccgattggccaggcagaggggccggccccgccctctccccccgcgcgcggcggccccacccccggcgcggcgccccgcccctttccgggcaggagcctggccccgcgctgaatgaaagaaattccgctactctcattggcccggggctgggcgccattcccccgcggtgaccgcggggcgccggcgggcgggtctccctggagagtgaccacgcgtggagctagcctggggagtgcgcggcggtgcgaacccccggccgtgcccagagtctgtgtgcgctgggggaagggtggcatttgcaaggaggattcagaaccctttgctgagctttacctggaaccaggtactgttcgcgctgcgctctctgagagtggccgttgctccccgaaagaaagatcggactgagacacttcctcacacccatcccctactactttggccaaattaaagtagcggtcctagcctcagtttcttgtttgaaaccgcggatgaggatgcttgcccttcgtgcttcacagaaccacgaaggtccctggagatagtgcacgttaaatgcacaaatcgcaagcgaacagcaggatgaattttcacacgtgaacaaacacacatgatgtcaccagcacccaaaaagcaacctgacctgcaccccagaagcctgtcttgtggcccctttcagtcacttttcgcccatggggaaattaatacatcttaaaatacaaacagaaactcagtgtattttcttttatccccgtgtatgctctttgtggattatctttgactgtgtattacaataataatagttcgtgcgtattgagtcgttactat

SEQ ID NO: 1242415 - DNA, 4001 bp, Homo sapiens
accctgggaggcggaggtcgcagtgagccaagatcgcgccactgcactccagcctgagcgacagagcaagaccccatctcaaaaaaaaaaaaaaaaaaaaaattagccaggtttggtggcacacatttgtagtctcagctactcaggagtgtgagggaggagaatcgcttgaagtgttggaggttgtagtaagccaagatcgcgccactgcactccagcctgggtgacagagtgtgagactccatctcaaaaaaaaaaaaaaagaaagaaagaaagaaaggggccaggggcagaatgatacagtttggctattcataatctcatctcgaatctggtgagaggtgattggattatgggggtggtttcccccatgctgttctcatgatactggttttataaggggctttttccccttcactgtctctctcctgccatcctgtgaagaaggtgcttggcttctcctttgctttccaccatgattataagtttcctgaggcctccccagccatgcagaactgagagtcaattaaacttccttcctttataaattacccagtctcgagtatttcttttgctttttgtttttttttgagttggagcctgactctgtctcccaggctgaagctcagtggcacgatctcggttcactgcaacctctgtttcccaggttcaagtgattctcctgcctcagcctccggagtagctgggattacaagcatataccaccacgcctggctaatttttgtatttttagtagagatgggatttcatcatgttggccaggctggtctcgaactcctgatctcatatgatcctctctcctcgacctcccaaagtgctgggattacaggcgttagccaccaagcccggccttgggtacttctttatagcagtgtgagaacgcactaatacagaccccattccaggagatgacaaatagcaaaaggcaaaatgatactcccttcttgacttttttttcctctcccacttttatgtctttacgtttcctcctaccatcaactgcctttcctaacattgtggtgactgattaaagaagaaaaaaaggacgagatgaaactacactttacagtactttttccccccaccactccaatcccgaattgtgaaattcattcttttcctgatcctctaatttgtgcagtaatgccgcgaggtaaggctgaacctttctagagagcaagggctatccaataccaggaacctcagagtccttcctcaagccattatctcagagctatctgatcactgtggtcaccatacaggcagtctattaatgtcaactacagcaacacagtaagggtgaggggcggaaagtgatctctgtttaatttcgaggaagggtccagagaattaccatccagctacccttcctccactggtccctcgatgttctcccggcacctcccgtcctctctccgggcccatctgccgagtaagggccagagagccccctcctccgcttaagcccgaccccaccaacttttcaaccaatacgatacactctttcttctcaggacatagtctcagacttcatcccggccagctccctccgtcccactcctggagactcaccaagcgggcgaggccactcctctccggcggcaactcggacaccccaacaccggacctggcgctgcaccctagtcgcgcctgcgcgcgccgagcccgcgcgcctgctcacttcccgttcgccgcggacacagacacacccctgcagctggagccaatcacggtgctgggggtttaaatgtccctgccacgcagacggagagtctgggaattcactagttaaccggatagatttcagtcctgcccgaagctgggaggtgttcatgcaataaacatttactgagggcaaaccgtatgccaggcactgtgctggatgaacgctgaagaaaagaaagcgaatacagtgctttccctgctcttcatcgcctttcaatatgtctagactaagatatagatatgtaaacaaattatagtggatagaatacagtgcatagcacatagaaaatttgaggcgcctttggctgataatgaacaaagcgttttattcttaggggtgtctggaagggttcccggaggaagtgacttgagtcatgaaggataagtaggagttcccccggaaatccggcagagaaagagctagagttttccaggctctggggaacagcttatgtcgagaacagcataacgccttctggaaatttctagtagttcatccttgttagaggcttagtgctaatcgtacatccccgagtgtagaggaaagaaagctttagaaggccaacaatcgctagatcttggaaggccttggaattttagaccactttgtactaggggcactgaaagctattgaagagttttaagcagatggaggattattgtaaactatttgctgcaggaacccctccatgcacctctaagaataaaataaactgctggaaatcaagaaaagaaagtgcttcaccaggcacagtggctcacgcctgtaatcaatcccagcactttgggaggctgaagcgggcagatcacgaggtcaggagttccagaccagcctggccaacatagagaaaccccatctctactaaaaatacaaaaaattagccgggcatggtggcaggcgcctgtaatcccagctagtcgggaggctgaggcaggagaatcgcttgaacctgggaggcggaggttgcagtgggccaagatcatgccattgcactccaggctgggcaacgagagtgaaattccgtcccccctacaaaaaaaaaaaaaaaagaaagaaaaaatagctgggtgtggtggcgggtgtctgtaatcccagctacattactatcataatgtctatcactggcgacagtgccagactccatctcaaaaaaaaaaaaaaaaagtgcttcaaggagtaagtagtctattcctaagggatcaaggaagatgaagcctgagaaatgttttttttaatttcataacacagaggtcactgattatctcagtgaaagctgtttgttggaatgctggggttgaaaaaaacaacttagtagtttggaggtgggggagatgtagagatggggacaagttgtagaatgcttttggaaagtttggccttgacagggaggaaggagggagaatgatgaaggatcaagattttttgtttttgtttttttgatttttgttagaattaagacaggagaaacttgagcatggtagggaagattcaactgagaaaaaaatggttgaataaaggaagagaagggatagtcagtaggcaaagatcttgaaagggtaagaatagaggcagtttagaggcagttcgaaacactggtaagaataatggttttggaagagggcagggagggagaaagagagagagaggagatatttccccaattatgagaggaagtatgtttctgtatgtttagtaacaggaagttaaagttctcatttgctgacttgttttctctgtgaagttgaagatggggtcatcttctgatagaaaaggaggtggtattgggagtttaaaggaaagctgagaagatttggaatattgtagaaagtaatacaacaagttgacagaagaatgttgtaggactggtaagcaatattgagggcctttttaatatgggcaaaaatgaactcaccattttctgccctcctgtgtaaatttctcaagcagcagtcacttgttgagggcagaggtggagaaaatgtatggttgagttcattagttcatttagggttgtgatggtcattgatataattccgtggttctcaaccagggacgattttgtcctccgggggatatttggcaatgtctggagatgctttattgtgatgacagggaaacgggggtgggtactactagcatcgtgtccaacagtgctgctaaacatacatacacacacacgcacacacatatatgtatatatatatagagagagagagagagagagagaaggtcttgctctgttgctcaggctgga

SEQ ID NO: 1242416 - DNA, 4001 bp, Homo sapiens
gaggtgtttgctgaagcataaggaaatctgggctttggaggtggtcatcaatacactcattaagtacttgtaagggtaccgtggcaatatagaaacacaaataagtggagggcattatgacttccctaaggaggccgggcgcggtggctcacgcctgtaatcccagcactttgggaggctgaggcgggcggatcatgaggtcaggagatcgagaacatcctggctaacactgtgaaaccccgtctctactaaaagtataacttccctaaggaaaaatgcttatgattttgatatgtcacaggtgtacaatacttttccttttacaaagggctttggtaatcctcacctcatatggacttaaagtttctgaaaaagggccgagcccagtggctcacgcctgtaatcccagcacttagggaggaagaggcaggtggatcacctgaggtcaggagttcgagaacaccttggccaacatggtgaaaccccgtctctactaaatacaaaaaattagcccggcgtggtggcacatgcctgtaatcccagctacttgggaggctgagacaggagaatcccttgaacccgggaggcggaggttgcagtgagccaagattgcgccaccgcactctaggctgagcaacaagagcgaaactctgtctcaaaaaaaagattctgaaaagaatgctgagcagggattagcataataacctccctgggacttttttttttttttttaaggcagggtctccccatatagttgcatgctggagtgcagtggcacaatctgggctctctacagctttgaccacctggactttggccatcctcccacctcagtttcccaagtagctggactacaggcacgcaccaccacgctcagctaattttaatttttttttgtaaggccggccgcagtggctcacgcctgtaatctcagcactttggaaggccgaggcgggctgatcgcttgagctcaggagttcgaaaccagcctgggcaacatggtgaaaccccgtctctactaaaaatacaaaaattagccgggcgtggtggtgcacacctgtaatcccagctacttgggaaggtgaagcacgagaatcgcttgaacccagaaggcggaggttgcagtgagccgagatcatgtcactgcactccagcctgggcgatacagtgaggccctgtctcaattttttgtagagacgaggtctcactatattgcccgggctgaggggctgcattaagcacaggtttgggaagtggcccacgtgggcctaaatcccgactcctcctcaaggccatggcgtcagtaacaagagccaccggaagctccagacgttaggacaagtctcttctcccagggcctcagtttcttccttggtagcatgggaggatctaggagttccttctggcttggcaaaactagagcatttcaagcgccaaaacaaactagaaaacagcagctcaggaggaaggggtcggtggccagaggggtctaggcgagccttcgggagggagcacttcctcagcgtgctgtctgagggcgatgaacatttacaggaagcagcaggtaggactgcacttgccaaacacagatccctgagcctcaccctagacttgcgaggtcacgattctgaaagatagggcctaagaagcgcacagcaaactccccaggtgattcagatacctgtttgtttgtaaacctctaaattggcgccaccacagctagtgagtagcggagaactggccgcagcaggtggtcaccacagaggcccaggttggggggaaatggtcgctcgggaggaatggaggaggggcaggagagggccgcggggtcaccttgaggcggttcagctggtcgtgcagggctgccttcaaccgcagcagcgtctcctcctccttgcgcagttcctgaagccggctcagcatgttgcctggtcacatagccaacctccgggctgctgtcggcccggcactcggtgatgacgccatcgccgccgactcccggaaaccgagcggggaggcggggctgcccgacacattgaggaaaggcgaggagtgcgcccccttccggcgcccgccgtagcctggccactccgcgggggacgagctgcaggaaggggtacagcctgtgtcaaaacaccttgattcatgagtaatgatcaggattttgaaattagatccatggagctgtaaagaacctgaagaaatcttgggtttggctatcctttaatccgataggccatttgcgcaccaagtggtcaaacaccgtttcaaatgaccgggtgaacagcacttccaatgtggtgtgccaccaagtggctatctttaaccccacaaaacttgcacatgtgtttgaaggcaggcaccaaatcagtagcacatgaactctactgtgttaagaggccctgcagggtaggactcacagtggactttaaaggggtaaggctgcacaaaatagagaaataaagagcatgaaaataaagccgtgctaagaaacgacgtgcttaagaactgagatttggccctggaaatggggagggttaacagatcaccttggctgtgaactgagactgtcttgacagttcgagactgtcagagagaagctgacagtttaacaatccagatgcaaaacaagacttttgacacaggacaagaggttaattctagggtaatatttgcagtttagctttatgggtaaaaaaaaacacccttatatctggaggcatttcatgggtacttcttttgaacacagttggttaacataatcaccaagacacacaggcagtcctgaaaaatgcttctggtacttttcagagagtcttgctctgacgcccaggctggagggcaatggtacaatcttggctcattgcaacctccacctcccaggttcaagtgattctcttgcctcagcctccaagtagctggggttacaggcatgcaccatgactggctattttttatattttcagtagagacgagatttcatcatgttgaccaggctggtcttgaactcattggctcaagtgctctgcccaccttagggtcccaaagtgttgggattacagatgtgggccagtgtggccttctggcactttttcaaaccatgggtgaaaatactcaactctattgttatagctggttaaaaagaacacttctcaagaggtaatcaattttactgcagtaccaaaaaaattgtgctctccagttgtgccctcttgtggttaaagttaaatctttacagaatttaacctattttccatctggtggggagctaaacttgaacagcctctgcgtttctgaccaagtcctgttacacctatttttcaagccacattatttagaaaaccacaactttttttaaatcattccccttccactgaactccatggacttagtataaatccatgccccattttataccacactatataaaatgtaacagtctaaattatggccaacaaaatgtcactttaaaaaaattctaaccaagctttacagagcacaccaagtcatgtttctcactgcctgtataatcaggtctttattcaaaagaagctgtccaaaatgatttgacctttatggaataatcaaatttaagagtttatgcagcaggcttcttctcctctgtagtaggtttcttctctgcaggcttcttttcaggggctggtttcttggtagctgctgccttttttcccaccagaggcttcttctgcttcttaacaccaacagcagccttctttcctttcttacctaccacaggcttcttgcctgcaaccgccgccttctcatctgatttggcttgtagtgccgctgctgcagcagctgccttatccacccggagcttgtgctgcaacaaattaggcagaaaacagtaagaatcaaatccctgtaagaacttaatgtatcaggaagagaaaaacaaaaacaaaacaaaccagccgggcacggtggctcacgcctgtaatcccagcactttgggaggccgaggcaggtgaatcacctga

SEQ ID NO: 1242417 - DNA, 4001 bp, Homo sapiens
tctgactccaggctttgatttattcaggaagtattacctagcacctatgtcgggtcacgcatgacttgccgctgtttaagatactagagagaaaacgctgaacgagtctcaagtccccagtgccatgaagcttagaatctgatgacaacaaggacaaggacaataacaatggctgatataggcagctaacatttataagaacatttacaaggtgcctcacactgtcctaagtcgtttgggctagttaagcggaatcggcacaacaggagtttacacttggagctgcttagtctcagtgcccaaacggcgttcaaacattgtggacgacagttctccactcttgcatctccacaggccagattcttagaacccatcagaacagcctcaacatatcacgacagttctccctcccctcccccagctccaattcagaattgaagatcaatggtttaaatacagtaataaatctgtgaacactcaaatgttaatttgtctaatttgggcataattattgtgttaggcactataagaaaagaaatattccgaagaagcaaggtctactaaaaaaagaacttacccaaagttaaaggacacaattcagagctgtactacacgtactgcatcaaaatacgtattctcaacactgcacatgctccataaagagaaatggcagagatcatcaaaagtggtgagttgggccgggcgcagtggctcaagcctgtaatcccagcacttcgggagaccaaggcgggcggatcacctgaggtcgggagttcgagaccagcctgaccaacatggagaaaccatgtctttactaaaaatacaaaaaattagccgggcgtggtggcgcatgcctgtattcccagctactcgggaggcttgagacacaggaatcacctgaaccggggaggcggcggttgcagtgagccgagatcacgccactgcgctccagctggggcggaaagagcgagactccatctcaacacaacacaacacaaaacagtgggatttcccaaaggtcggcaagaaatctaagcagatcccgcagcgatgctgctccgaggccataggtccccatgggaacaaatctcaggctacgacagcatggtcttatcctcagagaagttgctctatcacgtcccttttaaagccgtctcctgaaatgccaactagctagctgccctcccagtatcttaccaagtcttgctaaggttgaaatagtacaggaatctgaataattgcgagcgcttccacaacttacacacagcacccggcggtgcaagcctgggtgacacagttcaatttttaaaacgtcttcatataggggaaacgccagacaattaaagctactaagtagaaaatactggaggaaacaatcgcggttgttcggggacttagtttcctccctcacattaggaataatgaacacatatcctatctacgctcaaaatatcatctggcggcaagtattaagaaccaatcccgcgccctgcacttgcgttacaaccattaatgagccgctcttccgggccctcaaacagccagcggcgaaacagccaagcaaggcctaacagggccccacgaggacgcaccaggaagtaatgaagtcacccgtgcctgtcaagaggcacggcgctaacagaaggctcccaggagcttaaccggatgctcatctggcaacaacggcaagaatcaggcccggcgttccctgcgcagcccggtcggagcccagacaaccggcccgcgggccaagctccggccttcggtgcacgcggcaaagcgcggaaaataaggcggctcggtgccgcctggggactggccgcccacgcccccggactcaccccggaggtccagctcccggtcgcgcaccgcgttggtgtactgcgccgcctgctcgatcagctccgccgtcagcttgaccatcctgcagcctcccgttcccccgcgctgtggaaagcccgtggcctcccgccagcgagacgtcccagcgtgccccgcgccccgccgccaggcagcaccaatcgcagccgccgagtgcgcgcgcagctcgaccgccaggccgaagcaatcgaagagccacgcctccgggggcgttcttgccggaagtcgtggcgcgcgcacaggggatgtgtctcgttctgggttgtttcctagggtgtgtttcggagtctggaggacccctgattccagacgttggtgtttaaaagttaaggcgaatgtggaaacacccgaggggaactttctcatgcattagcgcacctcgaggtgggaggggaagcggtgactgtcctccctccaccagccgtcgcgggaacccgtggggttcagtgaagggtccagcagttcaggtgcccgccccgggcctgggccttggctccgggctacagtgtgagatcccgggctaggtggcccgcctggggcaggtcgccgggacaaccccaccgccccgcaagtccagcccggcctcgggcacggtagggtttgcggttaagcttgtgacctttagacttctgaatattcatatgtatgaaatgtgatatacataaaagtgtgcatatcaggaatttacagtgattaatgaccagagtgaacacagctgcgtagccgacaccgggatccaaaacaccgctattctgaaagcctccctctttcccaaaaggcaaccgcgaactcaacactacaaattcggtttgcttgcttttgctataaatagaatcatgcagtatgcttttttttttggcctagtttcatggagtctatattatgtctggagtccatccaggttgcatacagagatggtttgtttgcttttgctgctgaagagaattccattgtatatattataccataaattacttattctgctgttgatagacatcaaagttgttttcagttagggctattctgagtaatgctactatgaattttctggtacgtggttctgatgcacgtttgcatgagtttgtcctggagtgggactgctgggacatagggtatatctatcatcaataagtaatgcccaacagttatgctaagaggctgaaataatatacacactccagcggtgtgtaagggttttcatggcttccagcttcagccttcttggcattttaactctataacttcagctattctgatgggtgtgtggtggtattgcactactgctttgctttgcttttctctaataactaatgaagctgagaaccttctcatgtgtatggtgcccattctgatagcttccttggttaagtgttctttcgagtccctggctcattttttttttttccttatggagttgtctgccttttttcttattgatttgtggaatttctttatatattagggatatgaacacactctgtggcttgccttttcactcttaatggtgttgatgattagattttttttttttttttttttttttttttttagacagggtctcactctgtcacctaggccggagtgcagtggtgccatcaggactcactgcagccttgacctctcaggctcaagagatcctcccacctcagcctcccaaatagccgggactataggcacaggtcaacaggcctggctaacttttgtattttttgtagagacaaggttttgatatgtggcccaggctggtctccaactcctgagctcaagtgatccacctgcctcagactcccacagtgctgggattacaggcgtgagccgcctcgcctggctgagaagtttccaagttttatgtagttcaattattttctttaggttagtggattgggtgtgtgtgcatgtgcatgtgccttaggaaatcttcccttacccccatcatattttcctatgtggtctactagacgattgttttgcttttcacatttagttctgcaatccacccggagatgattctccttgaacttttattgaagtatgatatacatatagaagaatgcaaactgaacacacccaaccaactagcatcctcgtaagaacaggacattgccacattccagaagccc

SEQ ID NO: 1242418 - DNA, 4001 bp, Homo sapiens
gaaaaccaatttaaaatctctatcattaatggaggcttgctgaaacagcacagcaggtcttggggtggctgcacctttgatggcctccaggccgccaccactctagtttactgcagagctgaaaagcagtagcccagtgcagctgccatcccacacaggcggaggtggtacaaatgcctggcctctagccacattcccctccagtcctctactgctgcaccgtgggtaaggggtggctgccaagcttgctaggcggagcctgcgccaacccatctccctcctcccccctctactgcgccacaaccggaaaggaacagctgctgtatcagccaggtgaaggggagggctgccattccttccaggcaaaagctgcgtaagccctcgctcccctgccccacgtctcgccccactgcaagcggaggcgactgtcacctctgctgcgtctgcgcaacctgcatcctttcccaagcagcactttggggagggggcagccgcccaccttggccggcttcctctccttaccactgcaccctaaagagggtacggctgaaactccgaaacagcagaagctgaacacacaccacctgccccctccccactggcggctctacagggaggaagcggccacccccccgctgaagcgcttgcgcagatctaagccgctgcagcggcggccatcttgaaggagctgcacaatggcagtgacgcaacacagacccccaggttatttcgacatagccttccaagacctggttcccaacagagagaaacaatgaaaaaaaagtaacccccaggcatcacctggcctatcagtcaaaagatctgtaaatgcaagttctgcacatcattccagtcttcttatgccatagcctctaaagcgagggttcctaaagggtacgcaaggattccacgcatttctgcagcccctgcggcagtgtaggcattgcgcagttttaataaaaaagcaccaccaccacagtaggcaaaccagatgaccatcgcaggtcacaggaaaattaaaggctgcggactgtgctactgccccttctgatgccccctcctctacacagcaatcattcagcgtcccttagtcactccggacagcgacaggccccgcggccgccatgcccaccgcctccatgccatgcccaccgccgccatgcctaccgccgccaaagtccaccaccgccatgcctacccgctgccaatgcccaccgccgccaatacccactgtcgccgccttccccctacctcccagccacttcctacggactctccccgcgccgcgaccaccaacacaacccccaccactgtcacaccgactcatccccctggtccactgccatagcctcctcgcctcggtcactgcgacgaattccccccccagtcgccccacgtaccctgctccaccacgcagtggtcactattatacacctacctgcgctcaacaccccctaaataccgatcacttcacgtaccttcgccccgccacaatcactccaatatacctacctccgcctaaaatccctatgcactggtccccccacgtaccctcgccacacggaactgcaatcaccctgatgtacccacctccacccatgtcccttgcccactgcggttaccccgcatgctcccagtcaccaccgcccttcccaccgcagacacccgcaataggacctgtcgcgacaccacagttgggggcggatgggggacgcgccccaatgcgagcggacaggataccatcggggcagaacggcacaacagcaagcctctgaacattccggatctggttctccagaacaaaggactttagggcccaaattccgtttattcagtactccaagtcctaaaaacttggaatatctgatgaataaaagtggccgctccccaggctgtctcttgagagaagccaccggcacagctgaccttgcccgctccatcgcgtcactgaccgctcctcagacagatgcgtcaggcatctccggcggccgctccactctgcgccagactcgctgcagcagcggcaggcttcgcacacatccccgcctgagcatgcgcgccagcctgcctctgcggccgcgcaggcgtgcttgtttgccgcagtgcaggggtcccagctccctccctcaccggaatgacctggggggagggggctactggacccctagggccccacagcactgttgcaatgagagggggcctctagaaaccataagcaacctgggatcaatggacatgtctacctgttttttaaaatgtgtaaaatactaaagaaataattcttggttctacaataaatttttgcacacaccactggccaaacaatcctaatttacactcaccctcaggtcttcctatgtgcggtacaaaaaagctggtttggaaaagttaaatgcgccataaccacaatcaatgcaaatacgccagacttgaaatccttccaaaagaaaatatccctaactctaaaagcatgctacattgttcaaatttggtgcgatttttctaccctttttctactttctacattttgagggggtaaattgtgaaaattatctcccccaaaatcacaatataattaaactctcctatacggaatggatagatcattcaactcaaaaacactggctattcaatttttgtaaaacaaaaatatgaacttagacccccacctaagatctaagtaggagagcctttctttgcctattagaattggatacattaaaatttttaccaataatcaatgatagctggagtggggagaaacaggcacttttatataatactaatggacaagtaaacattatttacgacataatattctatctgcagaaataacggaagcatcagtaactccaaaatttagacgctgatgtagcttgggaaaagacactgcagaaaagaagaaaataatcctgaaactgcatctgcatagtttttacacacatttgccctttctcaattgcccattatcgaagaagggagggtgatgtgagtggaggttgactaaatggttaaatcccctcccaagccctgtaagctactgctcagttcccaatgatcctacattaaaacaggtgcgcagaggcttatcaatgctgacttctatcgtaacaaaatctcagaaactgtgtaatgttcctcacagagaacagataggctaactaaataaacgtatatataaataataacatgcaatatggctgatggaaaaaatgatgtattaggctgaatcatataaaattgtcaatattgaattgttttgacctacaaaaacattgcaatttctaatagttcattgatacatattcacataaaataacatgggaagttgactctgatcacgggagtcaatcgaaaaataaaatgtaggctgggcacagtggcttacgcctgtattcccagcactttgggaggccgaggtgggcagatcacgaggtcaggagatcgagaccatcctggccaacatggtgaaacccatctctacaaaaaacagaaaaattagctgggcgtgatggcacatgcctgtaatcttagctactcgggaggctgaggcaggagaattgcttgaacgtgggaggcggaggttgcagtgagctgagatcacaccactgcactccagcctggtgacagggcaagactccatctcaaaaaaataaataaaataaaagcatactgtatgttcagttttacactgaaaaaattatgaaagaatacacaccattatagtccagtgatgaaaaccatgcctttggactcaggctcttttgattcaaattctagctttgactcttgaccacaatgttactttgagcaagttatctaaccctctgtgcattaaattcctaatctgtaacaaaagaagggattctgtttactttatacaatggcttaacaattaaatgagctaaaatactatttagaacaggtcctagtataagctgggtaaaaatgttggctcttagaacttcaccaaatgttagagtactacttcttctaggagc

SEQ ID NO: 1242419 - DNA, 4001 bp, Homo sapiens
gtgctgggattacaggtgtgaccactgtgccaggctcctggtttactttttggagccctaaattgtttcttcaggaggaaatccatgttcaattcaggttgaggaattccattttcactacccaggacactaagccatcaatttgaaaccatctttgcaaaaaatcataactgagaaaattattacagtgaaagagatctgacctaactgactccatcttgcttctaacctccaagctgcccttgttcattccccgcgaacttcaggaggaattcggtttatagtttagcttttaaatgaagacagtaacagccctttcccaaaacaacccccctccatcatgcctttgtaggaataacaaatcagctacaagattaaaaattacggtttaggattcatccagctggagactgcaggactctaaactgcctcaaactgctcctggggataacatcactattgtgaaacctaagctcagtcagtgcttgagatctattgcaggccctgctcccgatggatcagctgataccacccagatcaataaactgactcatctgatcttatggccccaaccggggaactgactcagcgcaagaggacagcttccactccctatgatttcatctccaacatgaccaatcagcactccccactttccgaccccctacccaccaaattattcttagaaacccctgatccccctacagggagattgatttgagtaataataaaactatggtctcctgcacagccggctctgggtgaattcttgcttctctattatagttcccttgtcttgataaatcggctctgtctagacagctggcaaggtgaatcccttgggtggttacaaattcacataaaaactacctcagaggagtgtcaaaggttgagcctaaacaatagacatcgacccagatgaccaatacaaaggtgttaaattattgacagagtaaaaaaaaaattcccaaatactcacaagcatgaaaacttaaaaaatgctaactaataacagaaaatcaataaggactgtaatttccttattacaagatcagattataaaactatatgctacctggatatggatgacaacattttctgaatgatatttttgattcactgaaaacataaaaaaaacccaaaatattaatcattcatcaaatagtaagaaaaaaatatatatctatatcattggttatctgtgcaaacatcatgccgacaattacaaaagcaagttgggaaaaaaatcaaagactctagccaatgtctacagttttggggtaaggagaaaagcaaacaacatgacgacattcctatttgcgcagtgcagtgactgtctctacatttagaatgggagtcgcaatgttctgtctacacaaattaattctttgtctaccttttacaattagaacaagctaaacaatataatgcaaataatcacagcctttattaaagcatgcgattctgagcatatgtgatcttgtgcctcacataaaattttgttcctctccttttcaaccagagatgtttcataggaaatttctcgacaacactaaaaaccgcgtgacatctgcttttcctaataaaagtaatatttccattgcactggtaaagaatgatcatggaaaagatgaaaataactgacaagatattttgaaaaagtgattatgaatgtatttttaaatacaaaaacgaaagttgttaatacagaatgcgaacatgcgaagttggttttagatgatgtttatgtgaaattataaaaaagaaaactgcatacaagtattaaagatatttggaccttaaaacaaaaacacaaaagcaagaatgaatattaccaggaaagcctgaagctgttaagtgttcttgatcagcaagcagaatgactggagagaaaagcctttcttatgcaaaagaactgcattcctcaaacagctccagagggaagacagggggcggctggccttgccactgcagaccccacagaaggctctgagctcagctgcagtggatgtggccccgcccttggtgggcgtggtctgcagcaggacgaccgcattcatggtacaactgcgcttgcgcaagaaggatgtctgcaggggtttctgccacctctggtggttgctgggtgggtagaaaatcccaaaggcttcagaaggagggaatcctaatgaggagtgttgacatctcataaaatccaccaagaatggactaagcaaataaagcagggaatgatgttgtgggggttgtctaagattcacaagaacattaaagacctaagtgtcatcagtaatagtgagttctaaattctgctctttattcaagggacaactgagaatattggtgtaggttcaaggcatagaggttttcactctttcttctttatataatagcacacttggctaagagaaggccctagagagaaaattctgtgttaaatgaagtgtcttactaaaatagtgtgatattttcacagagaaataaaccaatggaaaaaaaaaggagagagcaaatcagacacaagcatatatacacaaataatttataagattaattggggaaatgtgaatttttctataaatatttcaagaaatatatccacagggaaaaataaaatctgatctataacctcacattacacataaaatcattcctaggtggatcttagacctaaatattaaatcaatttaacacaggatttacatctaatttgggaacatgacttccggggtagaatacctttttttttttttttttttttttgagacagattctcgctctgttgcccaggctggagtgcaatggtgcaatcttggctcactgcaacctcctcctcctgagttcaagcaattctcctgcctcagcttcctgagtagctgggattacaggtgcccgccagcatgcctggataatttttttgtatttttagtagagacggtattttgccacattggccaggctggtctcaaacttctgacctcacgtgatctgcctgcctcaacctcccaaaatgctggtattacaggcatgagccactgcgcctggccctagagtaacatttcttaatccggtcctagaatgtgttttccatacaaaaaaagatattctaaaacacgtgatgtaagtaaagacttcaaagatagactcagtcaaaatcaagtttcatccattcctttcttgtagggctttagatcaaattcactaggtgattgggagtaaaactagtgccgacctcttgagatgctgtgaggatgaaatgaactaataatccataaaacctgtagattaatatcatctatacaaatgaatgtagtatttgctgatactgacataaatagtaattgcaaaataaattattcacatcaattataggttgcatcattactttacatttcacaatggagaataaaaccactgacaaatcagataattatgtatttggctgtaaaataagatttaaaaaagtgtaccctgaaaggcacaatgtaaacatccatgaacaaatcttctagaggcttcttgagcagcactagaattttttttttttttttgagacggagtctcgctctgtcacccaggctggagtgcagtggcacaatctcggctcgctgcaacctctgcttcccaagttcaagtgattctcctgcctcagcctcccgagtatggtgatgggactgcaggtgcccatcaccacacccagctaaatttgtgtttttagtagagatggggtttcaccatgttgcccaaaggtcttgaactcctgagctcaagcattccacccacctcaacctcaagtgctgggattacaggtgtgagccacagctcctggccaactgggctagaattaatagtcgctgtgttaaagagaaacctcaagaatgaactagaaataacaaaagtacaacaaatgtggagaggtgatgtatatgctatgtttcaataaatctattgagaaggaagatagaaatggcaaacagtcactttgctacttcttcattggatgg

SEQ ID NO: 1242420 - DNA, 4001 bp, Homo sapiens
gatgttcagtaaggtaggcatgttaaacacattttgactggtgatattttcaatttatgatatttcaatttatggtgatattttcaatttatgaaaccattttcaatatggtttattgggaagtagccccaacttaagttgaggaccatctgtaatttcaatggagctttccatttatcagaacagaacgcaactctcatcaatgaagaataaaccagtaaatcttatctcctctatttgtttccccagaaaacttctagtttctttcagatttgggaatcatctttcccttgtccttcattacataaataccattatctatctagtttgcaatgactattaggttcttctaaatttgtagtgaaatttaaggtcaatggcgcgaggtcataatacaataaaagaatgaagatgagggttacttaaaaaaattaaccaaggtctgctcttgagattttctgtatagggtattgaaaccccgagtgcctgactgcagcattgcctggcaaacaaagctctatcaataatgtgaaataaaaatatccataaactatcaatgctcttggtccattgctttttcacatctcatgtatcttaaataagtgccccccagaatcgcttttagaccataagattgaggatttcattacttgtataacagccatttgctattgaatctcatagatccaccctgcaggaatgagtccttcattagagaatgtgtttctctcaattcaatcctgttggcatttgcacaattcgtattgcagaacctaaacaattcctagcctgctttttggactcctaagttgtttcttcaagaggaagttagtgtttaacctagggtgaggaatcctatctttacttgccatctagtctcatacaaacgatatatgaggagtgtcaaaggttcagcctaaaacaatggacattaatggagcacgtaaaacctaaaaagtaggtaaactattgactaagtcaataaaaatgaacatataaaaattaaaaaagtagtttgctcattgatatagaagaaataaagattgtaattccctttctacaagatgatactattaaaatatatgctgcttgaagatgtatgacatttcctgagtggcatttttatttcagtgcaaactaatcactcataaaggagtaagaaaataatacatctctgtattatggattttctgtaggaaggcaagtcaagcagccatttacaaaaccaaagtgaaaatactcaaatatgcaagccaatgtctatagcttttgggtaaggagaaaaacaaacaatatgacgacactcatttgcacggtagcaaagtagctgtctctgcattcagaatgggactctcagtgttctgtctacacaaattaattccttgtgcaccttccacaataagaacaaactaagccacgtaatttaaactatcatagcttctttaagcctgcgattgtaagtaaattttgtcctgtggctctcaggaaagtctctgaccctctccttttcaaccagtcgtatttcatagcaaatttctggaaaacactaaaacagagaatatgtaacatttgtctttcttaataaagtgctattttcatttaattactaaagaaagatgattgaacagatgaaaataattaaatatgtatttcgaaaaatgattatgatagcattttaaaatacaggaatgaaaggcattaatatacaatacaaaatatgaattggttttaaatgatgtttatgtgattaaaagaaagacaatcgcatgcaagttttaaagatatctgcacccccacctccaaaaaagcaatatgaaatgttaccaggaaggtgtcattgatcagcgaccacagttactgtagagaaaagcctttcttatgcaaaaaggccgcattcctcaaatagccccagagagagggcagggggcagctgaccttgcccccgcaaaccacacagaaggctctgagctcagctacagtggctgcggccagcccttggtgggcgtggtctgcagcaggaggaccgcattcgaggtcggcgcaggaggacaactgcgcttgcgcaggaggcacccagggatgactgacagctctctgccacctctggctgttgctggaggagtacaaagtaccccaggttccaaaaaccaggcaaccataatgaggagccttgacatctaatttatttcactgggactggactaaacaaataaagcggggagcagtgttcggggattgtcaagattcaagagaacattagagacataagcaacaacagcaatgttctaaagttctaaatccttttatttcaaggtacagctgggaatattggtgtaggagcaaagtatccaggatttactagcctctttcttccttttagaacaccacagtagataggctaaagggctgtggatggaaaattcttgtattaaatgaagactcttagtaattaagacaatgtaatatttgcacagatagaaaggtgaaccaatgaaataaaggaaagctcaaaacagacaaaataatataaatgcaaataattaataagagcagttattagtagaaagatggcttttacaatcaatgttctaggaaattaatgttcattgggggaagttaaatgtacctttaacttcacattacacataaaattaattgcaggtgcatcatagacccaaatataaataccttttaatacagtatttacaacctatgttaggaaaatatcttcatgactataggctagcataagatttattaaattagacctacaatgtattcacaatttaacagaaaaacattttctaacatagtttatgtgagcaaggactatggagacagccctttttttgcagggctttagctcaaattcagaacttgtacttaggagtggtaatagaacctaccttttgatattttgggagaaatgaatgaactaatgatacataatgcctgtagataaatatcaggtctatactaatcacaacatcagtatgctaatattgacagtgttttctaagtaatttaaatatattttttgtatcaattgtaaaatacatcattattttacgccatagtaaaggaataaaatcattgacaagatatggtacaaatacttcctacaccttataatttttacctcacaattaatgacaataactcttttcgacatatataaatgtggatatttgttttatatcactccaatgagatgcaaatataagcaaatcacgttaaaaaaggtattgctgctcggcgcggtggctcacacttgtaatcccagcactttgggaggccgaggcgggaggatcctgaggtcaggagatcgagaccatcctggctaacacggtgaaaccccatctctactaaaaatacaaaaaattagccaggtgtggtggcaggtgcctgtagtcccctcagctactcaggaggctgaggcaggagaatggcgtgaacctgggaggcggagcttgcagtgagccgagattgtgccactgcactccagcctcagcaacagagtgagactccatctcaaaaaaaaaaaaaaaaaaaattctctactaaaaatacaaaaatttgcccggtgtggtagtgtgtgcctgtaatcccagctacttgggagactgaggcagaagaattgcttgaacccgggagatggaagttgcagtggaccgagattgtgccactgcactccagcttgggtgacagagcaagactctgtctcaaaaaatagaaaaataaagatattgataaatttctctcatccagatgcacctcttctgagtcactattcatctttcttatgattttctcctcattatcatcttctctgttaaccagaagctttggtgatatttcatttcttgtgagattcctacgcaacactctgtgagattatctttccaacctgctgacagctcctctgcaagttttgtgttgatgacattaaaagaaggtgtcaatggaaggtttctaggacaggttcatgtgcattcatataa

SEQ ID NO: 1242421 - DNA, 4001 bp, Homo sapiens
ttcagtagagacggggtttcaccgttttagccgggatggtctcgatctcctgacctcgtgatccgcccgcctcggcctcccaaagtgctgggattacaggcgtgagccaccgcgcccggccgataaaaatttttaaaaagtcattatgttttcagttcatcaccaaagtaatgaccaaatccaaagcacctttattaggcctatcatgcactatcttggtgtgggctcccgctctgccaagaaccacacaacctttgaaactgatgtcctgggcctggcgcggtggctcacgcctgtaatcccagcactttgggaggttgaagcgggcagatcacctgaggttaggagatcgagaccatcctggctaacacagtgaaaccccgtctctactaaaaaaaaaaaaaaaaatacaaaaaaattagccaggcatggtgacgggcgcctgtagtcccagatgctcgggaggctgaggcaggagaatggcttgaacccgtaaggcggagcttgcagtgagtcgagatcgtgccactgcactccagcctggacttcgtctcaaaaagaaaaaaaaaagaaaaactgatgtcctggatactggggcggttcctttaccttccttcaaggctgttcttggcgggttcctgctgtttcgttttgttttttctttgttgttgttgttttttttttgagacagagtttcgctcttgttgcccaggctggagtgcagtggcatgatctcggctcactgcaacctccatctcccggattcaagcgattctcctgcctcagcctcccgagtagctgggattacaggcacgcgccacaacgcccggctaattttttttgtatttttagtacagatggggtttcaccatgttggtcaggctggtctcaaactcctgacctcaggtgatccgcccacctcggcctcccaaagtgctgggattacaggcgtgagccactgcgccccgccgggctcctgctgtttcaacccattccttggatggtgctgcctccaagtgttcggaccttagccccaggtggtcttagcaccagtaacccccgctccaactccctaaagtccgacccgccccaggccccgcccacgctccaccctccctccctgtctagccccctcccccatccccttccccctccttcgcgtctccccatccggcgcccccgcctcgcgtcccctgggtccgcatcctggcagcctccgcgtttccctacccctgctaccgggctccagccccggggacgctatctgcttcactcggccgtgcgcgccgccaccgccccgcactgcctttttctaggcatggggtcatctaggccatgcatgattcgcccctgccccacagaagtccctgaggggtcctggccggacagcacggaatagaagaacggaaactctcccaaaaggagtcccaggcctggctctatccctccagatgacgtcccaggaggccagagtgcagggccggccagagggagtcacagtccggcaccgagaggcaactcggcagctggcggggcccgggctcgaacccagggactcacccaaaccgaggtgaccgtcgcacgcgccgccgccaccggggccgacgaatcacctgccctgggaagctaggtccgccctccccccgcccccagctgctgcctcaccgctgggcccacaggcctcgcgccctgagtttccggctcctccctcctttgcgaacgctgggagttccgttgcctacaggccgttatttccgccttcaacggctggggcatttcccatcggctagggagggggtcttcttgcatttgctttgcactgtccgggactcttcctgctagatgacttgaccaggccgaggcctccctcctgaacacaagctcttcggggctcctttcgccaatgggaggaggctgatcttgtggccgggcattcaacgccctgggccctgccgcctcccgcagatcttcccgggccttagggcttcacctggagtccccttcccctcttgggcccgtgctcttaaacgggcagtgccaattgcctggattactccaactaacccctcacacccaagtttcagacacagaccttcgctcccccacttgcccttaacaaaagcagatacatacctcgattactgcctgtttgctgcttttgcgagcttctttcccactcggctgcgggctgagcaatggtagggacctggcttgattcctatttaagtagccagagtccagcacaagggatggcgctcagtagaccctgcgtgaaggaatgattaaattggtgcaaaagactagggtaagcggcagagatttaggagattaagtcctgccagggtgtagcctctgcagggcgggaaggctgagattacaattttaaaactgaatatttattgaatgcttacattcagccaatccctgcttcacacccatcatctcatttaatttttttccttttttttcttttttaagccagtagatattaactcttaatcatgacatgaggaagtagacacactgaagctcagagaggttaagtaatttggccaaagtaacacagctttcaaggaaaatgtttgaatttgctgaaagtttgatgtatagggaagttgactaccgatgtatgacagaagcaaagtatccacctttggcacattttgcgtccacggaatgctaaaatttggacttgtgtattttatgcacattacaccatacattcagactaaaaagaataggaaattaggctgatgaaaggctattactagactggtaaaaagggttctggggccctggaaggccaatttttctggacgtgagatttttttttatttttttgagatggagtctcgctctgtcgcccaggctctggagtgcagtggcgcaatctccgctcactgcaagctccgcctcccgggttcacgccattctcctgcctcagcctactgagtagctgggactacaggcgcctgccaccatgcccggctaatttttttgtatttttagtagagacggggtttcactgtgttagccaggatggtctcgatctcctgacctcatgatctgcccgcctcggcctcccaaagtgctgggattaaaggcgtgagccaccgcacccggcctggacctgagattttatttaggtggctctttcagtggccaggctgagcaaagctgtccactagggtatttatttggtgcatccacaaataaaagctcatgtctgcctgatttatgagactgacaaaaaagagaagtccagggcctgacttcactagggaattttgacacccaggatattaggtattttgtgtccaaacaaccatcccttacaaccacggaggtcacatctaatggtcgggctgcatagaaaagaataaagaccttaaacattttaggaaaatagactgagactgagaaagaagttcccaaattcatgcctggaggtccaggagaaatgttctagttcctcactcacacctagctgaataacttcccatatcactgaaaaaacaaaacaaaaccaggtcaggcactgtggctcatgcctgtaatcccaccactttgagaggccaaggtggaagtagcccatgagtttgagaccagcctgggcaacatgacaaaaacccatctccacaaaaaaaaaattagctaggtgtagtggtatgagtcatgatcccaactacttggaaggctgaggtgggaggatcacttgagcccaggaagtcatggctgcagtgagctgtgatcctgccactgcactcagcctggagactctgtctcaaaacaaacaaaaaccagagcacctggcccaggggttcatttagagccagtgggtgtttcagaaggggctacctctggaatctcagcttcagaatgttggccacatgcacacactgtgctttatgtctttaaatcaattaatttaagaaaaaagcctgactacatttatttaaaagggcaacattggccaggtgtggtggctcatgcctgtaatc

SEQ ID NO: 1242422 - DNA, 4001 bp, Homo sapiens
cctggcgcggtggctcacgcctgtaatcccagcactttgggaggttgaagcgggcagatcacctgaggttaggagatcgagaccatcctggctaacacagtgaaaccccgtctctactaaaaaaaaaaaaaaaaatacaaaaaaattagccaggcatggtgacgggcgcctgtagtcccagatgctcgggaggctgaggcaggagaatggcttgaacccgtaaggcggagcttgcagtgagtcgagatcgtgccactgcactccagcctggacttcgtctcaaaaagaaaaaaaaaagaaaaactgatgtcctggatactggggcggttcctttaccttccttcaaggctgttcttggcgggttcctgctgtttcgttttgttttttctttgttgttgttgttttttttttgagacagagtttcgctcttgttgcccaggctggagtgcagtggcatgatctcggctcactgcaacctccatctcccggattcaagcgattctcctgcctcagcctcccgagtagctgggattacaggcacgcgccacaacgcccggctaattttttttgtatttttagtacagatggggtttcaccatgttggtcaggctggtctcaaactcctgacctcaggtgatccgcccacctcggcctcccaaagtgctgggattacaggcgtgagccactgcgccccgccgggctcctgctgtttcaacccattccttggatggtgctgcctccaagtgttcggaccttagccccaggtggtcttagcaccagtaacccccgctccaactccctaaagtccgacccgccccaggccccgcccacgctccaccctccctccctgtctagccccctcccccatccccttccccctccttcgcgtctccccatccggcgcccccgcctcgcgtcccctgggtccgcatcctggcagcctccgcgtttccctacccctgctaccgggctccagccccggggacgctatctgcttcactcggccgtgcgcgccgccaccgccccgcactgcctttttctaggcatggggtcatctaggccatgcatgattcgcccctgccccacagaagtccctgaggggtcctggccggacagcacggaatagaagaacggaaactctcccaaaaggagtcccaggcctggctctatccctccagatgacgtcccaggaggccagagtgcagggccggccagagggagtcacagtccggcaccgagaggcaactcggcagctggcggggcccgggctcgaacccagggactcacccaaaccgaggtgaccgtcgcacgcgccgccgccaccggggccgacgaatcacctgccctgggaagctaggtccgccctccccccgcccccagctgctgcctcaccgctgggcccacaggcctcgcgccctgagtttccggctcctccctcctttgcgaacgctgggagttccgttgcctacaggccgttatttccgccttcaacggctggggcatttcccatcggctagggagggggtcttcttgcatttgctttgcactgtccgggactcttcctgctagatgacttgaccaggccgaggcctccctcctgaacacaagctcttcggggctcctttcgccaatgggaggaggctgatcttgtggccgggcattcaacgccctgggccctgccgcctcccgcagatcttcccgggccttagggcttcacctggagtccccttcccctcttgggcccgtgctcttaaacgggcagtgccaattgcctggattactccaactaacccctcacacccaagtttcagacacagaccttcgctcccccacttgcccttaacaaaagcagatacatacctcgattactgcctgtttgctgcttttgcgagcttctttcccactcggctgcgggctgagcaatggtagggacctggcttgattcctatttaagtagccagagtccagcacaagggatggcgctcagtagaccctgcgtgaaggaatgattaaattggtgcaaaagactagggtaagcggcagagatttaggagattaagtcctgccagggtgtagcctctgcagggcgggaaggctgagattacaattttaaaactgaatatttattgaatgcttacattcagccaatccctgcttcacacccatcatctcatttaatttttttccttttttttcttttttaagccagtagatattaactcttaatcatgacatgaggaagtagacacactgaagctcagagaggttaagtaatttggccaaagtaacacagctttcaaggaaaatgtttgaatttgctgaaagtttgatgtatagggaagttgactaccgatgtatgacagaagcaaagtatccacctttggcacattttgcgtccacggaatgctaaaatttggacttgtgtattttatgcacattacaccatacattcagactaaaaagaataggaaattaggctgatgaaaggctattactagactggtaaaaagggttctggggccctggaaggccaatttttctggacgtgagatttttttttatttttttgagatggagtctcgctctgtcgcccaggctctggagtgcagtggcgcaatctccgctcactgcaagctccgcctcccgggttcacgccattctcctgcctcagcctactgagtagctgggactacaggcgcctgccaccatgcccggctaatttttttgtatttttagtagagacggggtttcactgtgttagccaggatggtctcgatctcctgacctcatgatctgcccgcctcggcctcccaaagtgctgggattaaaggcgtgagccaccgcacccggcctggacctgagattttatttaggtggctctttcagtggccaggctgagcaaagctgtccactagggtatttatttggtgcatccacaaataaaagctcatgtctgcctgatttatgagactgacaaaaaagagaagtccagggcctgacttcactagggaattttgacacccaggatattaggtattttgtgtccaaacaaccatcccttacaaccacggaggtcacatctaatggtcgggctgcatagaaaagaataaagaccttaaacattttaggaaaatagactgagactgagaaagaagttcccaaattcatgcctggaggtccaggagaaatgttctagttcctcactcacacctagctgaataacttcccatatcactgaaaaaacaaaacaaaaccaggtcaggcactgtggctcatgcctgtaatcccaccactttgagaggccaaggtggaagtagcccatgagtttgagaccagcctgggcaacatgacaaaaacccatctccacaaaaaaaaaattagctaggtgtagtggtatgagtcatgatcccaactacttggaaggctgaggtgggaggatcacttgagcccaggaagtcatggctgcagtgagctgtgatcctgccactgcactcagcctggagactctgtctcaaaacaaacaaaaaccagagcacctggcccaggggttcatttagagccagtgggtgtttcagaaggggctacctctggaatctcagcttcagaatgttggccacatgcacacactgtgctttatgtctttaaatcaattaatttaagaaaaaagcctgactacatttatttaaaagggcaacattggccaggtgtggtggctcatgcctgtaatcctagcactttgggaggccaaggcgggcagatcacaaggtcaagagatccagaccatcctggccaacatggtgaaaccccatctctactaaaaatacaaaaattatctgggcatggtggcgcatgcctgtagtcccagctgctcgggaggctgaggcaggagaatcacttgaacctgggaggcggaggttgcagtgagccgagatcgcgctactgcactccagcctggtgtcagagcaagactctgtctcaaaaaaaaaaaaaaaaagggcaac

SEQ ID NO: 1242423 - DNA, 4001 bp, Homo sapiens; identical to SEQ ID NO: 1242418

SEQ ID NO: 1242424 - DNA, 4001 bp, Homo sapiens
tggctgcacctttgatggcctccaggccgccaccactctagtttactgcagagctgaaaagcagtagcccagtgcagctgccatcccacacaggcggaggtggtacaaatgcctggcctctagccacattcccctccagtcctctactgctgcaccgtgggtaaggggtggctgccaagcttgctaggcggagcctgcgccaacccatctccctcctcccccctctactgcgccacaaccggaaaggaacagctgctgtatcagccaggtgaaggggagggctgccattccttccaggcaaaagctgcgtaagccctcgctcccctgccccacgtctcgccccactgcaagcggaggcgactgtcacctctgctgcgtctgcgcaacctgcatcctttcccaagcagcactttggggagggggcagccgcccaccttggccggcttcctctccttaccactgcaccctaaagagggtacggctgaaactccgaaacagcagaagctgaacacacaccacctgccccctccccactggcggctctacagggaggaagcggccacccccccgctgaagcgcttgcgcagatctaagccgctgcagcggcggccatcttgaaggagctgcacaatggcagtgacgcaacacagacccccaggttatttcgacatagccttccaagacctggttcccaacagagagaaacaatgaaaaaaaagtaacccccaggcatcacctggcctatcagtcaaaagatctgtaaatgcaagttctgcacatcattccagtcttcttatgccatagcctctaaagcgagggttcctaaagggtacgcaaggattccacgcatttctgcagcccctgcggcagtgtaggcattgcgcagttttaataaaaaagcaccaccaccacagtaggcaaaccagatgaccatcgcaggtcacaggaaaattaaaggctgcggactgtgctactgccccttctgatgccccctcctctacacagcaatcattcagcgtcccttagtcactccggacagcgacaggccccgcggccgccatgcccaccgcctccatgccatgcccaccgccgccatgcctaccgccgccaaagtccaccaccgccatgcctacccgctgccaatgcccaccgccgccaatacccactgtcgccgccttccccctacctcccagccacttcctacggactctccccgcgccgcgaccaccaacacaacccccaccactgtcacaccgactcatccccctggtccactgccatagcctcctcgcctcggtcactgcgacgaattccccccccagtcgccccacgtaccctgctccaccacgcagtggtcactattatacacctacctgcgctcaacaccccctaaataccgatcacttcacgtaccttcgccccgccacaatcactccaatatacctacctccgcctaaaatccctatgcactggtccccccacgtaccctcgccacacggaactgcaatcaccctgatgtacccacctccacccatgtcccttgcccactgcggttaccccgcatgctcccagtcaccaccgcccttcccaccgcagacacccgcaataggacctgtcgcgacaccacagttgggggcggatgggggacgcgccccaatgcgagcggacaggataccatcggggcagaacggcacaacagcaagcctctgaacattccggatctggttctccagaacaaaggactttagggcccaaattccgtttattcagtactccaagtcctaaaaacttggaatatctgatgaataaaagtggccgctccccaggctgtctcttgagagaagccaccggcacagctgaccttgcccgctccatcgcgtcactgaccgctcctcagacagatgcgtcaggcatctccggcggccgctccactctgcgccagactcgctgcagcagcggcaggcttcgcacacatccccgcctgagcatgcgcgccagcctgcctctgcggccgcgcaggcgtgcttgtttgccgcagtgcaggggtcccagctccctccctcaccggaatgacctggggggagggggctactggacccctagggccccacagcactgttgcaatgagagggggcctctagaaaccataagcaacctgggatcaatggacatgtctacctgttttttaaaatgtgtaaaatactaaagaaataattcttggttctacaataaatttttgcacacaccactggccaaacaatcctaatttacactcaccctcaggtcttcctatgtgcggtacaaaaaagctggtttggaaaagttaaatgcgccataaccacaatcaatgcaaatacgccagacttgaaatccttccaaaagaaaatatccctaactctaaaagcatgctacattgttcaaatttggtgcgatttttctaccctttttctactttctacattttgagggggtaaattgtgaaaattatctcccccaaaatcacaatataattaaactctcctatacggaatggatagatcattcaactcaaaaacactggctattcaatttttgtaaaacaaaaatatgaacttagacccccacctaagatctaagtaggagagcctttctttgcctattagaattggatacattaaaatttttaccaataatcaatgatagctggagtggggagaaacaggcacttttatataatactaatggacaagtaaacattatttacgacataatattctatctgcagaaataacggaagcatcagtaactccaaaatttagacgctgatgtagcttgggaaaagacactgcagaaaagaagaaaataatcctgaaactgcatctgcatagtttttacacacatttgccctttctcaattgcccattatcgaagaagggagggtgatgtgagtggaggttgactaaatggttaaatcccctcccaagccctgtaagctactgctcagttcccaatgatcctacattaaaacaggtgcgcagaggcttatcaatgctgacttctatcgtaacaaaatctcagaaactgtgtaatgttcctcacagagaacagataggctaactaaataaacgtatatataaataataacatgcaatatggctgatggaaaaaatgatgtattaggctgaatcatataaaattgtcaatattgaattgttttgacctacaaaaacattgcaatttctaatagttcattgatacatattcacataaaataacatgggaagttgactctgatcacgggagtcaatcgaaaaataaaatgtaggctgggcacagtggcttacgcctgtattcccagcactttgggaggccgaggtgggcagatcacgaggtcaggagatcgagaccatcctggccaacatggtgaaacccatctctacaaaaaacagaaaaattagctgggcgtgatggcacatgcctgtaatcttagctactcgggaggctgaggcaggagaattgcttgaacgtgggaggcggaggttgcagtgagctgagatcacaccactgcactccagcctggtgacagggcaagactccatctcaaaaaaataaataaaataaaagcatactgtatgttcagttttacactgaaaaaattatgaaagaatacacaccattatagtccagtgatgaaaaccatgcctttggactcaggctcttttgattcaaattctagctttgactcttgaccacaatgttactttgagcaagttatctaaccctctgtgcattaaattcctaatctgtaacaaaagaagggattctgtttactttatacaatggcttaacaattaaatgagctaaaatactatttagaacaggtcctagtataagctgggtaaaaatgttggctcttagaacttcaccaaatgttagagtactacttcttctaggagcaggaattgggtgttcattttttattctcattgttttaactaatttctatatcttatatttctttt

SEQ ID NO: 1242425 - DNA, 4001 bp, Homo sapiens
acacaaatgaggaaagcctcaaactttttcagaccacatgttgcataaagaatttatagctgttttatttagttggttacacactgagtagctactgtgaagagaagcattatgccaaacagataaattcacagacccagcattgaattttacagcctggaacaacctataccaagtggtatgagtaaatattctcataaaatagcccaaaacatctctactggttccataactgattactgatttccacattacaaagattatttttttctaatacctaactcttattagagacccggatatttattactgaggcaggagaatagggtctggaggcagggaacttaagggcaattcatgctgaatcaaggaaaaacaccaaggtttgggggcagggaatctgaggtcaacttacgttaactttctaaaagagaaaacaccaaggtctgggggcaaggaatctaaggccaattcgtgctgacttcccaaagctgaattcccaaaaggaaccccctgggtttgggggcagggaacctaaggccaattaaggccaacttcctaaagctaaaccaaaaggaaaaaacccatctgcccacgcccgagtggcaaaggatcaaaggctactatccctgcaaccctccccatccaccacgtctcacatggaaagggagagtgccttagactggccgcaggccaagcagggaccatccgttcatctgcacaggacgccaattcacctcggcctttagccacagaccaaatccttcatccagataaggggtaacccataggaaccataaaaggagcacttaaaatccagaaaactttgtaagtgggctcttgagccccttgctccggcccactcacaccctgtggggtgctttctcgctttaataaattcctgctttcgctgcttcgtttgtgtttcattcctttgttattttgtgcgttttgtccaattatttgttcaaaatgccaagaacctcgacaacctacactcaagggcctcctaccggtaacattacgggaaacaccatttcctcatcacatttcagatttgctcccagtgaggtacgtgggcacttgaacacatccctttaaaaaggagaaagctttctgatctatgtagtgatttatctggcagtgccttctgtccaccagcctctggcctgattttcctagagatcagaagaatcaacataacttttgtaaactaagatccagaaagggcctttggttattatcggtaaatgctgggctaaagaaagaactggtgggcgggtcaccaccccaggctagtccacataacgctattcatcttagaagcagtaagacgggggaaaggtctgcatcccattcgcttattccgtcctactgaatctgccttggcaggacacgacctgcaaaataaccccgtggatccgtggagtgtcaccacactgcagggtcaaaggacggcgtcggcggttctcggctgttagggagctagccgacgaaggcaccacaaccctcattctttactcttcccgcctgggggccgggaagccaagctctaccgcttcgagcacatccagggtccccggggcccggactgctgacaccgaggcaaggtctcaccgggcccactctgcccaacctccccgattctcgcttagcctctcttccctttcggggtgccctcccgcctgctaccccgaggggtgcaaactcacgaccaccgcggcgccggtgaaaatgtcctccccctcggtgtcgctgtccccagcctcgggttctgatcccccggccgccccctcggactccggctccaggccggggaagggcggaggcagtctctccgaagcgctacagccaccaccacccgacgccatcttcttccacccgcggcggaagccgcaacaacaactttatcgagagatagcgccgtgagcaaagcgatccaacggtgcgaggagtgggagggccgcaagggaccccgtgggatccgaggggcggagacctaggggcggggcttaggcgctgggggcggggcggcacccggccagctgaggctgcgcagcaaatccgaggcctggttcgcgatgctgagatattaacgagtggggccaaaggggcagaaaagtaggagttaggggctgctcaggtttctagggccctttgtgctctggatagctttatccaacaggcttctaagagttcgtctgaatgaaggagtgtcactaaaatgtttgaaaacctctacatgccatctacccatgccaagcacaatgccctcacagagagtcaataaatatttcgattgaggtatctgaacaagactagaagaaagcttcaccacttattccttgagcaacattcagttaattcattaagaaatacagatactgagcatctactgtatgcctggcaccttgctgtgagtttcagatacagaaatcaggtatttaatcgacagttcgacatgttcaatgctatggtgccctgtgggagcacagggaaagagataatcaattctgcttggagaagtagggaggcctcacagatgaagtgaggcctcagtgtcctagatttggctggaaaaatgttaggattatcctctcaattgctgtggagtaagtggagtggaatagacggcagggaaattattgaaccctgaccaaaatttccttgggacctaagcaattcattgtctggtgatcctaaggcctacattaactagacaaacaagactggagtttaaagataaatgggcatgttagcatgggacaattctgcaagataatcctatcttctcaatagaaatggcatttgtcaccaactttgacaagaggtttagttagtttggttgtaactgcaaattcagggatggactccctcacaggtcatgtgagctgtttgaaggcgggggcagcgttttatctttgtatcttccatgcctatggatcacctatggcaaattagtacctacaaatttgatcggagggatggatggataaaataaaatcgattttgttactggcatccatcacacccacgaacaccagagggcttaagatacacttttttttttttttttttttttgagggaagtctcgctcttctcccccaggcttgagtgcaatggctcgatcttggttcactgcaacctctgcctcctgagttcaaacgattctcctgcctctgcctcccaagtagctgggattaaggcccctgccaccacgcccagctaatttttgtattttttagtagagacggggtttgcccatgttggccaggctggtctcgaactcctgacctcaggtgatccgcccgcctcggcctcccaaagtgctgggattataggcgtgagccatcgcgcccggccaagatacacttttaaggatggcgatctccattatgtcaccactgtacacattagacacgggaaaacttatgttctaagttgtctttggaggccattagcagaaatattcgttcaaaggtgggaagctgtgctggactgagtcccttaggagacgagaaagccaaaaagccctccccatgccatacctgactacctcactggcttcccatgacatcccttttcacagcaactgaaacctacttcctgtccgatcaggaagtaagaaagacgttggctgtcagcggatcccgcggagaaataattgtaaagagtctccgtgctggagaactcaagatctcctttcccctaccccttcaggattcatctttaacttatcacggatactgagtgagtcagtcgcggttaacagaccgttacatccacttctaccaggcggacactacaagtcccagaatacaattcgctgccttccgaagaaaatagctcacgcatcccagcatgcaatgtgctgacgagccgcgaagattgtttttgtcccgccgaaatcgagcaaagcacgctggaacttgtagtccttgaggccccttccctaggtccttcgagctactccgtctggccccgccttttctctgctctc

SEQ ID NO: 1242426 - DNA, 4001 bp, Homo sapiens
aggggccaagcgcgggctagggctttgacttgcctgctgtcgccaggcaggaactccctcagggtgctgaagagaagagaaacactgtaagctgcctggggatgccgggggagcgtgaggaaggggtggagacaccagagcccagaactgcacctcccaggggaccactgcttctatttgtaacaagccccagttccggaggtggcgggggtaaccaagtctgtccaaaaaaaagcccctccacccaggtcaagagagctggtgagggcggtcatgctggatcctggcagatgtgaaaagaaagggcttgccctccaacacctttcctcacctgctcactgctgacagcccctggcccccgccatcggccccccttacccccagttgctagccttggggtctgtggggaagtgccgaagtctcaggaattccagtaactccttgggcacctcctggttcaggtacaggatgccctggagaggacagaggagacctgcaatcagacccagctactaatttgcatagcgcagtgccagtgaaaatgcagggctctttgttccaaaaaaagaatttcacgacaatgacagcagagcgttgaaccaggctcagggcccttctgggcgctgggcgctgtgtgcacaggttgtaccccatgacgcggcatagctttgctgttgggggaaggaccctcaccctacatgccatcaggagggcagcacaggacctcaccatggaggggacaggacctgggtttcatggagctgggactacctgtgtccgttacctctttcagtcctttcaacaagccagaggggggtgtttggacctatattagactcagaaaattgatgcttgaggtggtgaataacatccccaagttgtgggttccctccctgccatgcccccacacctctctgtctgggccacacccctggcacagaaggccggggggcaaccaactgtgctctcgcatacctggatgtaagcctccaagccctgccggcgctgttccaaccctctggtcctccagttgggcaggcgtttcgaggggaagtcgggcactttgtacagcttcttgatctactggaggtttaccgcgtgcgatcacagcatcccgactgagccctcaagccctcttcgccccagccagaagccctcccgcgcccccgccttcgggctctactgggacagaccctggtgagtggtggaccggccgagggcgaggaaggccccaacccacccacagaggcccgggggctgaccggctgcgcagggactgaggcagtaatgggggtggcggaggctggggctcgcccgcccgcctcacagggcctgggcgggggctggacagaggctgggccggggccggtgggaggtcggcgccgcctcacccgcttgtgcagcgcgtggaactcgctgtagcgccttggcaccgtgtgtctgcgcccgctgcacagcacctccactcggaacacctggcggcgcgggcgggcagcgggtctgcgcgtgaggccccgcgggaggacgccgcagcacctgcgcctggcgacgtgcccaccctcccgctctcaaaggcacaaagcggccttgcggcgccgcggctgcccggggactctccgctcccgcacacctgggagaaccggctggcggacctgcccctcggagccctggggtccctcaagagctcgaaccatggtccgcgaggctggcaaatccaagcggcccccaaaccctcgacaaggtttcccccgacggtccagcccgcagcgctcgttcacccaggcccgggccccgggtccccactgagcgcagcgcggggaaatcctgcgggtcccggcgcccctccccatccaggggccgcgctcaccatgtggcttttctccgggctctgcctgggcccctcggcctcgggccccaccgacgggatgtgaacttccagcatccgcgccccggccccagctgctccgcgcgctcggctcggagccctaactctcccggagcggactgaggaccccggggcggccggctccgccccctcggtccgcaggccccaccccaggccccgcccccaggcgaccccgccccgggcgttcccttgcgccgcgggtcctgagcctagaagattaggcgggacctggacgccgcccccgaagtctagtgcgcccacagcgcggggcagtggagtcaaccgtttgtcaaacattgacggagcactcactgatgccaggaactggcgagcgaaaatgtcacccaacctgagttaagcgcctaccaaggacggcctgtggctccaggcgcggacggaggcggggcccgggcctcagcgccggtcctggggccaaccagggacctgtcttgggttcctcagtcccttcccgagcctttccctcctttcagcctggtccctgaaattgtgatctggattccccggctgaggccacacctgagcaaggcttggacccagtccagctttgatgcccctttccccagcatccacaggcccccccattcattcattgttttcatccatccattcactcatatcttccaaccctaaggggctccaggctgtttgtggggaagaggcagtttagggacctagactccgatttggacgtcagactgcctggatttcaggagctccgtagacctttgctcatctgcaaaatagggataacgtggctccttcaggcaagtgtataaagtgagatgatttggccgggcgcggtggctcacgcctgtaatcccagcactttgggaggccgaggtaggcggatcacctgaggtcaggagttcgagaccagcctgaccaacatggtgaaaccccgtacctactaaaaatacaaaaatcaaccaggtgtggtggcacatgcctgtaatcccagctactcaggaggctgaggcgggagaatcacttgaacctgagaggcggaggttgcagtgagccgagatcaaaccattgcactccagactgggcaacagcaagactctgtcttaaaaaaaaaaaaaagtgagatgattcatgttaggcccttaacagaagcattgagcagcagcttgactgtgggcttctcctggatgactaggataagtgggcacagggcagtggatgggaagagagactttggggggtggcaccgggttgctcttgtccacccctccgggcaggttcttcctggatatgtggcaggattttgatccagaactctctcaggccatgtgctggaaaggacctctgctcccacctctcagccctgcacccttcagctgtcggagagctgctatcagcagcaccatggcaggtcctctactccactgacttcccccacaaaggccccgtgacatgcagagaggcgaggccctgccttccaaagctcatacgtagtgggaggtcttggggtgggcaggaggaagcagagtgcctgtcttcggggctggggttgaggggactcacccctcccctgcttctgcagagacgcctctgagctggagcaaaaaacctccatccccagccctgcccccagagaagggctgagatgacgaccccaaaatggggcaaacaggtctcaccaatatcatgtcccacattctctttttccaaattgcatcacacaaggaccacagaatcaggaagctgaaacttcccagattctagtggggtcccctagaagaaaagcagcccagagtgaggagaagtgctgtgctttcatttcctccctacggccccatcattcagggacccagctttccctggcctacagggcctccccaactcccactgtccagggaggcctctcctgggatcctcagacttcttggtcctcatcctaatgactgtctgcccctctgtctgtgagtctccattttttcctgccttcatccccaatagaacgtccattctctaccctgcagcacaaactgttatcaaggcatgtgcttaaaaccttccaatgtttcccactgcacttagaataaaacccactctctctatgcaatccaca

SEQ ID NO: 1242427 - DNA, 4001 bp, Homo sapiens
gaactgacaagaaggtaaatatcaagctccatgaggacagagaccgggcctgtgcacaacaatatccctgcacctagaagcacatttgccacagacacagagttgatattcaacacatttgtttgtttgtttgtttgtttgtttgttttagagacagggtctcactctgtcacccaggctggagtgcagtggcacaatcgggctcactgtagtctcaacctcctgggcccaagtgatcctcctacttcaacctcccaaagtgctgagattacaagcgtaagccaccgtgcccagcccaacacatttgttaaatgaatgattgagacagagaaataaagacaagttgctccattctatccaggccatccccatctccccagggcccagcagagagccagactcaggacgagtttcctgcctgcactgggccttacctttttgtagatggatgatgtcagggaagttggagagcaggccctggtagagagacagtgtgtccagcatctggaagaggtcattcttgggctgctcagcaaacatctccccgatggcttcataggtacggcccgtgtgagaaatggcactgttgagggcctcagagcaaaagggggggtccatctggaaggaatgactgatggcctggaaggcactgcccagcttctggaattccttgcggaagccccccacatgtttacgcaccagctctgatgccacagtgctgagctgcaggacgctgtcgtccatcttcttactgaaggccttgaaagtgtccacgcgatcttccacgtcctgcaagtcctggtgctcggtggggatctggaaggtgagcaggaagctggcacccaccatctcatccttctccgcccggcgtttgcccatcttccactgcttgtcatccaggcagctgaggaaatgctggaagccttcgtactgggagagcacagggtggctggtcatgtggtccatccagaggatgagtctccgcttccgcttttcgatgaagtcctcctcgaagcggccagtggcctgcttctcaggcaggtggggcaccgagatgacagtgaacttgtgtagcaggcggttatagagccagtcaaagtgtttgtagcgccggtagacgggtgaggcagcatgggtgggtgtgagcttgtaggagatgtagcttttgatgcccttgaatttggtctgttttgtggggtcctccacagagcaggcaaatgggtggggattggccttccactgggggccacgagggcccatttcaatggagtatgtctcagcgatcttggccatcatgggcacatcacccaggatgaaggcctccactccagaacgcacaaagcatgagaaacggttgaggttacggcccaccacactgcctcgcttggcagatgccaggctgtcctgccgctccagtggtggcttgggccggaaggccatgtgctggctggggtaggcaccagggtaggagaggttgaggggagggtgcccgttggtgcccagcccaccagcccgtggctcctccaccactgtgcatccgtcgtcccagtcatcccagtcatcatcatcatcctcctcaaagctaccctggtttgagaggaagccactgcccccaccactcctagctgggctggccacactggggctgttgtacaagctcacctgggctccgggagagcctgcagggctgctggagtagtcagcatggttggtgctgatgccagaacggacgatctccacataagaggcaggaaagagccctgtctccccacggctgttctggccctgcagccagccatccagtgaggtctcgctaaagatgaccaggtcctcatcctgctggatgctgatttcctccttgttctcactgtgaaagtcatagagggctcggcctttcagtgccatggctgggctgggtggtatagaaagatgggaaggagagggtcctgcccagaccggggatgctcacaaggcagtccaagaatgcactcgcagctgaatggcgcttacacagttcaatctctcaggtcctaaggtggggtctcagcacccacagatgctgtccagtctccccctcttcaaagcaatgtccatggcccagaaactgccctatcaggtctccgggcatatgcttgtgagcagggagggctcatgtccacagtctcctcctcccttagcagcctctggggggttagaggggaatctctcctaactcctactcccagaagaaaagtcaagtgacctggagaaatctgccctgcgaggggaaaaattcgacactttccactggaacaacgttctaaaatagaagagactcactctgaaaccaccattccagaaacccgggcagggctcggctgtccctctggctcccagattcttttggcggctctcgctttgggaggctctcacattcctctgcagatctgccccttcctccttcctcctcttgctcctgggccactgggttttcaaaaatccggaaaatccaagaggggcaaggagaaaagcagcagccgcctgaatcgagtccaagggtggatgtgtccggcttcacaacgagccaggccgggaaaacaaggactgaggcttacacaacaggccgccaactcttcgaccccggctgcgcagccggagcccccgccggctcgggcgccctctccccgccccagaagtggccagccccaaccccggaggaaggagggggcgcgacgaggctgtcgggcgacttctagccactcgctgagtggtctcttttgtttgcctaattcctcagcagtttctgagcctgacgctgaccctgctctgaatcccaggaaccccgtccaaaggtaaccccagcagaaaccggttcctcacccgggacttacgacccccgatcaccaccctcgcgtgcacgcacacactcaacagtttggagtttggagagtgagctccggcgagcagatggcgcggccagccgtctgtccgtccgtcctcctctccgccctgcggggcccggccagtggggggcgggctgcgcccccagcctgccttccccggcgctcgcagaccctccgctccgccagcgagaaggcagctccaaaacaaaaaggcgattccgggaggtggcgtcctgaggaaggaggggatcgccaaaggggaggtgaggggtggggagagggaggagggagggggaagcaggctggagaatcgggcaaactccgctgcacttccgtgcgtcccggcggggcagggacggccagctccgccctcccgcgggcccggggcgctgcagccgagcccccgcctactcctccgcgcggcttcccagctggccagcgccctcgctcgctggcgctcagtccgggaggcgagagggaggaaacgacccgggaacgagggggcccgagagcctccggggctggtccctgggaccgccacctcccctcctctccctccgcctgtccgccctcgccgggagacacctcacgcccccgtggttggagcgcccggcgggggagcttgccagctgccgctgcctcgcttcctggactccgtcatcctcctgccttttccgtgacgcaaatggagtaaaactccgaaagtttgcaaagcgtggggctgcaaggagcaccgcgccagagccaggatcgggagatcggggtggggggaggggggtgcgtggaaagccgccgcgccagctggggttggggagcagagtcgcggactcgccttcccaccttcccattccccactcctgctccgcagggacgggtcgtggcgcagctcagagattgttttccggaggaacagaaacggcctgcgcgttccaggcgtctgacctaagataccgagagctgcgggtgcagcaccctagccagacagggcgaccctgccctgggcgactagcttggaaggagggaaagacactactctacatctgcagcgacagggaacaagtctaggtgccacccggttccgtgttgcttagtacagcagcggggactggatgttctgtg

SEQ ID NO: 1242428 - DNA, 4001 bp, Homo sapiens
gttctaatgcaaagctgatgagatcaaggttagttcgctgctgctctaatcttcaaagctttgtctacggaaccatagtagaggtagtctgcctgagcagtggaagaccatgagtttgaggtaagatgaaggagaacttaactgtgtttctgcaccttaggtgcatgacttttaagcaggctctgagcagatagagggccaagggcccctccctgtggcgtcttttctctctgaggcctccatcaaagccctcgggctctgtcataattgttgactttatctgtctgcctccctcagtaaacttgggagcaggggctgtgtcctcctttctgggccctcagcccagtgcctggcacatggcaggcaccctttcatgagtgaatgtttgtggaatgaagtactgagttggaaatcactctgcaagctgggtagagctggaccactttcccttactcataataccatctggcatttgcaacagtaaacactaacagcctcactttaattcaggaccttgggtggaggctccaaagagtggaatgagcactagaatggggagtctgaacatctgagtccttgtcgtggctctgttaactaacaaaacctatcaccttgggtatggtactttcttcaactgaggagatggagagtcagctgggacaagggttctatagaggggcttagagcggcttaaagggagtccttgagcagtctgaaattgttgccaaactcagtctatttgcattctgtggaggggacaccacagattcttaaatagtcaagaactgctaacctggataagcttctgaattactgcagtttacatactgacgcatgtactttgagggaaaagaggtacaggggagcagcagagatggctggcactcatcccacatacccactgccatcccaggcccatctgagagggactttgtcaagggaggcttggcatgactaggctgctgactcagccacttcctaaactttggtgccacaagccagggagcaaaaggcagggtctaaggcagaggacacacatacagaatgctcctaaagggacagaggcacgggattggaaagaaaaactgctggaaagtgaaccagacagggtcttagggagagaaggatccttacagacaagggagctatcaagatccacaagtctggcacaggcaaggggaacagcaggggttctggagatggaggcctagactggaaggaaaggagaaggagctggcacttcctgagcacgtactaagtgctgagtactcttgtgatcatcataatcctgcaagggaggtttatcagtcccaagcaagggagttaaatacaagttctgctgtttctaagtgtcctctggcccccctttctctgctctgcacggtctgccccgataattcagacagccttagcatttcctttggaaaggtcaatgacaagaggctggactatgaatctgcagctggcaaaggagagagaaagcttcattcaaacagtttgcaaccgtcctgggcaccggccacgtgccagccacggggctaggttccgggaggcacacgactagatccctgcccttcgcaacagccactacctgctgcccccacaccccgaggggaaccagctgggatctgggcagccagggcgcttaaggtgcggggccggcgccaggctggaagtgggaagccaggactatggctgggctcagaggagagtgaggcaggatcggtatgcttcccaccctccttcccagcttaccaggcgcaagtcccccggtccgtgcaccaccagggaaaggttgttgggcttggccgccgccgccatggagctcttttggctctggagtgcggcctggaaggcgcgggacgtttggtcgctctggtggcgctacccagccgagggtccagggcactggatggaaggtggggcctgggagaagcgccgcacgcaggggcgggactaggcttcctcctttgtgccagcctgggcggcgctagcgtggaggggcggggcttcccagcctcctccagacccggaggcggggcggggcttcgggagggggctgggagcgagaagcccgggtgctggctccatctgcagcgcgctgttttttttgtttgtttgtttgtttgtcgccgaggctggagtacagtggtgcgatcccggctcactgcaagctctgcctcccgggttcaagccattctcctgcctcagcctcccgaatagctgggactacaggcgcccaccaccacgtatttttgtttagtagagacggggtttcaccgtgttagccaggatggtctcgatatcctgacctcgtgatccacccgcctccgcctcccaaagtgctgggattacaggcgtgagccaccgcgccggccctgcagcgcgctgtttttgccgcctcacatgcaagcacacacggctgccttgaaaaccgcctgcagaggcagtaggcaccagaccagcgctctcaaacgttagctgcagaagaattggggtggggaatgtgaggcgctgttgagaatgcacattctcaggaccagcacagagattctgatacagtaggtctaggtctgaggtgctgcctgagggtccatattcctagcaacgagaatgctgaggctgtgggtggagcacggtgtgcactttgcgagacaggtgctaccatgacgcagcgtccacgtcggccctttgtctccagcccccaggaaagggcctggcacgagtaggagtaaatgaattcgtgcatcattacatgggcctggtgcttaagtataaaaaagacatgaggccgggcgcagtggctcttgcctgtaatcccagcactttgggaagccgaggcaggtggatcacctgaggtcaggagttcgagaccagcctgaccaatatggtgaaaaccccgtctctactaaaaatacaaaaattagccgggcatggtggcatgcgccttaatctcagctactcgggaggctgagacaggagaatagcttgaacctgggaagcagaggttgcagtgagctgagatcatgccattcaacaccagcctgggcaacaagagtgaaaatctgtctttaaaaaaaaaaaagccatgaaatggaatttgtgaacctctttctctcaactggatctgctgcttctattcaaagcagagtttctgcccaaactcttccttcaagcctctcagccctctgagaaacagtgaggttttactctctgaggagagaggcgcttctagataggcctaagtctataaggcccctccctcctttgaggataatgctcaggatttcattcccttacagtcccccctccccaatatgtaaccgcccaatggattcaccttgcctgctgcctagacaaaactaatttatcaagacaggggaactgcaatagggaaagagttcatgcagaaccagctatgcaggagactggaatttcattattgctcaaatccggctccccaagcattcgagcatacggggactcagagtttttaaggatagtttgatgggtggggaaaggccagtgagtcaggagtgctgattgtttgggtcagagatgaaatcataggggatctaagctgtcttcttggactgagtcagtttctgggcgagggccacaaggtcagataagtgagtttatcaatctggttggtgctacgccttgagggaccggtgccagtataggctgtatttgttccttgctgagggccctggttcctctggctaagattaggcctagatatttgacttgttgtaggcagagctgggctttcagtttagacaccttgcccgcttgattacctagaaagttcaagagatctagagtagcctgctggcatgaggcttccaaattggtagccaaaagtaaatcatccagattccgttccaagatggccaaataggaacagctccggtctgcagctcccagtgtgatcgatgcagaagacggtgatttctgcatttccaactgaggtacctggttcatctcattgggactgg

SEQ ID NO: 1242429 - DNA, 4001 bp, Homo sapiens
caaagttctagaagccaggtatagatagctaggtccctgcccttaaggacacaggtactagatagtgcaaggaagaaatccactcaagtcctgaactaactgagctaaaagtgtgtaattatcatttctcttttgaatcctatcacaaaatagaaatatcagtcactaaatttcaaactgttctttagaattcaagtcaatttaggaccaaagcttaaaataggacagctctgaatattcaacctccctgacaactcagggagcagttgtgggtacctcctcaattgtggaataggatgctggtgttatgacaaggaatgaataaatccagaagagttaatgcctgcttccatttagttcttccccaccttctccctttttatttcaacacacttacttcttgaggctatccttctttaaattctcattccaaaaaatgagtttaacacgcttgtaggtgaccaaaattctcttaagaattaacattactgattataggacctgcacaacaaaattaatctgtaatggacacctcgcttcccaaaacaattagactctggggaaacaggtcctgactctcagatcctgactcacaggtcctgacaatttgactctggggaaatacaggtcctgactcacagatcatatatcggcagagaacgtgttctctgcattgcaaagagccccaactccaacctcaccgatgctcaaacctaagaggcaaacgcctccggggcagccaaatggcgccagaagcggccgaggttccaccgacagtgggcaaacccgccaagcccattcacctctcggtcaaatctcccgggcctacgcagcgctgggtctagagcgtccggccggttagtggctcccacaaccacgacctcgcggtccccactggcgccgtccagcagcgtcaacacctgggccactacgcggctctcgggtgctcgactgccccgctggggacacaaggcgtccatctcgtccaggaagaggaggctgggtccgcggctggccagttcccgggcgcgctggaagacccgccgcacgttctcctcggtctccccaggccgggaaccctgcagcgccggggcgctgactgccagcagctccgcgcccgcctcgcgcgccacggcccgcaccagctgggtcttgcccactccggggggccccgccaggagcaccccgcgaggcaccgctaagcccagcgcggtcagggcgcgcgggtagcggagcgggaggcggaggagctcccgcagcgagtcggccgcctccgaaagacctcccaggggcacctcgggctgcggctgggcttccgacggaggctccccgccaaggctgacgcgggtacgaggggtgaccagcccagcgggatcgggactgggcgtcccgccgacgatgtgcaaggcagccaccaggccaggagcgcctggcggagcgaccaccacgtggcccagggagatcggtcggtttctcagcagctcctgtgccgcctccagcaccgcggctgtattccgggcaccgggcgcgcctgcccgctctcgcaacaccggccacacggcgacgcgccgcaggggcggacagggcactaggaggaggcgattcaggctgagactcctccgggatctcgacgccccgaccgccgccccggggctcgcgcacagcgggtccagctgcacaaagccgtccgctccgtcccgccgaggccaggcagtgcagaggcaggagccgccgtcgggtagcgagatcttcactgccgagcccaagcgcgcgcccagggcgtggagggcggccgggcccaggcggcagcgctgggtgccccggtctctagcgtctaagggtagcagctttaagagcggcccttcagggaagggatccgagtccggagccatcgcacacagatgaaccaggcagacgaaaccagattaggaaacccacccggcccacaaaaagcggaacaccgagctcgcaggccggaagcagattgcgcgcatgcgctagggcagactgcgttgctagcagctgagtgaaggccgaaagggccaatggaaacgttagacgacgctcgggcctctgggtagagcgttggtgtccgctttcgtgaaatcgagttgcctaacccagagctttcccgagatggtcttcgttacaggtgtctgggaggcggcttaagctcacttcactaggtcattaagcatgtactttggtggttacatatatcttggaagtcaccggctttacattctgttttcctggccttcgaactggagcatcagtactaccgccgttggaatagcaacctagagactttgctattttgtgaagaaactctaactatccgcatgggcacagaattttgggtgctctggtgcaaatgtctcaggtgacttggcgtaactgagaatacagccttgggaccttcggtaatcggggttccaatctgggaggtccaggcacaacccttcctatgggaaagtaccagcatagtgggagggaagcacacggtagcgcttaaaatcccttgtagagaggaaagaaggaaaactaggctacctgatggatttgtagcacaccaacagtacatttgttctgatttctgatattcttttgaatattctttggcaacaagttaatcactaaagttcatgcgatcaatgcttactgtctaattggggcacaacagtactaagtcctgtattagaggcgatacctatctacgttattaagacaactgcctgctattttttttttccagctgctttctgcctttccctttcgcacagggaattcctttttatcagctggaatacattttctatccctcttaattgccgttaaaaaagaactacagatactcaaagacaagaagatataccttgtttttatttgacttacatcttcctacctctattttccccactttcactgcaacccaaatttgtgagttgacaaaactgatattttagagtgcttaagttgctgggaagttttttttttctatctatgcaaataatcaattacagactgtgtagtaatatcttatcaatgggaagtactgtcagatctgggatcttaagacccatgccagttcctgatctcattctgtccaaacttcatggcagacatgacagacttcttgacttgacagtaacttacctggtctcagctgtacttgtctgcttaaatcgattctggaacaatttaggaatcagaaaatagcaggaggaggtcttgaaatggataagtcacccattacttcctgttttcttttttcctcttaatcccattggcttcagttctttttggtttggggacttttaaataacagctttgcattttttgaaataaaaaaaaagccatcgtttttaccgacccctaaaggtgtgaattacatgcctatcaagttattttatcagaagcctgtacctcatcgagttccttctattcagctccaagaagctttaaggatctgggagagggaaagaagacttactgaggacaggataactgtcttaaatatgtaaagggatctcatgtaaaagagttagtagatttacttatatttacagtgcagaaatggccaagaagtaaaggtttaatggagtggaataaccaaagccaaaacagggagccaataaagttaaatcggcctcaaaattttctgaattggtttaaaacagaggcacaaactatgctattaggaatatgatgagaaggaaactacatgttgcttttggttggtctaagaggttgattttatacaaggtcaaacaagaaccctctgaccttatagaatccatatgcacaggaaatattatttcacttcactctttctctaaaagatccagtctttaccataggttgcaaacaaaagcaacaaggaattctgttactgggccttcagctcttatccactcactctgagcaaaactataaatgtctttcccaatcatccagtaaaatccattctgtccctttaggtctaaccatttgcaacacta

SEQ ID NO: 1242430 - DNA, 4001 bp, Homo sapiens
ttggccttgaatagggaaacgaaaggcaatactggggtttggccttgagtagacatccagaatacaccattccaggactagcataacatactaggctgctgaggatggtctctcttggaggtagttcagaagtgggagagggagctgtggcactggtaggacagaaacttcaaagaccaggtggtggcgtctgatatagagccagctgattgccctttccaggtgagttccaggtggtaagggaaaagggaaaagagaccagttccctgggctgttagctaactccatgatgaccaatggaagagcttcagggtagggacactattgaaaaatcaggaccagcaatatgggtgaaacaggacacttctcctgtttatcttctgaatcagtggggaagcagatggcacccttcgcctttgaaccctttggatccttccgtgagaacagctgttctctgtaaacaaagaaaaagaggataattagaggcagaatggcacacagagaaagacatcccagatgatggagaggaaaacagagagaatgggtgagaaggagaacagtgctccctaaacgttctctcttcgtatacacagaggaaaggttatctggagaacacatttgggtacgtgagtgattgtccaaggcccatccagccactctggggacagcatgcatcgctgttggcacaaacccataacccatgctgaccgagaagctgcagaatgatgctgccattccaaagggacaacaggagagaagttgtgatcaaaggcaaaaatagagacaaaggacaggagcctacctaggataagaaaggccagagtgagcttggagagggcagaggctgaaggaagggaggaggctcagtagtgggcagctgactatgccttgagctatcaccgaagagactcgtctggtttacacttcttaaaggagaatacgcaccatctcaggaaaagggagcaatgagtaaatatgcacgagcagcacttgggagtgaggaagggggcagccaaggcactggagaggctgaactctggatctcctaacaaatgaatggggtcctccgtctcatccctcccaccatccccggcagcacccatccaggttcaggaaatggagaagggaggaagtcaagaaactggagtgttggcttttgaggcacagactcagccctgccacctacttaccttcctttgcaggccacaccgggcccttgaggcctcctgggccacccttgaaaggcctccagccgcagggacatgtcatggcttctgagaaatgtcgcgacgaggttctgcagaagagaacacaggggtgtcaggatgtcccctcagcatcaggagcccacattgagtgagagcctcatagagttggattttgggaaaagctcatctccggcttgagtgggaggtgcctcagggctgggatctcttcatgccatttggggaatctagggtgttttcagctcctttcgccaacccttccagcctccccaagtgcacaggggctgctcctcttgcccttaccacctgcctctcatgcctggccccagccaccggtctgaaggggctctgacaattcacattaagagaattaggaatgctgcaatttcatacctgtcttcccacaaagaaatggtagcctaataggagtcagacctacatctggagttgaaaactgccaagggcaggacatcagatacctaggacaaggcagcctctgaaaagagggggcaatttcctggtagagacaggagttgtcctgggcccctgacatcccagccggggccattcctcatgcccttccttccccgaggcccaggctgccactaaagacaattatcccagaaagacacacaagtggatccctgggcttagcggagatggagcagcctggtctgaacaagatgcatgggctggccttttagacgccccttcttcaggagagtcctgcactcaggaactacatgggagaagtgaagtgggtgctccaaagagcaactgccagcacatgctcggaaccctgtgggctgccccagaagccccaacggacgcaactgccactgggcgggtgggggaggggtggcagcttgggcagccaaggggccccgtctcctacaaacctcctgcacacctggggaaggcagcagctctggggtctgcaggggggcacctcatggttcccaactctcctagaagcaaaaagggattcaaagaggcccacttgataacctgtcaggctgcatagcagtgaggcttcctcctttagtaggttcttgaaattgtatatctatatacaaatagataaatatacatatacaatatacagggtggctgcaggtttgctacaacaaggcagtgggtgaaggtgacgggtgtgcagttgtggactctggaaccccccaaggggctcccctgctggatgcagagctggagcctttgggcggctgaccaagacaaaagggaagagggatgagacagaaagcagggccgcaaggatgcaaggccttgtctactaagtcctgctgtcccatgtaggccatcacccctgacctatctgagcctcagtttctctgaaaggaaaatgggtcatcaagagacaaatacacaagaggaaaggagaaatcatgagggcaaaatgtccagggtgaatggagggaaggaaaaagttacggagatcaagtagaaccacagacaggagagagcctttggcgagacaggggcagagaggtaaaagagaggggaagtgatgggaagccaagaagaattgggtggcaaggaggaggaagctgagagtggaatggtagagacctgggggaggtagaatcaggaaccagggctgaaatgcagaagaaacagcttactggaccagtcagggttggctgggtggacctgggatgtgcaaggtattttctcgttccagtcagaggcaggagacagggagtgaagggcgccagctaaggcaggacaggaggaggacagaaagcccaaagtgtccttctcctgtcccctcatcctctctctctccagccctcccaaaagccttgccccagaaacaagggaatggaacccaggaaggtgaagtagacggatggggtctgggcatcctttccagagagaaatgatagcttaacagtgatcagctgaatggccaggaaacacccccataatggtggagggctgagcatccagtactgtagcctaggggaaggggacaggcttgagatcttcccagactcctcagactctagccgaggtctcctgtccatggaagctcaggtgtgagggagactcagaaatggctcccaggtggagaagatcgggctgcctcctctggggaggtgcttgaagccttgtgggtacagcacagaatagccaggagaggggggtgccaaggcatgcccacctccacaagagcccccgtgaggctgctcccaaaaccctagcaggagcacctccacttttccttcctccaacccccgggggtgggggaactccctttggacccagagaagccctcacatagtcctcctgctggccagctctgctatctcagggcccagtgccctgggagaagatgaaggccatcactgcagatgaaaaccagaatcagacatctggggaagaagtgtgatcccaaggaaggaaataaatggctcccaacgttgctcagtgctcccctactaagcaggagatggatgtaggatttctcttcaggcagggctctggagcatctaactgtggtgttgctgttggatcatgttcacacatgtagagagcctgcagaaaaggattttgtggggaaggtccattaaaacctttctaggtaaatcagagttcaacagacccaaatgccaggcatcctggcatcctggccaggacaccacaccactcacttccctttgcatttccctattgtcactctcgtctgatatttgttcaggaattcacccatctgtaagctcattgctttatcaaatatttgttgagctttgctgg

SEQ ID NO: 1242431 - DNA, 4001 bp, Homo sapiens; identical to SEQ ID NO: 1242242

SEQ ID NO: 1242432 - DNA, 4001 bp, Homo sapiens
aatatacaaaaggttaaactaagatatacttaaaaggtagagtacatcattagcatagggacaatattgccacatggaaagacaggaaattttcaatgcaataaacaagatatatgatgtaatttcaacaatattaaaaagacctatgtactttgaaaaagtaggaagtaaactctaaatactataaacatgcccttatttttaacctatgaagtattttaactgaattaaaattcaattcaactaaaaaagttaaaaagtcctttcttggtcctcctcccctctaatttcatgaactagcatatgaacgccccctttatttcatctcggtcttaccttccctgctgggttctcaaacacctaaagatttcggcttttctttgccccattcctctctttacagagccacattcataggtacttgatactgctaaataaactaatttcccctaaactagtttataaataacttagtttataataagtttataaactaaacgcagagattcctctttcgagcaactagacatcaagggtagagaagacaaacccagaagagttaagcattcactgatgtatcaaatgaatctctaaatgtcaggagctgttagaggagctggagattccaagattaataagacaccttttggctactcatcttaaagaaagagttgtgaaaatacttactattaataattattaaaagaacaggtcaggctcagtggctcacacctgtaatcccaacactttggcagggagaggcgggatcacttgagcccaggagcttgagactagcctaggcaacacagtgagacctcatctctacaaaaactagaaaaattagccaggcctggtggtgcacgcctgtagtcgtagctgctggggaggctgagcccgggaggtcaaggctggctgccgtgaaccgtgactgagccactacactccagcctgggcgacagcgaccttatctttaaaaaaaaaaaaaaaaaaaaaaaagcagcagcccactcaaaacactaagagggcgttcccaaactttatgatgtaaactcttaagtactgaaccaagagttacggaagtacaaagtaatgcattattgtaatcatgtttgtcttccccaaacatgcgcgcctcgcaagaaagaagtgtcttactcaactttttaggcactgctcctatgtaacagcaagcacacaatatttgctgaataaatgaagggacaaactggactctgtccttgaagaagaggactacatgtgaaagaaaacgctattcacttcaaggacatgaaaaaagtatcaggatgattcaaattagagatgatcctcagctggcatctttaactgaaagaaatgggcatgggactcgaccctgtgacagttaatcaacctgtgttgaataatgaaagaatcagcgcctcagctgagacccgttccgggttcgccgcaggtggcaatggagctgggtgccgtctccgcccacccggaacaggagagctgggctgccagaatgcaacgaggcgagcgtttcaggtcgggggaaaggttctgtgaggaaaccacgctcgcctctggggcgtttcctgcagctggcacccttctcccgccacctctatggctgcagggaggcctcggcgtgagcccttggggctcagtcagccgagcctaggctctggactcccccaacggcccaactctccctcagcacttactgccagaaggggccctccaggcagcagcgacccccgccccggctgccaggcgtcaaagaaagcacttggaggctgcccgcagccgtcaggctccccagagcctccggctgtgtgcgcagctgcgcccgggagccgagctgccccatcgcctcggcggggactggcaccaacagcatcggtagaacccgccccatggccgcggtgccccagctaccgccggcggaagcagcactcgcgaccccttcctctgcagccatcttggcccggcggttacttccggtcactttcgccggaacctgactgcgtcgtgggcatgcgcggtgtacgtagcggctcccgctcggcctcgtgactcccgcggagacctctcggctgtctccggtcgattccattcgtttcctgtggggggcagtaccagcctctctagcaaagccacatctgccctgacgccagtcccactctgcttaactgctctggcatgcttgaaggcctagcttagcgtagcaggccgttgcagccgttctcgctctgtggcattgctctttgccttcttggtccagctgcctccagctcccttggaacccagttcctgcctcttttcttcgcttttcttattgtgctgttcgcttacaggctctggggtggtgccatttccttggtagcatggaccgtcttacagtgtggatccatagtaagggtgttgacccgaaatttgaagtcaaataatatccattgtaacagtcagagagacggggtaagtaaggggtggagatggtagagagctcctgtctgttttctcagggaagtatgatccaagatcaagagaaggagaggagcaaagagtttgaggtgagaagaggggttgaataggtattttggtaaagtctcctaaaagacaactgtaccttcttaacacatcttccacattcagaacatttcagcataaatgtaacctctattgacaggcctccccaagccattcaacctaaggtcccttctactgcagtctctcacctagttttgtttttaatcatagtatttatcactacttgatattttctgccagttcctgtccaataagaatgtaaacttcaaaagagcaaggactttgttgctcaccactgtcctggctagtacctaaaacagtgcatgtttcatgaaaggtactcccgcatttgttgatcaatgcatgaccttatttgtcaaaataaaagcaaactttttttttcttttgagatggagtctcgctttgtcactcaggctggagtgcagtggcgggatctcggctcactgcaacctccgcctcctgggctcaagcaattctgcctcagccttcccagtagctgggattacaggcgcacgccacacccagctaaatttttgtattttagtagagacggggtttcaccatgttggccaggctggtttcgaattcctgacctccggtgatttacctgtcccagcctggaagtgctaagattacagacgtgagccaccgtgcccagctgaaaccaaacgttttctatcacaagggagatatattcaaccttctaagcttagctggggctgtgttctttctgtaaaaaatggcaacgttaaagcaatttctaaggttacacttgtgttagctacaacaaagccttgtcccttataatcaggacagtcttctcatgcctgtaaatcccagcactttgggaggccaagttgggaggatcactggagcccacccttgccaacatagggagacccttgtctctacaaaaaaaatcaaaaaaaattttttttgagagttttgctcttgttgtccaggctggagtgcaatggcacagtcttggctcactgcaacctctaacctctgcctcctgggttcaagcgattcccctgcctcagcctccgagtagctgggattacaggcgtgtgccaccatgcctggctgattttgtatttttagtagagacgcggtttcttcacgttggtcaggctgttctcaaactcccgaccctcaggtgatctgcccacctcggcctcccagagtgctgggattacaggcatgagccactgcacctggccaaaaaaaatttttttttaatattagctgggtgtggtgtcacatgcctataatccaagctactcagaagactgaggtgggaggatcacttgagcctggaggtcaatgctgcagtaagccatgatggtggcactgcactcccacatgggtgacagagtaagaccctgtctcaaaaaaaaaaaaaaaaaaaaaaagaaaaaggacattcctggagcactcac

SEQ ID NO: 1242433 - DNA, 4001 bp, Homo sapiens
ttaactgagattgtgaccaaactggtcagtactgaataagaaagaatgtggaccatgagctcaaaactgattttatctctcatgattttgttcttcacaaaaacaaaagcacctgttcatgctggtgggaaaagagccacaatattagccttaatcttgcctaaggaaagccctcttcagggtgtgctgtggactccctgtcttctctggcccttgtgctgctggacaataaaaactgccagttgtggctgggtgcagtggctcacgcctataatcccagcactttgggaggctgaggcaggtggatcacctgaggtcaggagttcgagaccagcctggccaacatggtgcagccccgtctctactaaaaatacaaaattagctaggcgtggtggcacatgcctgtaatcccagctacgcaggaagctgaggcagaagaatcacttgaacccgggaggcagaggttgcggtgagccgagatcacgccattgcactccagcctgggcaacgagagcgaaactccatctcaaaaaaacaaacaaaacagcaacaacaacaaaaacaaattagctgggcgcggtgatgggctcctgtaatcccagctacttaggaggctgaggcaggagaattgcttgaacctgggtggcggaggttgcagtgagctgagatcacaccactgcactccagcctgggcgacagagtgagactctgtctcaaaaaacaaacaaacaaacaaacaaaaaaacctgccagttgtgactatgcccctatccctcatggcttcaacagaacctgccactttaaagtcaacaaaatcacctttatcaatgtttaagtcacataaccagcataattagtcagaggtttctgctactttatttcaatctatagttgatgtgcattgtggaaaatctgtgcttataaatactagccataacaaaatattagaagctgagagtctctgggagatgcaactggctttttaatgcacgtctccatccctcaccacagaagtacacagctatccttttcttagatctcttcaggggagatctatccctcttttcttcattgcattatctctaaaccttacaggaggaaaaggtgcctacctgacatctgtgacatctcttctcatgctcttgggaaaaaagcttttggaatttggacacagctattaagttactcctcagtggccagccgcgatggctcacgcctgtaatctcagccctttgggaggccgaggcgggcggatcacgaggtcaggagatcgaggccatcctggctaacacggtgaaaccccgtctctactaaaaatacaaaaaattagccgggcgtggtggcgggagcctgtagtgccagctactcgggaggctgaggcaggagaatggcgtaaacccagcagacagagcttgcagtgagctgggatggcgccactgcactccagcctgggcgacggagcgagactccgtctcaaaaaaaaaaaaaaaaaaaaagttactccttaatttgttgaatctttgtgccaaaaggagctgaaccagtgtaggtggagacaaaggaagcagcataaatgtctaacttataactccccaggaaaacgagaagaggaaaaatgagacactccggtcccgctctgttcctcatcccccgtttacaaaccttacacctggcccacactcagtaacaacaaagacatctatcactttcaggccgaggtcctgtctccaaaattactggcctctgctcacagttcttaaaagtttgctgagaaaaaaaaaaagaaagaaagaaagaaagaaatgttcctgggctgcagtcgtgtagccccaggatgggtttacaggaggatgccccggttaagccctgtgccgcccccacctcccgctggagactcacacacagctccccgccagtcccaccggtgacagccacacaaaggcagggtcacaagcacaccgaccaccccacagcccagattcggccccagacacacactcacaagggcacgtgatcacgtgcgtggtcacatggaccggcccactcagaacacactcacaaagtcacaccaaccaaggcagccacgcgccacacacacacacctacaaccccgcataccgcacacccagccgcttcccagggcttcgcccaccctcacctgccgtggccgcccccacgtcccttcccctccttcaggaggccgctcttcgctccagtacgagcgcgggccgtggaggcggctgggcccgggtcggggcgggcggcggagcactcgggacccacgggcacagcaggctgcgcggtgcgtgcgggaggccggcctctgagggggcggggcgcgtggccgagcgagcttgggccgccgcgctccccccgcccgaccgccgctcagctggcgcgagactcccgcttccgggttctcagagggcggggccacgtcgcgaggaaggggcggtgctgcgtggccccggcggtcgccacggcgacgggcgcggggggaggctccgtgggatgcttggctgcggctggcgtgaggagagggctgagttacgtctgggtcagccttagttctgccctacgtacctaggaggaggaggaggtggaggaggcgcctggccccttgggacctgcttcttctttcagttcgcgttttctctgtcgtgtacagctttggagggacacctttgggttccagactttgatgaacacaactttgtatactcttttcttaggaacattttttttcctttggcacaaccgtagacgctctccgtagtcctccactcaaagcctccgcttcctttttgacgttctggggatttctgggaacatacgcccacccatcttcctgttccttcatcacttttcccttaaaatcagagagaatattaatacatttgtaatcattgttcttaaggtgttgcagacgtcacgtcttaaggtgttccagacttcacgactccttttttattagtaaaatatttctgaaattatgataaggtgaataacatgtaaatctccttgttttgaattttttttttagggatcctgcaacaaggtcctgttgaaagtgcctctctctaatatgttttagggaaagcttgtaccctgttttagggcctgtagactttgcctttacctaggcaactgtttatgggattaaggtcagggaagattccaactaaattgcatcctacttagttatcacttctgtcccctggcccaggagccttgggttccactctagaacttggacaaatcccaaaagcattttccaaaagcacggtgacatacttacctttttctttctttctttttttctctaaatcatttctttcggggttgcaactcagtcgcaggaattcatcttttattgtaagcaccacatagatgtatagagcacgtttccgtggagtattttaagttgggggccttttctccaacatttggaatcgtttaatgggtggaataacttgcaaactactggttgtctctgaaactggttatggatattcattacattagttgtctattttcccaggtggtctcgaagcttcaatctagagcaaagggaatagagtgattccaccagtccattagcacatgattagcccataaataataggtactaaatgtatattgattgtaatcccagcactttgggaggccaaggtggacggatcgcttgattgagcccaggagttcgagactagcctgggcaacctgggagaccctgtctgtacaaaaaaatacaaaaattagccgggcgtggtggcgcatgcctgtaatccccgctactcaggaggctgagatgggagaatctgttaagcccagatgtcgaatccactgcaccacatcctaggtgacaaagcgagagaccttgtctgctcccaacaaaaaactatattgaatgaattaatgagtggaataaataaatctatccccatttccacatttgttcctaaagctgtattccttagaccccatccctagaccccatt

SEQ ID NO: 1242434 - DNA, 4001 bp, Homo sapiens
tcacttgaacccgggaggcagaggttgcggtgagccgagatcacgccattgcactccagcctgggcaacgagagcgaaactccatctcaaaaaaacaaacaaaacagcaacaacaacaaaaacaaattagctgggcgcggtgatgggctcctgtaatcccagctacttaggaggctgaggcaggagaattgcttgaacctgggtggcggaggttgcagtgagctgagatcacaccactgcactccagcctgggcgacagagtgagactctgtctcaaaaaacaaacaaacaaacaaacaaaaaaacctgccagttgtgactatgcccctatccctcatggcttcaacagaacctgccactttaaagtcaacaaaatcacctttatcaatgtttaagtcacataaccagcataattagtcagaggtttctgctactttatttcaatctatagttgatgtgcattgtggaaaatctgtgcttataaatactagccataacaaaatattagaagctgagagtctctgggagatgcaactggctttttaatgcacgtctccatccctcaccacagaagtacacagctatccttttcttagatctcttcaggggagatctatccctcttttcttcattgcattatctctaaaccttacaggaggaaaaggtgcctacctgacatctgtgacatctcttctcatgctcttgggaaaaaagcttttggaatttggacacagctattaagttactcctcagtggccagccgcgatggctcacgcctgtaatctcagccctttgggaggccgaggcgggcggatcacgaggtcaggagatcgaggccatcctggctaacacggtgaaaccccgtctctactaaaaatacaaaaaattagccgggcgtggtggcgggagcctgtagtgccagctactcgggaggctgaggcaggagaatggcgtaaacccagcagacagagcttgcagtgagctgggatggcgccactgcactccagcctgggcgacggagcgagactccgtctcaaaaaaaaaaaaaaaaaaaaagttactccttaatttgttgaatctttgtgccaaaaggagctgaaccagtgtaggtggagacaaaggaagcagcataaatgtctaacttataactccccaggaaaacgagaagaggaaaaatgagacactccggtcccgctctgttcctcatcccccgtttacaaaccttacacctggcccacactcagtaacaacaaagacatctatcactttcaggccgaggtcctgtctccaaaattactggcctctgctcacagttcttaaaagtttgctgagaaaaaaaaaaagaaagaaagaaagaaagaaatgttcctgggctgcagtcgtgtagccccaggatgggtttacaggaggatgccccggttaagccctgtgccgcccccacctcccgctggagactcacacacagctccccgccagtcccaccggtgacagccacacaaaggcagggtcacaagcacaccgaccaccccacagcccagattcggccccagacacacactcacaagggcacgtgatcacgtgcgtggtcacatggaccggcccactcagaacacactcacaaagtcacaccaaccaaggcagccacgcgccacacacacacacctacaaccccgcataccgcacacccagccgcttcccagggcttcgcccaccctcacctgccgtggccgcccccacgtcccttcccctccttcaggaggccgctcttcgctccagtacgagcgcgggccgtggaggcggctgggcccgggtcggggcgggcggcggagcactcgggacccacgggcacagcaggctgcgcggtgcgtgcgggaggccggcctctgagggggcggggcgcgtggccgagcgagcttgggccgccgcgctccccccgcccgaccgccgctcagctggcgcgagactcccgcttccgggttctcagagggcggggccacgtcgcgaggaaggggcggtgctgcgtggccccggcggtcgccacggcgacgggcgcggggggaggctccgtgggatgcttggctgcggctggcgtgaggagagggctgagttacgtctgggtcagccttagttctgccctacgtacctaggaggaggaggaggtggaggaggcgcctggccccttgggacctgcttcttctttcagttcgcgttttctctgtcgtgtacagctttggagggacacctttgggttccagactttgatgaacacaactttgtatactcttttcttaggaacattttttttcctttggcacaaccgtagacgctctccgtagtcctccactcaaagcctccgcttcctttttgacgttctggggatttctgggaacatacgcccacccatcttcctgttccttcatcacttttcccttaaaatcagagagaatattaatacatttgtaatcattgttcttaaggtgttgcagacgtcacgtcttaaggtgttccagacttcacgactccttttttattagtaaaatatttctgaaattatgataaggtgaataacatgtaaatctccttgttttgaattttttttttagggatcctgcaacaaggtcctgttgaaagtgcctctctctaatatgttttagggaaagcttgtaccctgttttagggcctgtagactttgcctttacctaggcaactgtttatgggattaaggtcagggaagattccaactaaattgcatcctacttagttatcacttctgtcccctggcccaggagccttgggttccactctagaacttggacaaatcccaaaagcattttccaaaagcacggtgacatacttacctttttctttctttctttttttctctaaatcatttctttcggggttgcaactcagtcgcaggaattcatcttttattgtaagcaccacatagatgtatagagcacgtttccgtggagtattttaagttgggggccttttctccaacatttggaatcgtttaatgggtggaataacttgcaaactactggttgtctctgaaactggttatggatattcattacattagttgtctattttcccaggtggtctcgaagcttcaatctagagcaaagggaatagagtgattccaccagtccattagcacatgattagcccataaataataggtactaaatgtatattgattgtaatcccagcactttgggaggccaaggtggacggatcgcttgattgagcccaggagttcgagactagcctgggcaacctgggagaccctgtctgtacaaaaaaatacaaaaattagccgggcgtggtggcgcatgcctgtaatccccgctactcaggaggctgagatgggagaatctgttaagcccagatgtcgaatccactgcaccacatcctaggtgacaaagcgagagaccttgtctgctcccaacaaaaaactatattgaatgaattaatgagtggaataaataaatctatccccatttccacatttgttcctaaagctgtattccttagaccccatccctagaccccatttagtaacagctttaatgagacctaatctatggatatacccgtatgttaaaagtcattgttctgttagtgtggtagtaaactttgacaattgacaataaaaaaaaatcactatgtagatatgttttgttacatatcaacttttattacaatgtagaccaatccaaaaataataaatgttttacttctttcaggaagggaaaccatggtcatgtttgtgtcctcagttgttccataacacatggcaagcacattgtccctttcctaatcccaacaaagaacatttaatatctgtgaattccagctgaattgtaatgcacaaattcaggcagcaaacttttgattcaggcaggtcccagtgcaggctgacctggtagacatggctgtaaggatttgcagctgttgtggctggggtctgccagatggttcccacagcaccaatt

SEQ ID NO: 1242435 - DNA, 4001 bp, Homo sapiens
aagtgggatgactgctagtagcaccctttttggaagttgttgtgatgaggcctgagtgagaggatgtgtggcacagcaatcagtaagctgtaaagtgctcacagaggttatgagaggtgacctacccctgccctggagccccacctggccagaacagcaggtagagagaaagggggaaccaaggctctggactggccctgatcccagcagacagttcagtccggggaagaaagaggaggagccctggcctccgctttgcctttatctatggaagtaaacaaggtttggctaccagattctaagcagggagagccctgtctggctcatgcgcatgcacacacacctgcctggacagctgacatcccttccctactaggtatacataccaacaggctgactcaccccacaaccctcctcatcccccaccccagagcctctaggcttctgtgcctacaacatcacttctctccctttggatcaaccgcagactgggcttgttttctagtctcggatctggcagtcttcctggaccaccaaaaggccaatgcattcctagggggtagagagatgctaagcagtcccaagtccagccagtggaggagactatggccaggctcacctgacagggcatcggtgtgcccagaccagtgcttggccaaggtgcctttctagtcaccagaccatccagacagctcactccttcaatcagcctatcagtgccagaggtcaggagtcctggggacttcctctcccctccagtacacacagcccagagccaaaggcctccctgtgagcaccagcccatcacctctgaacatcctgagttcaggagccagagcctgggccctgccctccctactcatgtcccctttcatttgtttactgtttgtactgcctactaccgatgtgaaggcgatctggctgtgacatctgtcaccccattgatcaccaggcttgattcggctgtactgcctacttctaaggagggcttcaggtagaaataatcccagcactttgggaggccaaggtgggtggatcacctgagttcagaagttcaagaccagcctggccaacatagtgaaaccccgtctgtaccaaaaaaaaaaaaaaaaaaaaaaaaaaaaaaattagccgggtctggtagcgggtgcctgtagttccagctactccggaggctgagacagaagaatcacttgaacgtggaagacggaggttgcagtgagcaaccagagattgcgccattgcactccagcctgggcgacaagagcgagactccgtcgcaaaaaaaaagaaagaaaaagaaaaaaaaaagtgaactctccttaactcctctctgatgttcgtctcccctaggaccccataaccagtcccttttttgagtctctccaaacccatccatcttggcaccctcctcacctccaaagccctgggtccgcagctggcggtaggagcggtacacttccctcgtgaggtagttgatgaagccctccctgggcgcgaacttgcacacgaagttctgctcgtagaggcagttgatgaggaagcaggcggcgatggcgtcctccccgcggtcgggctgcagctccactagcgccaagttgcagttctgggtggtgcagcaggcgcgcacgcagtcccagccccggcgcacggtgggggactccaggaaggtagctccgttgctgaccgaggcgttggtgtccagcacgaagccaggcaccccggcggtaaagctgttcaggcagtcggctcccgcgggcagcccagggggcgcgggcggtggcccggcctgggtgccctggaggccgagcgtgcacagaagccacaaggcgacggcagggatgccggccggggcgaggcgggcgcgggccatcgtcctcgcaggggccatcgccttcctccccaggggggtcaccttcagagcgcgggcctctgggttccgagggtgctggtgacctgagaagaagggaggggacagaggaggagacacacctgatcagcccgggagactttggaggaggcgggccggccgggaggaagtggcggggaggagggaccggagcaccccaggatcgaagagggcgcacgggcccggccctcccacgcgccctccagggacccggcagccagacagacggacaggcggaccgctagggagctcaagtacccggacacacgcacgagcgcagaacaaagggccggacatgctccagcccgctccgcctgcgcctcggccttgcgcgcgggggcccgggttacctgcgcaggtgagttgggtggggccgggtccgccgaggttccggtcccagcttcctgcgcggctcgggtcgcggcttccgacccggtgctcggagagctggggctcggccgccttctccccctggtttctggtgaaactgagtcagcgccgtcggggcggggccgacattcacccttgcgctgccggccccgcccacgcccggtgcgctgcggccgcctctagcgcggagctccaggcccggcccgccccgcggccccgcagccccggtgcctccccggcagccagctccccggaggggctctcgggctccacccagtccagcctcgcgagggagccccgcgcccgaagcgcatacccagccgggaggggatgcggccgggacgcgagggtccggcctctggggcggcggcctccagtcttcctttccggccggggcctgctttcccagccccagacctgaggcccgatgcaaatgatctttccggccctcaggaaatcatttccatttcgtggcgggaaggtaacccaaaagttgcgtggctgcacctgtgataacagggatccgggatgtctgcctcactgtcagctccgggaagccctccctgctgtcagggtgagaaacggaggcgattccccgcgtccaggctcccctgcgtgctccacggggcttccctgttgttcgaggcccctcctcatcttgtatgtacagttcggtccattccctgctatggctcattggactgttgcccccttccctggagcccaggcttcctctctttcacaaaggggacgctgctggctactttcttccagggaaatgtcatccttggaagcctggaggttccagttcaccaagtagctgagttaatgcccttcacgaaacagtggactccttgaagccaagctcattgctcctcctgagtaaaaaactcttaagagaccattctctacggcaagggtctgaacaggtgaaagacagatgaaggcagggctggaggaaggaatcacatagcatgctctcttaaaatacagattccaaaccttttcctgatggcttaacaacccccaaaccaatgggaacattcttcccagtttctcatccagagcagctttgcctagcagatcctgtggccaacccttggattttgctgaactgcaacatcctccagctgctcacatgatgcgtgttggggtgggaatctggggcctgtctccccttctctggatgtttagggtttatccacagaccctggcacactggtggatatacaacaatggtggtatgctgggaatgaagaaaatgattgtgcagtcactgggaagaaagggttttgttgtgatttgatttccccttatggctaacacattcaagaatctttatttatttatttatttatttttttttttttttttttgagacggagtcttgctctgtcacccaggctggagtgcaatggcacgatctcggctcactgcaacctctgccttccagattcaggaaattctgcctcagcctcccaagtagctgggcttacaggtgggcaccaccacgccgagctaatttttgtatttttagtagaaacgaggtttcacctttttggccaggctggtcttgaactcctgacctcaggtgatccacccacctcggcctcccaaagtgctaggattataggcgtgagccactgtgcctgacctcaagaatcttaatacaggaaaatattaccttatggtaatattacat

SEQ ID NO: 1242436 - DNA, 4001 bp, Homo sapiens
ctcaccccacaaccctcctcatcccccaccccagagcctctaggcttctgtgcctacaacatcacttctctccctttggatcaaccgcagactgggcttgttttctagtctcggatctggcagtcttcctggaccaccaaaaggccaatgcattcctagggggtagagagatgctaagcagtcccaagtccagccagtggaggagactatggccaggctcacctgacagggcatcggtgtgcccagaccagtgcttggccaaggtgcctttctagtcaccagaccatccagacagctcactccttcaatcagcctatcagtgccagaggtcaggagtcctggggacttcctctcccctccagtacacacagcccagagccaaaggcctccctgtgagcaccagcccatcacctctgaacatcctgagttcaggagccagagcctgggccctgccctccctactcatgtcccctttcatttgtttactgtttgtactgcctactaccgatgtgaaggcgatctggctgtgacatctgtcaccccattgatcaccaggcttgattcggctgtactgcctacttctaaggagggcttcaggtagaaataatcccagcactttgggaggccaaggtgggtggatcacctgagttcagaagttcaagaccagcctggccaacatagtgaaaccccgtctgtaccaaaaaaaaaaaaaaaaaaaaaaaaaaaaaaattagccgggtctggtagcgggtgcctgtagttccagctactccggaggctgagacagaagaatcacttgaacgtggaagacggaggttgcagtgagcaaccagagattgcgccattgcactccagcctgggcgacaagagcgagactccgtcgcaaaaaaaaagaaagaaaaagaaaaaaaaaagtgaactctccttaactcctctctgatgttcgtctcccctaggaccccataaccagtcccttttttgagtctctccaaacccatccatcttggcaccctcctcacctccaaagccctgggtccgcagctggcggtaggagcggtacacttccctcgtgaggtagttgatgaagccctccctgggcgcgaacttgcacacgaagttctgctcgtagaggcagttgatgaggaagcaggcggcgatggcgtcctccccgcggtcgggctgcagctccactagcgccaagttgcagttctgggtggtgcagcaggcgcgcacgcagtcccagccccggcgcacggtgggggactccaggaaggtagctccgttgctgaccgaggcgttggtgtccagcacgaagccaggcaccccggcggtaaagctgttcaggcagtcggctcccgcgggcagcccagggggcgcgggcggtggcccggcctgggtgccctggaggccgagcgtgcacagaagccacaaggcgacggcagggatgccggccggggcgaggcgggcgcgggccatcgtcctcgcaggggccatcgccttcctccccaggggggtcaccttcagagcgcgggcctctgggttccgagggtgctggtgacctgagaagaagggaggggacagaggaggagacacacctgatcagcccgggagactttggaggaggcgggccggccgggaggaagtggcggggaggagggaccggagcaccccaggatcgaagagggcgcacgggcccggccctcccacgcgccctccagggacccggcagccagacagacggacaggcggaccgctagggagctcaagtacccggacacacgcacgagcgcagaacaaagggccggacatgctccagcccgctccgcctgcgcctcggccttgcgcgcgggggcccgggttacctgcgcaggtgagttgggtggggccgggtccgccgaggttccggtcccagcttcctgcgcggctcgggtcgcggcttccgacccggtgctcggagagctggggctcggccgccttctccccctggtttctggtgaaactgagtcagcgccgtcggggcggggccgacattcacccttgcgctgccggccccgcccacgcccggtgcgctgcggccgcctctagcgcggagctccaggcccggcccgccccgcggccccgcagccccggtgcctccccggcagccagctccccggaggggctctcgggctccacccagtccagcctcgcgagggagccccgcgcccgaagcgcatacccagccgggaggggatgcggccgggacgcgagggtccggcctctggggcggcggcctccagtcttcctttccggccggggcctgctttcccagccccagacctgaggcccgatgcaaatgatctttccggccctcaggaaatcatttccatttcgtggcgggaaggtaacccaaaagttgcgtggctgcacctgtgataacagggatccgggatgtctgcctcactgtcagctccgggaagccctccctgctgtcagggtgagaaacggaggcgattccccgcgtccaggctcccctgcgtgctccacggggcttccctgttgttcgaggcccctcctcatcttgtatgtacagttcggtccattccctgctatggctcattggactgttgcccccttccctggagcccaggcttcctctctttcacaaaggggacgctgctggctactttcttccagggaaatgtcatccttggaagcctggaggttccagttcaccaagtagctgagttaatgcccttcacgaaacagtggactccttgaagccaagctcattgctcctcctgagtaaaaaactcttaagagaccattctctacggcaagggtctgaacaggtgaaagacagatgaaggcagggctggaggaaggaatcacatagcatgctctcttaaaatacagattccaaaccttttcctgatggcttaacaacccccaaaccaatgggaacattcttcccagtttctcatccagagcagctttgcctagcagatcctgtggccaacccttggattttgctgaactgcaacatcctccagctgctcacatgatgcgtgttggggtgggaatctggggcctgtctccccttctctggatgtttagggtttatccacagaccctggcacactggtggatatacaacaatggtggtatgctgggaatgaagaaaatgattgtgcagtcactgggaagaaagggttttgttgtgatttgatttccccttatggctaacacattcaagaatctttatttatttatttatttatttttttttttttttttttgagacggagtcttgctctgtcacccaggctggagtgcaatggcacgatctcggctcactgcaacctctgccttccagattcaggaaattctgcctcagcctcccaagtagctgggcttacaggtgggcaccaccacgccgagctaatttttgtatttttagtagaaacgaggtttcacctttttggccaggctggtcttgaactcctgacctcaggtgatccacccacctcggcctcccaaagtgctaggattataggcgtgagccactgtgcctgacctcaagaatcttaatacaggaaaatattaccttatggtaatattacatcaccataaatttatcattacatccattatacacaccattataaaaaccaacatgaattcagcactgacaatgcccaaactctgttcctaagcactgcccacatattaccctatactcaaaacaaacctagggaggtagtatttttagccccattttacaaatgagcaaacaggctcagacaggtaaactgacttgtcaggtcattcagcattgaagcggcagagtagggattggagcccaggcaggccaattccatggcttcagtgcttaaaccctgggctttatggcctttgcaattctgacttcatctggaagttctgccctcacctcagattcaacttgcttaaacccataactcactttcaagtggtgagcacccaccatttgttgagatgcc

SEQ ID NO: 1242437 - DNA, 4001 bp, Homo sapiens
tagtgaaacccccatctctactaaaaatacaaaaattagctgggcatggtggtgcttgcctgtgatcccagctactcgggaggctgaggcaggagaattgcttgaacctgggaggcggaggttgcagtgagccgagatcgcgccactgcactccagcctgggcgacagagtgagactccgtctcgaaaaaaacaaaaacaacaacaaaaaaaggcctaaaatccagaacgtgggagacagcctagatacaatttagaacagggatgatctttagatttgtgaaggctatgaaatcaaatgacaagtctacttaagtagagttttctggtgagagggctcagggcctttaataagaatttcaatgtgagtttatgaggaactgatgtatcactaagctattaatttatgttgagaagggattagtacgaatgtgatattcattcttaaaatcagctcaagagattcaaatgaaaatgaatgcaaaaacactttgaaaagttttatatctaggttatagttttgcatacatctacatactatctgaatatcttttggacataagtattatctgtctgattacacagtaaacaccttaaagactccgactaacactgctactttgttgctctttttatatcgaactcccctcccccagcaatttttagatacattctctcaggttcctgatgttgcctgtcaaagttatgaatacaccaaaaggcacttactttttggcttagattttggtttttcaataaatattaaagacacttttgtattcactaatactaaccccttaaactggagagtcagcaaaacagtctttcaaagaaatcacacattctaatagaacgaaacaagcttacacgacaccaattctgtaataaataacatgcgtaagtttccaacctgaaactccctaagtaaaagtcactagaaacaaaaactgaaacaccgggttcctgacaccccactcccacactgaagctcgaattacttgaggctgaattttaaaacactattacttctctgtgactatgaaaacaaatctatgaacacatatttcttacttacatttaaccgacgctccccacccatccctttaaattaggcagaaaactgaaaaccactaaaagcattacattttggtgtcttcttttaaaagttattttaaattactgctattaaaaccccccctccaaaaaaaaaaaaccctcataacagaatcaaatgagccctaaggcgaagcaggagctacagtgggggaagggaattttaaaaagacatccgtgttagtgcaattaaagtgcagtcctcgaaccgctaaacatactggcgccttgtataatttttttttcttcccaagggtaaaaagcggtaagaaaggcttagacaataaaacccagaggtcaattttaaatatgctgggacagtgagcaactatcgagaagcatcaaggtcaacgcaacctaaggggctcctctgatctttttgcggtaggtatttcgccagacttcaatgggcgggaaccgagtggggggcgggaaagttgggggaaagagggtggaaaagaggagggtggaaggaaagagatgagtaatggaaagaggaggggaggaaagaggagtgcgagagcaggccgcggaggtgcgggcagaggggaggccgggcgaggagtaggggaagggagccccggccttggccccggccccgcccagcccctgggaggcctgcgcgccttcccgcccccttaccagctggagcaggaagccccagagtagggcggccccggcaggggacagccgccgctgcggccccatcggactggtgggtgccgggtgggacggcacggtgcggcgcagctcactcggcggggtaggctcggagtcccgccgctgcgctgcctccgtggccggaccggaccggacaggcgcgggcggccgggctacgactggaccgccgctgctacagcggccgccacagcagcgcgacttcctcttccggccccgcccgtaagatgcggaaacccccgcgccgggctcggagagtcccagcgctctcccggtatccaggcgtcccggcgtcccggcgctacgaggccaccggctgcgggtctgagcctgtcgctttccggctgcccgactttaactcacaccgaagcctggcgggagaacggatttctcaaggctcggaagtgtctgagcgtctgctcggttccccagtaactacccgagtgttgcatgcagccagaaatctaagggtcaccctaattcatctgcctgtcatttgttcctggccactctgactcaccacataacccagatccatccactttctccagaactgctgccaccactctatccaggccaccaacttccctctcctccaaacgggtctcagtttcccctccggacagcccagtagccacataacagtcccagagccatctttcaaaacatataagtcagatcatgtctctctctatcacacttggaataaaataaaaacttggccgggtgtgatggctcacacctgtaataccagcatttggatggccgaggtgggcggatcacaaggtcaagaaatcgagaccatcctggccaacatggtggaaccaagtctgtactaaaaatacaaaaaattagctgggcgtggtggcacgcacctgtcgtcccagctactcgggaggcggaggcagtagaatcgcttgaaccgggtaggcggaggttgcagtgagccgagattgtgccactgcactccaacctgggcgacagagcgagactcggtctccaaaaaaaaaaaaaaaaaaaaatcaaaactctactctagcctgcaaaggtaaatctggcccctgccttcctgtctccccatcttcactactttcccacactttaaggcgcacggacctttggccctcccggcctttgctctggtgggccgcccggactttgctctggtagtcctccctgctggagtgctcttctctccaaagctcagaatgcctgccttgttgacattcacttatcagcttcaatgtcgcttccccagacgggacttcctgacatacccaatctaaagtacctgtccagtcactttcttttcttttcctttctcttttttttttttttttttttttgagacggagtttcgcttttcttgcccaggccggagtgcgatggtgcaatctcggcacactgcaacctccgcctcccaggttcaagcaattctcctgcctcagcctccccagtagctgggattacaggcgcgtgccaccacacccggctaattttgtatttttagtagagacggggtttcaccatgttggtcaggctggtctcaaactctcgacctcaggtgatccacccgctttggcctcccaaagtgttgggattacaggcatgagccaccgcacccggcctgtccagtcactttcatattattgtttattttaattatctgcacagcacttttcattctatgtataggttcatttatttatgccacctcccacttcatagcaaggggtgtctttgctttgttgactgctataccctttacatctacagtatttggcatatagtaggtcctcagatatttgttggatgaatatttaatatcaaatgctgaataggacagtgtgcctgccaccccacagctcatagtttaacgagggacacagatgtgtgagcaaacacagttcagggtgagtagtgactcttgtttgcacaagatgttatggaagtatcaaaaggagttataaaaggggtgccaggaaaaataccagcctgagctgagtctgggtgagttaattttagccaggcaaagggtagaagaaggggggcacttccaggaagagtgagccattagtgtcaaagccaaaggtggcattgaaggaactgcaaaacttgggcttggctgaagttatgagtggtgaaagatgacatgtgagaagaggccagaggcaaaatcataaatacattgggactgtttgtgactttggg

SEQ ID NO: 1242438 - DNA, 4001 bp, Homo sapiens
gagatagacttcttgatctccctcaaagtaggtctaatctgcagaaggcagggagagactgtactgcactctgaatggacagccaggtattttatgaatggaggcgatcacgtgatcccagcacctccccgaactgatatttcccacataactgtgtcaacattctcagaacaggggtagttgtttgtgtgtgcgtatgtttttaaatttaacctaaaatttcacattcttcttaccttctgaactcaaaaatctacacacagacaaataagccgcgaattttttttcttgggaaatcctttcaagatgtccaaggtgatggatgtttaattattttttttatgaatgaagagtgtgctatgcaaatgagggcgattcacaaaaagagacagaacatggctgccacttctgcttctacactgcactgacactgcagcaatgtacctccttctacacccgctcagcagaagcgtgtgttttggggtggggagggagtaagggaggaggaaatgttgtttggcctttctctagctattttacgttaaacaggactcggtacagactttaaaaagttatttcaaaaaggtctgactttagtaatgcactgtatttaaaggaatgcatccaaatgactaagtcctaactcacttaactctttccaaccctccgaagataaacaaaagttgaacttaattacaagaaaacggatgctaatattctgcttggaattaaatcccttctcaatagaaaagtgttgccaaccattatttctccacgcagctgtcacgttaaagcaaaacatttaaaagacgaagtatttcgtttggaaagcaaggagaaagcccaaataagctaaaacttaaaccggaatgctctaaaagttaatgaaatcaccaacatattcagcaatgtaaattcggttacatcaacgtaaatcatgtgttttcacatagctgaaaggtaaaaattagcattcaaaattcttctccgttcctgaagacacgtccaatattcacaaaggtaaactctagctcaacatcgcccacactccaggtgtccttaatcctattaaattctaaaaatgtttccctaaccctattttttacaagaatcttacaggtcataagtttaaaagggggaggggggagagggtgaaggcttaatcggtatttaagagtcactgactcatcgaattaagattcaagagcagtttgctgcaggaggtgctcccacacattagtttccaagtgaaacagctataaaggaagtaggatggatactgaaggtatggtgactggtatgtgagtgaaaaaggacgggacaggggtctcacaggcaaaggggtagtttctactccacttccatccatccacattattccctctcatagacgtacaattgccatcctctcccaacacttaatcccctaccccaaaagaaagcagctaaatgtgggaggatggggaggggtgctgccactaaaaatggctaaagaaatcagctatctccagaagatgcaccgaactctccagggtcgcaagctttccggcacccaagtttcggatgggtctgggggagagccgagggcggatagggggagggggattagcaatcgagatcaatgaggcgcttactcgttgtcagaagtcgccgtctcctcgctcatctttccctcaccgtgatccgatctggagatggaggagcaacagcaggcgggggagcaacagcagcaccgaggggcaggaggcagcggcggccgggggggcgcgggggcagcggcacaggggcctcaccatggtggatgcctcacccagaacggtacccccccagccgggaaccccggccacccccgcaggggggtggcggcagcaacctccgccgtggcgaccccagcctcttcccccgcctcagtgcccagccaagggatccgaggaggcccggtggaaagggaaaaagagaggggctgcaaaggctgactggagagctgctcctccagccactggggtggagcgcagcggggtccggccaggaaggagtcggcgggcggagaacccgggagcagaggcggcgcttccctcagggatgcggcgaggaggaagcagagctccgctcggtgggggccggcgggggggtgccgagcccaggctccgggcagcggcggcgcggtcctgccggagcccaccccaccatctcccgcctcgccgccggctgcccctcaacccccggcggcgtctgggtcggtcctcaggcgccggcagagcagggctaggggccccgcggcggcggattcctccagacacgctccagccgggactcctcctcaggggggtggagggggcggcggggagcgtgtgaggcgaggggcaggcaaaccgatcgttcccacccggccggagaagagcgggcgggcccgggtccggggggcaggatcccgagaagcggcgggagaggacaagagcggctgcaggttccccgccagccagtgcccaccagcagctcagcgggccagctcctcacgcccgagagaggggagccgcgaggggggcggcggaagcgctcacgccgcccgctccttccgccgccgcagccgctgcccgaaccgggggcgcccgcgagagaaggaggcgaagtagtccctcgcgacttctcccggccgcccgctttccccggaggccagagcgggcgcggggtggggctgccgagcggggtgcccaggctgtgagggtgtgtgggtaggactaaaagccgcggcctccgggcgaatcactgcaactcgaagtcatgtgcagcatagcaagtttcaggaaagtagttccctcctcccttcatttcccaaatcgttgtcgagccacttagcggagaaagggggagggaggcggagggatatcctccctgcaccgtgctcggtgtgcgtgcgcgcgctccaaactcttggcacgccgcgaaagggggcgggggtgggagctgcgaggggagctgctagggaggttgcattgttgtggcgcgttactccccgttactctgcttggaatatccgggttgcttgaacgaagaggctagaaagacagtgtgctcagaggggaaatctggaggctactctcttctgccgtgtgtgtgtgtgtgtgtgtgtgtgtgtgtgtgtgtgtgtgtgtgttttctttgcagagcaaagaatggaactggcatgagttcatctttagttagtgggggttagaagcagggactgcaaagagagctcctcctgctgtccccctggttgcactgctgcagtcccctagctgcatgcacgaagtgtatgtgtgtgtgtgtgtgtgtgtgtgtgtgtgtgagagagagagagagagaatatgagaatgtatgtgtgttttaacacctcgcctcgctgcctggattcttactgcgcaaggggtatgctatcagggcattcatctcggaaagctggagtgattgttaatggagaacgacttccattgaagcccagggtaggcgtgttacatgaatctggcgcagccagaacggaggaaataactcccgctgcgagtgaggttgcataactatagcgcaggagatgcttctgtggcacgaactgctctgaacggaggcggaccgattggatagacagctgtcacgaatgcattgttagaagacaaagtatgcattcatctcaaaagatttttgcacagaaacctactggggttgcgggctggagcctaaggtcagcccagccacaggagtcagagctcctggctctgcaaattctattatctgttctccacttagaaaaccagcctgtacatgaaccaccttaggggactgaatcccaagtgctcccaagttcctgacgcatcttcccagatataagtctcgccctgcgtgcaatgtttttctcttccttctcagatttgtgcgacctaagaatgaaggttgccgctggtgccacattaaagagaacaattcccgaggaaaaaaagaagttgggagaacctcgttaacaaggcagc

SEQ ID NO: 1242439 - DNA, 4001 bp, Homo sapiens
cactcccattccctttgcttgggcttctcccctccctggctttcctccaacacaccccaggaggctggatgtaagctccactccaggatatagtgataggcacgcacagtcaggctccatccagccaggcccagctcagtgacttcacagcctccagggacagccacctccaggagcccttggccttcacagttcccggtttccaatgatccctttgccccaccccacccctgcaccagcccctcaccctggccatgagggtccctctgtccctggagctccggcctccttttagtgcccatctccttagcctgtccctttctttcaggtgactctgcctccccccatttgctgaggcctcctccctccttctccaagacaggccctgctcctcttccccacctgccgtcttagtcccacatctgggctctgttggctggttaaccatcgatcttgcctggtaaataattcagggcctctgtttcctcatctgtgaaatgaaaagcctaagagaacgctaagattcttttggcctagaatcctgtgagtctctcttatgacagacagtgacattttccaccccagtagggacctggattgctactgccatggccagctgggtgctctccaagtcaggggtgctgtgcgaggagggcgtggcttctgctcctctgtgtcccagccactcctcctgtactcaggccccagctcctctgttctgcccagtggcctggcgcaggaaaggtgacccagtagttcagcctgtcccagctgcctgccccagcaccatcccagacccctttccctggggcccaccttggccctgaggaaggccagagctcggctgctgttctccaggaagtgcacacgcaggcggccccggctcgggggtggcagggcctcccctgagatgagctccagcagccgcaggaggtggatgccgtcagccagctctgtgtacaggttccggatcttgatgcccgcctggggaggggacaggggtaagtatggggtcagcccagcctcacctgtcctcccatcctgggacctgagaggtacgacccagagcagctgctttggaagaaggagctctggcctcagcttggcctcaggcagatgaccccacagctcaccccggaggcccactggccagagctgggggcctggtatgggtgggctgtgggtcacagctggctatactcacctggccgcactggaagacgttattgatccacttggtgaaagtcttctcctgcatctgcatgtgccgggcctgtagcttgcgaatgtggcccgtctcgtactgagagtccatggtgagacttggactgggcgggacccggagttctgtgctgggcctcctgctgcggtgccctgcagccccgaggagctcccggggactgtggggctgaccagccatcagccctgcagactttggggatgaggagctgctggatggctccctaaacctggagggcatgcagattaggggatgatgtgaatggagatggcccctctaccaggggcctggggtcccgccttgccagactgtcctcacatttcatgggggttgcagcttggagcccagccaggtaagggccagtgcttctggtcccctgtgcttgaatggcccagggccccctttgccccaccccaccttccagattcttcttctcagagcccctgctgccaggtccctccaccacagtgactgggacaggtggaaggaagacaggaaactgcttaccttggtgatgcctgggtcccacagagacggctctgctggacggatggagatggtagatagcaggggctgcttaccttggtgatgcctgggttccacagaggcggcccagctggacggatggagatggcagatagcaggggctgtggagggagggagagggacatcaggagaggccaaggctggagcagggctgcaccacagccctccccttgagccagcgtgctggggtgacggcacacaggcggcattgtcctcccacctgccacagggcgtggcccagacagggagggggtggttcaggaatgctccagggccattgccagatgatgtcctccttcatcatcctcccttccccgccagcaacttctccaactccaggtgggggtcctggctcccaggacgcagaggcccatggagcggccctgccaccgcatggggtgctgcagtctgcgtaggaggtaccaaagggcagagcctctgtgggaagcctgtggacgcacttcccaatctgagactgccctctgtaccctcttggggcctctctgtgagcacccagggcgaggggatgagggagcgtcctgggccgtggtcttctcattcacccccagggaacagcccatagactgagggcctcacagaccctgggcttggctttccaggccctgccagagtgcagcctgcctagcccggggctgaagggtaggctccctggaggaaggggtgacctggaactgcgagggctgtggagtctcctccaaaattagagacacggtgttaactctgggctccacagagctggccgtggcccggggctcggaggcaggggtgcagagggagctggtgggcgcccatcccttcctccccgagcagccgtggactacatgccagagtgaaggcgagttctaattctgggggtctcacccgcctctggctaaactcagggtagcagtgtgggctggggtgtgtgtgtgtgggtgtcttccagcggccctggagcctctgaagcgacagcccgctcctcagggaggcgctcctggcagccacagcccacagcaggacagccgctcagcgcgcccttgagagctgggctagggatgagtcacacttgaaccgcctgggcccactgcaggcagtcaggggtgacgctgagaggtgccgtggtctcgggtggggtgcggcttcctgcgtctgagagacgcttcctctcctgctgtcctctccctgccaggccccttctgcagcggctggcttccagacaccctgcgtccctcccttgctcgcagcagttgctgtggcggtcctcccgtgcacccccccttctgccctcactgcccctgggggtcctcatcacggaccccctaactcggcatcctggacaccaccaccccgcacctttccacagtgcagctctgctcgtgcctgtgaagcctcccacagcctgggaaggaaaatccagacttgccagaccttgcctcagccaggccttggaagcctgccagcttacctaaccaggctagtctgcccccctcactctgggtgctctccatgggccactcaccatttcctgagcaggaccagagctctcctgccccaaggctgggcttcagctgctctttcagctttgaacgtcctttcccattctccatcatccacattcacctatcctgcctgccccagttaaaatcctgtttcttctaggaagtccctcatcccacccgcttaccccagggagactgagcttgttccttctcctagtaagaccctcagcccatggagtcctgtgtgatgttgtgagcgtgggaggacagactgaactgctcggcccgtggagtcctgtgtgatgttgtgagcggggaggacagactgaactgcgtggtgcttcgcacatagacctcaacagggattggcattttgaagctgttggcgggggctgtggactgcttttcttcctttctagctcaacggcagctaaagccactgcatacaatgcaaggactggctcctgtttggccacgactgattgcagcccctggtgaaatgagaaccctgtgggtcggaacaaagtttggattatttatgttgcaagtaactaaaatctcaagtgaaactggtttaaacattatatttttattatttatttatttatatttaattcttttttagagacagggtcttcttaggttgcccaggctggtcttgaactcctggcctcaacgatcttcccacttcagcctcctgcattgctgggattata

SEQ ID NO: 1242440 - DNA, 4001 bp, Homo sapiens
ttttttgggtttttttttttttaattgagacagggtctcactctgctacccaggtttgagtgcaatggtgcgataacagcttcctgcagccttgacctctggagcttaaacagtcctcctacctcagcctcccaaataactgagaccacaggcatgtgccaccatgcccaactaatttttttctaaatttatttattttttttttttgtagagatggagatctcactacattgcctaggctggtcttgaactcctgggctcaagccatcctcccgcctcagcctctcaaggtactgggattagaggagtgggccaccatgactggccaggacagttcattgttatatggccctgttcacatagcaagggaggttggcttccttggttcccactctctaaatgccaatagactctctcccaaatttatgacaaataaaaagtcccctcctatatttccaaaatgcttcaccccacttcccagtcccatcaccctccacatccaagccaagaagccctggtttaaatgggaaggatgcaggcgggaaggagtcacaggagatgtgctgcctgctgggtggtttgagattgatggctgtggaaccagattcagagttaagaaacatgtcctgggctgggtgcggtggctcgtgcctgtaatcctagcactttgggaggctgtggcaggcagatcacgaggtcaggagttcgagaccagcctggccagcatgatgaaaccccgtctctactaaaaatacaaaaaaattagccgggcattgtggcacgtgcctgtagtcccagctactcgggaggctgaggcaggagaattgcttgaacccagcaggcggaggttgcagtgagccaagatcgtgccactgcactccagcctgggcaacagagcgagactccatcaaaaaaggaaggaaggaaggagggagggagggagggagggaggggaggggagggggagggaaatgtcctgagcatatcccacatgctgagatcctccagtgtatgtattctactatctcactcaagagccctccttccaatgcaaaagagaatacttcaaaggagaacagaagttgtaacttgcccatcagacaaggaaggggactgagagttgactcacttactcatgcagtcattctttcatctggtggatattctctgagtccttgccttctgtgtccagcaagccctgtgcccgctgtctaggcatacactgttgaaaaaaatcagacttgattcctacccatgtgaagtttgcgaggaatgaaagtgcacttggggatatgggaaactgaaagaagtatcattaaaggatgggaagaagaagtgataggaggagctagcactaagaggaacacaccccaattcaagaacatccgggagaaggaaaataaatccaaatcagggctctgggaagatttgcagacacgtgggcaggaagggctggcaacaggaatgggtggaaatagagaatggaacagtgaaagggatccttatcacaagaaagggaaggctcaggaggaagatcagagcaaagaggctgatcctccagtactgtctttcctgcccgatcagcaagccccaccctcatcccttccctgctgcaaatgcttcctggatgagtagctagagaaacaactcataccctagcctccccagcaaaccctccctagctgggacagtaacccagccaaggcttcacagctaagcaatgagacttgtgggagagctgggaatgagttcttgctatgcatcagggagcaagcatcacatggtgtttcatcctgccaagccacagggcagtctcagaaccagataggcagatgaacaggttgtattaatttgttttcacactgctgataaagacatacccaagactgggaagaaaaagaagtttaattggacttacagtaccatgtggctggggaggcctcagaatcatggagggaggcgaaaggcgcttcttacatggtggcggcaagagaaaatgaggaagaagcaaaagcagaaacccctaataaacccatcagatctcgtgagactaactcactatcatgagaatagcacttgagagaccagcacccataattcaattacctcaccctgagtccgtcccacaacacctaggaattctgggagatacaattcaagttgatatttgggtggggacacagccaaaccatattacagggcaatacttgggtttcatgcctcgtttttaaaagacagccccaacacctcccaaacatgctgttttcctcacagctaatctgcttatcaaataataactaaaactacatcagtctacagggtagctggagtaacctcatctgtgtcattgaaggtcaagttgttgttgttttcagacaagaagcactaatgtatatggaggttctatctcaatcagcattatcggttgcaagaaagaaaccagctctggatgccttaagtagaaaagggacattaggctgggcacagtggctcacgcctgtaatcccagcactttgggaggccaaggcaggtggatcacgaggtcaggagatcaccaccagcctggccaagatggtgaaaccccgtctctactaaaaatacaaaaattagccaggtgcagtggcaggtgcctgtaatcccagctgctcgggaggctgaggcagagaactgcctgaacccagaggttgaggttgcagtgagctgaaatcgtgccactgcactccagcctgggcaacagagcgagattctgtctcaaaaaaaagaaaaagaagaaaagggacattaaaaggctctcagggattcacagaaccattaaaatgatgggtaatgatgggaggagaagtgcacaggaatgaggacagctgtggataatcaaaaagcagaatgtccaccttcttttagtagaaacagcctggctacccccaggatgctcccatgtcatcacaaattactgtagaatgaacgacacaaatataaagagagtgagagtgaaaattctcagtgggagtttccaattgaccaactgtatgtcaaaggccagcattgtagctgtcagagcagggagaatatacttggcccccttacttctgccagaactattatgatgggtattccttcaaaaaatggaaagggggattgaatactggcagcagcagatggggaaagaaagatgtctactataggctccacaaatataagatcttcttatcatatacttttttctacatatataaacaaagtggtataatagtgaaaattggctggacacagtggttcatgcctgtaatcccagcatttttggaggccaaggtaggcacatcacttgaggtcaggagttcaagaccagcctgagcaacatgatgaaaccctgcctctactaaaaatacaaaaaaaaaaaaaaaattgccaggtatggtgtcacatgcctgtaatcccagctactcaggaggctgaggcatgagaatcacttgaacctgggaggcataggttgcagtaaaccgagatcgtgccactgcactccagccggggcaacagagccagactttgtctcaataataataataataataataatactcagtcctagagccacaaaaggttctgctaaataaatgtatactagagtgcgggagggcagggaggggtgtggctcaggcaggcttagactctacccagaaaggtctcctaggacataagaaaagtactggatctaacatcaagtctttctcagaaatctggtctcaaatcgcgtttggggcaattctttacacctgaattttgtcatcgttaaaatggagataaggccaagtgtggtggctcatgcctgtaatcccagtactttgtgaggccaaggctggtgtatcgcttgagctcaggagtttgagaccagcctgggcaacaaaatgagaccctgtctctacaaaaaaatgcaaaaattagccaggtatagtggcatgtgcctgtggttccagctactcatgaggctgaggtgggagctggct

SEQ ID NO: 1242441 - DNA, 4001 bp, Homo sapiens
aatactaagactttgtcaccaatagaaatcacagatattggccgtgcgcagtggctcatgcctgtaatcccagaactttgggagtccaaggtgggcgtatcacaaggtcaagagatcgagaccatcctggacaatatggtgaaatcctgtctctactaaaaatacaaaaattagctgggtgtggtggcacacacctgtagtcccatctactcgggaggctgaggcaggagaatcacttgaacccagcaggcggaggttgcattgaaccgagatcgcgccactgcactccagcctggtgacagagtgagactccgtctcaaaaaaaaaaaaaaaagaagaaagaaattacagatattttcttatattacaagtattacctatatcttgaaataattgtttatgttctttactacttcaaaattatggtaactatttaatccactgctagatcttgttatttaataaccttgttattaaataacgcattcgttttttaaagacatatatattaccatatcataaattcttttaatgttttgacatgtgttttgcaattggtttcctttataatactcttccttttgttttatacctttaaaaaagcattgttctggtccagcgcggtggctcactcgtgtaatcccagcactttggaaggccgaagtgtgcggatcatttgaggccaggagttcgagaccagctgggcaacatggtgaaacccgcctctactacaaatactaaaattagccaggtgtgctgcgcctgtaatcccagttactcggcaggctgaggcaggagaatcgcttgaacccgggaggtggaggtggcagtgagccgagatcgcgccactgcactccagcttgggcgacagagcaagactctgtctcaaaaaaaagtattgttctgagagtctttagccttcccagaaatgccaaaggggtgcacagcacaaaaatggaacagagccctgcattatagcaatgggcagcgcaggcaaagccaggggctctgttcagcgtctttgagcaaaaagccaggttggaattttgataaataaaagagacagatgaagaggaaaggaaatgagcccagattccaccagaagaccccttctccctttccaccaattcctgttcagcaggtgccctaaatcctctccccttcaggtttcagctgcagccgacccctcgagcgccccctctgtcccacgcgcagtgtcggtggatgactgtgtcaatccctggcccccggacgccgagcacccactcccgctccaggacggtgccgagtgacagtcaacaggtggaaggcgccagaaacgtccacacaccaagaccacggatacttcggtttttaagcacccctcgcgggttggcctctccgcggccctgaggctctgacactctgagaaggaagcaagagtcccaagacccgggttccagacaagggcagcaagagctgcaggtgtccggagttgaggaagcaaagtttggggcgcggcgcaccgggtctgcggagtcccagctgcggaaaccgagttaagctaacaaacagcctcagtggtggtcgctgtccccgcccagtctccctccgctggcccagggccaaagatcggccgcggatgcctcttacccgggcgtgagcggagccttcggtcactgcgttggcgcagcaaaaaccttcgctcccttctgggtctcaaggcctggactggggccccgcccgcctgccatccgggcggaggctggaggcggggaaagcgaggctccccccaggaaaggtcccgaaaagtcccgccgtgccccgcccggcgccgcagcccaggcaccatggtcagtgaacacaccagggcgttgagcgctcacggggcacagaaccaggaacaagcgtccatccggcctggggtgctgccggctggacagactcgccccttgcgcgccctgaagggcggccccgcaggctggggcgcacaggcggaggacaccgaggccacctgacgcttccgcccctgggtgccaacagcgttttgtaatcagggcaggcaaaagcggaggcggggcgctgtgcagagaggctctggctgttcccactgggtcctcctatgtgccctgggcttctcaccgggttcacacagctgcccagaaacacaggtattcccgcgctcatttcacagagaaggtgaccgaggttcagctttggtgtgcgctggagcccttccttcaaaacgcgcaggcaggggtaagctggcttccagccactggcctccacagtgtcccatcccatattcatgactggacattttcagttggcggctctttccaggttgatgtaaagtctcagtgagtggttctccaccatatcagattcagtaaccctttttacaataaatacagggtgtcccaaaagtctcataacctgagaagtgcaagtgctagaagctttcaaaaaaacaaacaaaaataaacccttgaaagtttgagtttcttttacacttatttggttttatgaattttgaatatatatatatatatatatatatatagttgttgttgttgttttttgaaacagagtctcactgtgttgcccaggctggagcgcagtgagtagagcaatctcggctcactgcaacatctgcctcatgggttcaaccaattctggtgtctcagcctcctgagtagctgggactacaggtgtgtgccaccatgcccggctaatttttgtatgtttcagtagagatgaggtttcaccatgttggccaagctggtctcaaactcctggcctcaagcgatctgccctcctgggcctcccaaagtgctgggattacaggcgtgagccaccatgcccagccttgaatattatttttttaaatgttttcaactgatactttctatctttaatcaaagagactgactgtatctatggcaaaatcatcatgaacaatacaatacaaacgcagactgtagacttttattggtaactcaattccatctgcagcattgcttctgtgacatgattttcttcttcttcttttttttttttttttttttgaggcgaagtctcactccgtctcccaggctggagtgcagtggtgtgatctcagctcactacaacgtccacctcccggattcaagtgattctcctgcctcagcctcccgagtagctgggactacaggcatccaccaccacccatggctaatttttgtatttttagtagagacagggtttcaccatgttggccaggctggtcttgaactcctgaccaagtgatccacccaccttggcctcccaaagtgctgggattacaggcgtgagccatcgcacccagccaacatgattttttgaaatggcaaataactctggtaaagaagctctgaacaaaacaaagtatactcttttcttcctttattccaatagaaacattcctggaaattttagtatgaaaaccatgcaaaatgcttaatgtttataattatctgaactagaacctaaataactttaccaaaaaaatggttttttgcatacttgaatgttggtgcaaggcacaggacaccagaaattgtgcaggactctggacagttaattgggtttttggttttttgggtttttttttttttaattgagacagggtctcactctgctacccaggtttgagtgcaatggtgcgataacagcttcctgcagccttgacctctggagcttaaacagtcctcctacctcagcctcccaaataactgagaccacaggcatgtgccaccatgcccaactaatttttttctaaatttatttattttttttttttgtagagatggagatctcactacattgcctaggctggtcttgaactcctgggctcaagccatcctcccgcctcagcctctcaaggtactgggattagaggagtgggccaccatgactggccaggacagttcattgttatatggccctgttcacatagcaagggaggttggcttccttggttcccactctctaaatgccaatag

SEQ ID NO: 1242442 - DNA, 4001 bp, Homo sapiens
cctctgcctagagaacaagaaaaggagctctgcatctttttccacatgagaattgcaccaagaggtgaaaggcagtaggctccttttggggaaaaaaaaaaaaaaagctttgtttctcacctcttgaaatcccttagaaaggtggcattgggttttctccctgggttctgagaaaagtcagaggacttctcagtattaattttttatacattaatagaagatatatttaaactactccctccccatcttatttttaaacctgccttccattaattcaagcatatttaagcacaatgcgagctaccacaaaataaattctacctctgaagaacactccttaggtttttgttatttcatgatatctaacttaatctgtaaaaccacataagcttgttttactgtagaagtcctctcaagataacttgtccttaggtttttgttatttcatgatatctaacttaatctgtaaaaccacataagcttgttttactgtagaagtcctctcaagataactcaagacttccaactaagtatagtctacattttcatgcagtcagtatcctacactaatgtgatttctgccacagcagaataaagtagtattcactcaattcaaggagcctcttcctttgccttattcaacctccactgaaagactagggctcttgactaaatgtatattttctcaagtgtcaaacctaacatctagctgcacattcgccatgtgaaccacaaagataaggaaataatagcatcacctggtaccaagaaactgcttattgaaggcccagcacagtaaggggctaaggaatcaaatatttatgccagctgctccttacagtactacgaataaggaccaatatgctactttcatttccacaagagctttagcagaactaacgactgtctgacctctaccttcttattttattcttgaggtttccactactaaagtataggaaggtcctggtctcaaaaatagccacacagggcaaaagggaaaaacaaataaaagcctggttcagaaacgccccatcctctgttaagttcaagtctttacatttcaaaagacagccttagaaattaagctcaccacagtgctgatcttcttcttcccatcggtagctcttaacagacacttgttgtctgcgggctcaaagccctccacagtacccttctttggaatgggtttggttcgaccgtcatctgaaggaaaaaatgcatcctggtgaacacggccgcgtacgtggctgagcggcagacaaacagttaaaacagaggagtggggtaagtgatgacctaacccagccccgctgctctagttttgttaaacacctcatctgctatcacggtctggcgaaaccctggagaaactattatttccacgacggaaacatgtaatatcgaagcacgttaaattccactcaaagtggcggcgtctgggatccctgacaaagagccctgggctgcttggggcccattgttaccagaagcaacctaggcggctcagtgctggggactgagccagctacaatccctactattttccgggcccgaagccccgaatgtgctcagtacagggtggggaaaggtagaggaaggcggcggtccgcggcagacagactccggtggctcccagacaccgggaacccagggagcatcgcccggctcccctcccgctgcttacacttcttcaaggtgatatagacgctgcccgacgtccggcacttctggaaaagtctggtcagctccgtcaggaactggaaaacaacaggcccagccccgttagccagccccaaatcctcgtcctgccgcgtcaaggccctggtcctcctgcaggaggcacaggtctcgagtaacgcctgagccgcccccttccctcggccggccaggcctagccatacctgctcgctctccaacaacaccatcgcggcgacgctggctcgactccctccgcttaagcccctagcagtgagagccggaagttcggcctaggctgggcgggacttccgctactagacttccattgtcttccaccaatctcttctcttccaccaatcccggcctgcgccctcccccctccccgcccgcctagcgcccgcgccctgggacgtccgggggcctgtgacccggaggcgctggggctgtcctgggtcgtcacatgcgagaaatcgtctcaccccagccagtgtgacggagtgagagcaaaagaaagttttgatagcagcgtacgatttatattcagctgtatgctgggcaggtaacctaacaactcagtgactcagtttccttatccataaagtaagggtaatgatagtatctaccgcgcagtgtggtcgtgaagcgtaaatgaaactcagattaaatacgtagaacagtgcctggcacatagagcgtgttcagtaggtatcagctattgttcttttcattattgtcattataagttcctgtagagatcctttaaactctccctaaacgctgacctgcagctctagccagaagggctgggccgggcgtggtggctcacgcctgtaatcccggcactttgggaggccgaggcgggtggatcacgaggtcaggagattgagaccatcctggctaacacggtgaaacgctgtctctactaaaaatacaaaaaagttagccgggcgtggtggcgggcacctgtaatcctagctactcgggaggctgaggcaggagaatggcgtgaacccaggaggcagagcttgcagtgagctgagatcgcgccactgcactccagcctggaagacagagcgagactccgtctcaaaaaaaaaaaaaaaaaaaaaaaaaatgaggggctggagcccagtctttagttctacctctgattagtcaggagaactaggttgtaagccctctctgccactagccaacttgaaccctgggccctctataaagtcaagcattccaccacacaagaggttttcgctgagtgcctctcagtctgtgccaggcacggttgtagaggttggggatgcagcaggataagaaaagctaagttcctggtttcctggaagttgggttaaaggggcagggaggaaataaacaatgaagcaaacaagtaagtagtacagcttcagataatgaattccgtgagacagcctaagcagggctgtataatgagagtgggaaggggactgcctgggttggggtcaggggagttctcgtcgaaaaggagaactttgagttgaaagctgaaaggaccagccatccaaagatctagggacacagtgtttcagacacagggaacggctagagcaaaaccttcaaaggggaaacaagttgccctgtgtctgtaagactggcaggtgcgggtgggggtgaggagggcttgtggagcaaggagtaaaggagtatggagaggtagctggggaccagattatgtagggcccgtgaccatagtaagcctggattttgttctagatacaaagagaagactcgttaaggaagttttcaacagaacactgaaaatctgatttatattttttaaagatccccctgtctgtgttgtggagaatgcactgtagagagacagggcaggaaatgaggagcccagttaggagattcaaacttaatggcttaaatatgttcactctctgatttcacattttcttccaaatggccagcgcccgttgcccacttcctgccctaggctgatgaccttgtgtagccaacctgtattggcttttggttctccagcatttgaacctgtttgcaatcccctgttgtgtgggttttggtgagaggcaataaataaataaatagaagggtcagagggtcactctctcaactgccctcagcacctgggctcaagcatatgacctaacgtgggtcaatctggtgctctcaaccaggactttgacttctgagctagtaataccaaggcccagggctcttgcatgggtgtccagtcatttgaatgtgaggatgtttttgctcatctgtattggcagatatcatgaaaattatgcatgggc

SEQ ID NO: 1242443 - DNA, 4001 bp, Homo sapiens
cttaggcttatcagattaaattacaggcaaattttaccaatggccctctacaaaaagcatacatgaacaaagaagtcatgtaataaataaactctcagcagtgaagagccacaagtgacaaaaaagactaaaaaccacagagctacctgtctctgaattgggacatttatcaacaaaggttattcttgagaagtcagtatgagtttaaagcatcttcataaacgtatccagtgagccaagatgtagcttgacatgggtttaggcatatcactcccaatgatggaaaggaacagaaattttatcactaatattatggtgaacattggtaggatcaaaagtctggataaaaggaaatatgagaatttctcatgagaaaaataagcagtgtctagaaagtccagaccaaactgattccttgcaaaattcaaaattagattaaaaagaatgtttggaagttaagaaaggaaaagtgaatacatggaatcctagctagaagattcaccgtgaacaagttcaaccgaatcaactgcaatggttattttcaaaggttagtaatgtagtattcttcgctgtaggtgagaatcttataggcacagtatagcttaattatagtacggcatttgacaaaatctttcctaatatccacataaaatgtcatatgggcctgacaataatagacagaactagttgttactgaacaaccataatgtgtgctgattaatggactggtgttaatctaaagtgagtctagctgacttgcacacttctgagtaatttattctgtcaatatttttatcaacaatttgaatgaagacatagtaggtatgcctaccaaatataaagatgaccaaatagaaagtgtattaaatgtctaaataaaaactaacaaaaggaaatttaaaagccttatatttaagcacacctaaaaaaataaaaaataaaaataaaagccttatatttaagctaaaaaaaaaaaaaatccactacacaaaaacaggattagggagactcagtttaacatcttatgtataaaacattttagagagaagttgacacttctggttcatattaagcataagtaacagaagttaaaactgttaatgaaatatttggtttaaaaaaaaaacaaaccagcatttggctcatacccaccacactctgtctggtcaaatatcatctaaaatgctgggcacaatgtataatgacaatgagcaattaagggttaattaagaaaaaataaccacggttgaaggatcagagaattacattatctaaggaatggttaaactaactgggattattgactctgaagaagagaagggaatgctcaccatgtgtggcagggagaaagggtcagcacggacacgacggtagtcttcaaatatgtgaaggggccattcgtgtgaaaacggggttatacttggaaaaagcaaaatacagtgagaacagcatgggctatgatgtataaagacccagattcaaatcctggtgccatgatttactgtgtgttatttggcttggagacagattagcatccttacctagaaaatgatacttacctcataaatgtataaaaattagaggcaaaaaatatttataagctgcctggcacagactgacacactgtgatgcacagtggtgttagttctcatccctagacctttctgtaattctagaacagtgttttcaaagtgagaactgaaactcattaatgggtcacaaaatcagcttagctggatagtaaccagtatttttcttctgatgaaacagaaggaaaatattagagcacaccatttgtggcaaacataatcataattttgtgaaacttctgtttcagttattcatatacatgtgaatagattatgagttaaaatgtatttcttatcatgaagttggatccaagaaaaaaatgtgaaagtgactactgtagagcactattttctatgtgtgttctataagatactagttccttgggagctcgattagatttaggaacaaaccatactccctagagatttactatgttcagtacacattagcatctccaagagcccagcattaaagaaacctgtttatctttcttgaatccagttttttcccacatttattcaactccagaacccacccacttttttttcctacatggtatttattgacatcttcagaactaccactttgcagcatatacactctggaggaaacattcctctagatgaaaaagaagatgcaatggctagaagttatagaaggtagattcttagcttgctaagaagaaaaacatctcaactttgaatcttcctgccactgacatccaccccctataacttttaccctacacacatgcctcatgcattttacatatgatttatccaactttcaattcacacaaatgttctcagaaaaagtgtaggacatctataatatctagatatgaagccaggatcaaagcaataagcaggaatcatctggtcaaaagaaactcctggcatagtatttaggaagacttgacaaagcttaacaaagctcatgctcaggaaccacagcagcccaagacttaatcggcttttccaagtggactcaatgtgttctaatacataatttaaagtgggcttgttataagtaaagtgtttatttagaaacagaatgcttgctcctcagtactgcaaggaaaaatcagcatttagacaaaaagtgttttcagcaaggcaattttactttctgcagaaagggtgctcctcacaggtgaaacaatggcaacagcacacccaaacaaaggagggaagcaatttttatcccttatgcagcttgtccctgctactgtgtcctgtctccattggctggagctggacctcacaatttaaattaaacctgactggctaacaacttaaaactttcctaaatagggaaaggcaacagagaacaaaggaaatgaggaagttgcttgcaaaaggacttagaaaagtaataatatttccaaataaggaaggggcataggctgcgagctggaacgtgcctgtgagcatgtccagcacaaatatcttggttaaagtacaaggacatagaatatacttattcccttatatctaacagctacataggatagggcttaatgaagagttattagcacagagcagaggaggctggaaggaagttagtctttaaaagaaactattatttctaacacttaatgatttattctttaacaagaagggaaatttttaagaggaaactttttactttctacaattccctcctcttgattttgtatttttctttaaaccttttttttgtttaaacgtgttttggcttaattgttttgcttgagtttttaaaagaaaaggtttttatggctgatgaaatgtgagggcaacagggatagccaatcgaactagagagcaagtactgctttaattatttggcagagtgcccagcaaaggtcctttataataccaccatacatctgcttggggatgaataagggtggactgatgggtcagcttttggaagtgcctgaccttactgcatcctgttaagtctccaaggaatgccaaattttccccttgtcattggagacacgagataaaattggtcttggaagatggaggctgaatggcccttggggtactgcactttaggaaacagcagagagagtttggcacagtttactatcctaggctgtaggattttgaaaaagagctaccatgcagtccatgtcctgttaattagaggaccatctgagtggaaaggagacaacctgagcctctggcctactgtgtgcacaagcataataatggcttttatttagagtgcagagggaaaatttaacccattttagctaggcatctacatcctgataccctgtcttaattgctatggtttgccttagattttttacttctactacagagactttggttttgacactatgtttgggaggagtgattgatggagaggttgaaggagcaataaagcttattttaaaaattcctttaggatccttt

SEQ ID NO: 1242444 - DNA, 4001 bp, Homo sapiens
taaaaaataaaggtttgtcaccatatactcaagagtacttctgttattcaaatctcctaactgggagttacaaatatctctgactctgctcttgtagctgtcagagcataaaatgcccttcccactctttcctcacttccagactccaaagcctcctcctcaaagtttggcccctctactttggactactgttttcttcccagttactgcgcactgacagtacttttgttctctctttcggcaattcaccatacactttctagtttatttatctgcataaaacttagttctcaacaagactataactgccttatgaacaggaatcaacagttgagaatcttcagagtctcctataacatcatgtaagagctcactaaatgtttgatttaaataactaggcttaagagtaataggctgggcatggtggctcatgcctgtaatcccagctctttggaaggccgaggcgggaggatcacgaggtcagatcgaggccatcctggctaacacggtgaaacccgtctcttctaaaaatacgaaaacaaaaaattagcagggagtggtggccagtgcctgtagtcccaactactcgggaggctgaggcaggagaacggtgtgaacccaggaggcggagcttgcagtaagccaagatctcaacagtgctaaatgcatacatggattatcttactaaattttcataactctatagaggtaagtgctatcattattttctccatcatagaggaagaaagtgaagctcagaataacttgctcaaggtcatacaggcctgggcaaacccagggcctgaatccagcaaagctcttaactacctcagaacactgcacagttcgagccctgcaatactacagtctatgaatgatttcgatttcactaagttagaaatttgaatttcaacagagacattttagctaaaaggtaaaattttaaagaggatgaattaagagaatttcccacagacatctttataataaaatgaggagaaaagcctcccatttcctatttatgaaagtgatattaaggtgtgtgtcacaatttcatcaagaagtggcttatgacaatacagctttggtttaggtattaaaataggactcttttctgcccataggaggacatggaaatgaaggatagatgtgataaatgtcaattcagagctctgcaaaatgccagactcaattcttgttttaaaatatcagagccagggctcttgtttcacccttgattcttcacacaaaacaccaccatcctctgacctcttcacacagagcaagctttaccccactacctaaaggggagtgctgatccacatggtctccccatccacgctagaaattgatcccaaacaccaaccgctgcatagacgtcggcgactttggtctgcaccccccgaacttggtgatacctcatcaagccaaacccctccccaacatccaaaatgcccagaccagcatccgaaagctggtctcctatacaaagcagaatccctgcctacaaagcagtttcccacctccgactcctccccacggcgaacagcccttctggatccaaccaacccaccaaccccaatagggcccagcacccagagggtccacaatccagagaaggagctacaagccctgtacttgcaagcctcgaacccccaactccaactgacctcccctctgccagagcaagaccacgagtacccgccgagagcggacctggctggctacacaaagccaggcgcccgaccagagggatcctccgggacgtcctccgccaccggggcgtccccgcccagccccgcccggcgcccggcgctcaccagctctcctccccctcctcctagcctgacagacgctccaggtcgtctagcaagccgccctcccccgccgccagcaagaaggtggcgtctcgcagctcctcgttattcgtccgcctcgggtccatccggccccgccgcccgactttgcgctgagacccaaggggaagccccgaggggaccccgcgccgtaggagggagtggaggagccggcgaaccgcgatggagccggggcccagcacagcgcgagcggctcctcggctgttcgtgctgcttccccagcttcttcaccggcacctgcagcttccgcacctcctggtccgcgttcacgttagagttaacgtcctccatcccggccccgctgcctccgccgcccgcggccctctcgctctcgcagcaacaagggaagagccggaggaaagaggcgtccacgccgctcactccagccgaggcccccgcatatagcagggccaggccccgtcgccagggttcccccagcgcgggtcccgaagcaccgctggccacagatgaaccgcctcctcagcgcaggtccgggattcggggaggcagcgccaatatccggtctctgcagccatcttccctccgtccctccgcccaccgagggtcggccctgtaggtgacctcagagcgtcggggatgggcgtggccccgtcgggcgctaagaagacctagcgcagagaggaccgccgagctcccgacggggcggggccaggtgtgtgaggggcggggattggacccggaggggcgtgtctggactgccggcggaagtggaacgcggcctgacctgcgacggaaagccactgcaagcccggaggcgaacagaaggcattccgcgagccgggctgagttggtgaacacggtcctcgttcaccccgcctattggtctgggcgtgtggggtattctccacccacttatacggcgtgtgggaccgacgggcccgtcctgcccggctccggtccggatctcgagtaggcgctcaatgggattcggggagacgtagtttactttgttcagcaaatatttaaccgatgcctattttaatgggagattgtttccgctggcgggagcctcagagaccgcctgtgtcctttaagaaacccgaatttcagacagttaagagaggtctaaggtcaaaataataatcataatttcttcttactggccagatactatgctaagccctttttaattttattattattatattttgtcaccgaggctggagtgcaatggcccgatcttggctctgcaacctccgcctcccggtttaaagcgattctcctgcctcagcctcccgagtaactgggattacaggcgggcgccaccacgcctcgctgatttttgtattttagtagagacggggtttcgccattttggccaggctggtctcgaccctgacctcagggtgatccgctcacctcagccactcaaaagtgctgggattactggcgtcagccaccgcgcgcccggtcgtgctaatcactttgaaaggcattatctcatcggttaaaacatagttttccggacttaaaagtttacagcacactggcgcagaagatggaaaaccgctgcttgcctttctccgtttattgactcacattctgctctttggatcattttcttcggaaaaagttttccaaagtgtgtcttgtgtattaaaagttgtgtattaaaagtatttgaacacgctgacagatactgaagaatgcagaaaattgtatgagtgtgaaaatctgcctttacgatgtgtactagtggcagcaaatccaaacaaaatttaagtgctttgttttgatcacattcattgggcttcagatgtcaattgtgcgctgctttggcttgtgtttgcagccacaaacacaagtggagttattaacgccactcactaaacacaagtggaagttattaagagtggaggttccctcctccactcttaataacagtgatccagttcgtgttttttttttttttttttttagacggagtctcgctctttcgcccaggctggagtgcagtggcatgatctcggctcactgcaagctccgcctcccgaggtcacgccattctcctgcctcagcctcctgcctagctgggacaacaggcgcccgccaccgcgcccggctaattttttgtatttagtagagacggggtttcaccgtgtt

SEQ ID NO: 1242445 - DNA, 4001 bp, Homo sapiens
cctggccagtatggtgaaactccatctctactaaaaacacaaaaattagctgggcatgggggtgggcacctgcagtcccagctacttgggaggctggggcagaagaattgcttgaacctgggaggcggaggttgcagtgagctgagatcatgccactgcactccagccagggcaacagagcgagactccgtctcaaaaaaaaaaaaaaatagtaaataaaaaataaaggtttgtcaccatatactcaagagtacttctgttattcaaatctcctaactgggagttacaaatatctctgactctgctcttgtagctgtcagagcataaaatgcccttcccactctttcctcacttccagactccaaagcctcctcctcaaagtttggcccctctactttggactactgttttcttcccagttactgcgcactgacagtacttttgttctctctttcggcaattcaccatacactttctagtttatttatctgcataaaacttagttctcaacaagactataactgccttatgaacaggaatcaacagttgagaatcttcagagtctcctataacatcatgtaagagctcactaaatgtttgatttaaataactaggcttaagagtaataggctgggcatggtggctcatgcctgtaatcccagctctttggaaggccgaggcgggaggatcacgaggtcagatcgaggccatcctggctaacacggtgaaacccgtctcttctaaaaatacgaaaacaaaaaattagcagggagtggtggccagtgcctgtagtcccaactactcgggaggctgaggcaggagaacggtgtgaacccaggaggcggagcttgcagtaagccaagatctcaacagtgctaaatgcatacatggattatcttactaaattttcataactctatagaggtaagtgctatcattattttctccatcatagaggaagaaagtgaagctcagaataacttgctcaaggtcatacaggcctgggcaaacccagggcctgaatccagcaaagctcttaactacctcagaacactgcacagttcgagccctgcaatactacagtctatgaatgatttcgatttcactaagttagaaatttgaatttcaacagagacattttagctaaaaggtaaaattttaaagaggatgaattaagagaatttcccacagacatctttataataaaatgaggagaaaagcctcccatttcctatttatgaaagtgatattaaggtgtgtgtcacaatttcatcaagaagtggcttatgacaatacagctttggtttaggtattaaaataggactcttttctgcccataggaggacatggaaatgaaggatagatgtgataaatgtcaattcagagctctgcaaaatgccagactcaattcttgttttaaaatatcagagccagggctcttgtttcacccttgattcttcacacaaaacaccaccatcctctgacctcttcacacagagcaagctttaccccactacctaaaggggagtgctgatccacatggtctccccatccacgctagaaattgatcccaaacaccaaccgctgcatagacgtcggcgactttggtctgcaccccccgaacttggtgatacctcatcaagccaaacccctccccaacatccaaaatgcccagaccagcatccgaaagctggtctcctatacaaagcagaatccctgcctacaaagcagtttcccacctccgactcctccccacggcgaacagcccttctggatccaaccaacccaccaaccccaatagggcccagcacccagagggtccacaatccagagaaggagctacaagccctgtacttgcaagcctcgaacccccaactccaactgacctcccctctgccagagcaagaccacgagtacccgccgagagcggacctggctggctacacaaagccaggcgcccgaccagagggatcctccgggacgtcctccgccaccggggcgtccccgcccagccccgcccggcgcccggcgctcaccagctctcctccccctcctcctagcctgacagacgctccaggtcgtctagcaagccgccctcccccgccgccagcaagaaggtggcgtctcgcagctcctcgttattcgtccgcctcgggtccatccggccccgccgcccgactttgcgctgagacccaaggggaagccccgaggggaccccgcgccgtaggagggagtggaggagccggcgaaccgcgatggagccggggcccagcacagcgcgagcggctcctcggctgttcgtgctgcttccccagcttcttcaccggcacctgcagcttccgcacctcctggtccgcgttcacgttagagttaacgtcctccatcccggccccgctgcctccgccgcccgcggccctctcgctctcgcagcaacaagggaagagccggaggaaagaggcgtccacgccgctcactccagccgaggcccccgcatatagcagggccaggccccgtcgccagggttcccccagcgcgggtcccgaagcaccgctggccacagatgaaccgcctcctcagcgcaggtccgggattcggggaggcagcgccaatatccggtctctgcagccatcttccctccgtccctccgcccaccgagggtcggccctgtaggtgacctcagagcgtcggggatgggcgtggccccgtcgggcgctaagaagacctagcgcagagaggaccgccgagctcccgacggggcggggccaggtgtgtgaggggcggggattggacccggaggggcgtgtctggactgccggcggaagtggaacgcggcctgacctgcgacggaaagccactgcaagcccggaggcgaacagaaggcattccgcgagccgggctgagttggtgaacacggtcctcgttcaccccgcctattggtctgggcgtgtggggtattctccacccacttatacggcgtgtgggaccgacgggcccgtcctgcccggctccggtccggatctcgagtaggcgctcaatgggattcggggagacgtagtttactttgttcagcaaatatttaaccgatgcctattttaatgggagattgtttccgctggcgggagcctcagagaccgcctgtgtcctttaagaaacccgaatttcagacagttaagagaggtctaaggtcaaaataataatcataatttcttcttactggccagatactatgctaagccctttttaattttattattattatattttgtcaccgaggctggagtgcaatggcccgatcttggctctgcaacctccgcctcccggtttaaagcgattctcctgcctcagcctcccgagtaactgggattacaggcgggcgccaccacgcctcgctgatttttgtattttagtagagacggggtttcgccattttggccaggctggtctcgaccctgacctcagggtgatccgctcacctcagccactcaaaagtgctgggattactggcgtcagccaccgcgcgcccggtcgtgctaatcactttgaaaggcattatctcatcggttaaaacatagttttccggacttaaaagtttacagcacactggcgcagaagatggaaaaccgctgcttgcctttctccgtttattgactcacattctgctctttggatcattttcttcggaaaaagttttccaaagtgtgtcttgtgtattaaaagttgtgtattaaaagtatttgaacacgctgacagatactgaagaatgcagaaaattgtatgagtgtgaaaatctgcctttacgatgtgtactagtggcagcaaatccaaacaaaatttaagtgctttgttttgatcacattcattgggcttcagatgtcaattgtgcgctgctttggcttgtgtttgcagccacaaacacaagtggagttattaacgccactcactaaacacaagtggaagttattaagagtggaggttccctcctccactcttaataacagtga

SEQ ID NO: 1242446 - DNA, 4001 bp, Homo sapiens
tttggtaagaattcagtgaatggctgacctaggggtgcctggataagcacagcacttatgtttttataacaggacaatgggcagcgccgggccttccctctcacatgggcaaaggtcagcaagtgatctgagccgggcagtgcccacatccggaatcagaagccggagagcctagaggaaggccctcctcaccgcatcttccattaccccaagacgtgacttgcccgatttcctttccaatccacgtttctgaggcgagcagctatgaaaagtagcatgtttatctctgcgtgggaattggtggcacgttgtgtattaactgcgcagcatttgtgaaagttttcagagctcttggggaaaccgagaatgagaggagaaagaggcagggagaggggttctggaagcccagcggagttcacagaaggaattccagggagatgggcaggggcagggagaaaatgagagcaggaagcggcacttgtcacaagtttttgtccttggggcctcggcatcccgcctgggcccaggactggcatctcccatttgagggactgacagtgtggcggaccctcaactagcacagataacaaatgaagtaacaaatgggacaaaggaggggcgcacgcggcgcgggactcgagaagagcgcctggcagagcacaaatcccacagaagaagagaccttctgccctctttgagacctcaccttccccttgcccagggccaggaagctctcctcgggcctcctcagaaccccggctgcctccccacctgtcgtctaccgccctttggaggttccggagaggggcccggcccggcgagccgaaggctgcggggcggggcgcgagtctcagcccctgggacacacagccggtgcgtcccgcgcctcaagtgcgcactccaggaagtccggagccgggaggatccgggctcgcggtcccaccctacctctggcgaggtcgggagaaaaaaagcgccagatcgcccgcctgagggcccagaagcccaccgggcggcggtacagactttcccgaaatgtctccgtctccgcgctgcgagcgcacaggaacccagggtcgccggggttgccgtggcttggctgaacgtccaaagccaggcgagggcggggggtctcagtccagctatgcgagcccttctctagtggtgccagctcctacgccgggctcccgggccggcgggaggcgcgtgtgcctgtctgtgtgtgcaggggacattccgcttcccagtagcccatgcagaaccccgccctccgctccggccccaggaacccctcccccagctcagagatccctgcgcgccccctgcccactttgccaaggcgagaaagcggccgtgctggagacaaagaaactcctgcctccctccactctcggcccctccgcccgcccgagacactccccggcgccctccctcgaccccggcgacactgcgcttggacacgccaggcaggggggcagggtgggcgagtccgcttcccgacgcgggccagctgggggcttcccgtgaaccccgcccggggacaccccacagcagccgcgcccccaccctcctctccccaaaccgtcccgggcccctgtcgccgccaccttctgccaaaccgtccccatctctccagcggagctacagcggggcgcggcgcacacaaagggggtcggagggtggagagtacagaaggagggagagatcccgccagggctcgtggcacgggcctgggagcagctatttacccgatttcttcttcgatctctgagatgtctgcgaagatgaggaagaccacgagcagcgtgagcgcggccagcatccagctccggaactgcagctgcatggtgggttcgcgcccgccgggacccacgcgggccggcgcgaggagcaggggccggagggcgcagcggcggacgccggagcctccgcgcgccgcgcgcagctgggcagacaccctgcgctccggacgagtccgggccggcggcggcagcggcagcggcagcggcagcgacaggcaggggttgctcaggcgcggcgagcccgctcgctccctcccggctcccgcctgcccctccctccctcctctcccttcccccgccccgcgcccggctccgcgcgcagtttgacagctttgctccgcgcctctgctcgcctcctcccaccaactccagcgtccaggcgctagcctttgcttctcccgcctggctttattcagctcccgagggcgcggggatgcagccggacgccactcctggcctagagagactgggctctggccaccgcgagcgaccgggtacggagctgagcccagggaagtgcgcgcaccgcccggcgcacccctcaggctggcaaacgccctccctcgcccgctctttgtccagctccctcgcctcctcgcaaagttttctcgacacaaagaccaacacctggggacagcccccagcgcgcggcgagaaggcggtttcagccaggcagatgtttcagcagttgatgaattaggaggggaggtgggggaaggggaggagagaagaaatatccaagacaggccaacttcagtgaagatgctgactacagtttgtgggcgaggctctcagccctcgagaaaccactccctccaggtgctgatctttatctccatttatagacccgatactgggtcgggagagctctccgagctgcccccagatcacgcagtcctggctggaaccctcggctagaaccccaatgggagactcagcgcccgccttccctccgccctcgcggtgctgacgccgggtggccttcatctccccagttcttggactctcaatgaccctaagatcaataaccgcgggaggcctgtcttgatcaaaatgccttctagaaaaatatggctcccacaaggggtaatgccccccacccttccgaatattgtacactttcacagccttagacagtttaagtcaaattacatttcacaccaaccattggccaggggtgggaagggccccattaagttttactggaattagataattaccttttattttctttgcacgaattggaacaattcctgaaattaagaaatgtaactttccagaaatgatcatctggtttatgaaagggtcctttgggtttgagtgtggggaggaggagtcctgttggagaagctacatggaatgtcctaagtgctggaaaccacaccccagtgaatgggaggggcgtgtcggccttatcccctggaccactcagaggagtttggcgaggggctggcagcagccaagtcccttcatggcgcccccggggatgtaagagggccttctgattttctaccaaagtactgcttgtgcccagagcccttctgccccttcgtgtgtaaggaggggcaggagggaggcttccaagccgggggctgctgcccttgttgaccctgggagccagggcaggctctcccctgcaggaagaggtcccatcacccagcctggagaatggattagggaagcagcacagcgtcaagggagagctctgcctcacctcctttgaggagtgccaggagcagatgtcttttccccagaggaagcgtgtactaattcccacctcagcgcttcatttccttcccattccttggcgaagtcagcgcaccctgctccttttacagtaagcacttcgaaaataccatgtatttttcttggggtgaggtttttctgatgtggagaacaatgttggacgtcactctccctgtctgttagaggcagggatgagacgtcaaaggagagtttcccatcagtgtggctggcacggggtctaaccatccttatttcaagttttcaaaatgccaaaatctttccctttgtcttgcttgaagggtggtttaggaggtgtggagtggtttttgtcatcattttgccttgtttttctgaagggaatggttgggatacctgaatagggagaggaaagtacaggatgcgcctggtatgctgctctgtatttgaatcgctcctccactcactccaacgtgc

SEQ ID NO: 1242447 - DNA, 4001 bp, Homo sapiens
agagactctgtttggggcttctctccctctctgagtcatgaggtttcccaccgggaaactgggctgaggcaggcctccaatgctgcaagcagtgggcagcctgtgcttgcaggacacacccccttaacaaaaggtatcacggaccccttccagaagaaatgggagggggttactatagcctggcccagacactatctagagataacatgcttggaaagacttacgtcagtgatgctttggataatttcaaaaccggtcacattctcatcccacttcactcgtaggcctccaacagctggcttcacacagtcccacacctcctctagtgtcccatatacaatgccttctcctcggtacctggagcacgaaaaggaatttgaccccaacgcatcaatcaaacttgttatcttgagattgtatctaaggactagaaggtggaccatgccatgtctgtcactactctttaggacagacttgcagagaaggggctgaaagtcactagccccgcctcccttcaggcctgcagaaatggacagtaagctttcacaagaatacagtttgctggaaatgatttcattaaaaacagtaaggcttttctggaggacaagtgatcacaggttatagggttgatttgaatattttaggaggcaggcccataaagataccaggaagggtgcggcacctctggtaatctttgaacgaggcatgcacttacaggttccctggaaactccacagatggcctccaggaaactgaaactccattctgtcaaaaggcacagaaccacagaattttagagctagaagggctctggtcacctggcttaatcccctgttctacagaagaggggtaagaggcctcaagagatacgactctccaaggctgtgcaacccatacgtggaaaagctgggactagtcttgggcaaagctgtccccacagcagaatgtgatgaagaaaaagatcttaactggctgactccaagagccgtgggtggtttttaaaattatcttaaaagccaccaggcattctgtttccttgagcaacccagggctacttaatgaaaagtcagaagggtcaagcaaaactactcccatgctaccctctggcaacgacaaagagaggggttcatgctgtaatgaaaagtcagaagggtcaagcaaaactactcccatgctaccctctggcaacgacaaagagaggggttcatgctgtaatgaaaagtcagaagggtcaagcaaaactactcccatgttaccctctggcaacgacaaagagaggggttcatgctgtaatgaaaagtcagaagggtcaagcaaaactactcccatgctaccctctggcaacgacaaagagaggggttcatgctgtaatgaacacagaagaaaaccttagtatgcatcagatgctggatcagactttactggatttaaacaacatgtaaaaacctccttagctgcgaccacattctttcattttgttttgtttttaaacacctgcttaccccttaaatgcaatttatttacttttaccactgtcacagaaacatccagtcctaaacagcattcaacagccaggtgaccttgggcaagtcactgagtgaaaggaacagatacttaccacctgaagtcattgtgagcataacaggcccaatcttttttttaaagaagaaaacaatccccattggaatccctctcaatcgggtccaggggattggggagcagaaaacaacggggagaggaggcgcttgggggcttctggggacccgggctccacgaagccgtctccgcgaccccttcccgcccagctcctcactcacgccttcccggcaaatcttccagcctgctgtgtcccgccggtactggagcatcttctcggccacagcctcgctcatctgggctgccagcgccgggtccattgcgtcgggagctgcgcttagctgcggggtcgcgggtgttatgagcggcggcgctggatcccgggtgcctggaggctggagctctgggaggagctcgtagccccgcctctttccgcgcccccgctcccgaattggtccaggccctcagacggatcccgcctcccggagattggcaggacaaggagaccgcggggccaggctctccagttagcgtcagcgcctgggcgggtcccggacgccttgggcgggccgggtaaggtccagccgtatccgcctccttcatgtcccgctgtgggaggggctctggagcgccgggactgtgagatggccaatgacggtctgacccgttgggccgggccaggtcgcggacaacgtcgaccgtttgtttaagaagcgtggactcttgtcctgagtgcaccgaggctttcagcctgcgggacagtggtgcgatttgcattagaggtaatatgctagggcggctgctgcagggtgggagaggaaatgcgcgtggagactgggcgcgtgcaatggtgggagaggtgtgtggcaggggtgcggggagtgggggtgaagagaagaggacccatcgtagagtgtttaggagatggaaggtgaaggtctctgcccccgattgtggatgttcagaaggagaaagcatcatgactcccagccttggccacctggcagcttacctgagatggagaagagatagggtgagttcagttctgggcatatttagttggaggtgcctgaagggcctttagtgcaggtgtccaggagtcaatgcaatgcgctgacatctgcgagaggcccggctttattagagatatgggagttctctgcttccagctgccctggagctgcggggagtgagccagggtcgcatcttcacagcgtgaatggcaaggacagcctcggtttcccctcttctgcgctatcaccaactaaatatttgaaaaggttaatactgaggtctatttcttatctttcttttttatgtacttattgtttcctttaaactttcgatataaatgtttggaagagtagtgtaaacaaattgacaacttgaaagacctttttggaagatgtgaagggcagccaggctgtgaagaagacctggatggggaattagggagctcaagatctaaacccagtttcactcattattctttgagcttcagtttactccaaggtgaaatgggatacatcataaatgttcctggcggggtccggtggctcacgcctgtaatcccagcactttgggaggctgaggcaggagatcacttgaacctaggagttcgagaccagcctgagcagcatggcgagactccgtctctactaaaaattcaaaaattagccgggcatggtggcgcggggctgtaatcccagctacttgggggggctgaggtgggaggatcgcttcaacccgggaggcagaggcagcagtgaaccgtgatcgcgccactgcactccagcctgggctgcagagcaagatcctgtctcaaaaagtaataaaaataaacaaacaaacaaataaatgttccctatgcccttgtgaagagagagggaagtaacgcatgtaaatactcttaggacccataaaagaaaagactagtaaattaatcccattaaaaaattaagcacatcaaaatttcataaaaagttagataatatgagaaaaaaatcgggacacactttaacacataagttttcttatcgaaccaagggctcatacaaatcattaagcaattttcagacaaccccataaacaaaaagaatgcattagacatggaaagatactttgtggaaaaattaattgacatggctaacaaagctataaaaagatgcagaacctcactcattgttagggaattaaaaattaaagcaaggagaggcttttcttaaaacctattgatggacaaacatgaagtttgtttataccctgtgttggtgagggtatggagaaatagttgttacacagcggatgagagtacaaatgtatgcaacctcctgggaacagaataacaacatatattaaaattttactctacttgttctttgatccagtgactcttcctgcacaaa

SEQ ID NO: 1242448 - DNA, 4001 bp, Homo sapiens
caatctgttcacacctgggtatctacagtcttgacatcctaccacttgctgctcaaggctcttaacttgagctgaaagtaaataaattgtgctttcattttcccttcacttttgtttggtatgttattctctactgtggctgcaagtaaaccaatttcagcatcattttcttaatctaattcatgctattataaattcctagtgtccggctgggcgcagtggctcacgcctctaatcctagcactttgggaggcccaggcgggcagatcacgaggtcaggagatcgagaccatcctggctaacacagtgaaaccccatctctactaaaaatacaaaaaattagccgggcatggtggcgggtgcctgtagtcccagctgctggggaggctgaggcaggagaatggcgtgaacccgggaggcggagcttgcagtgagccgagatcgcgccactcaacgccagcctgggcgacagagcgagactccatctcaaaaaaaaaaagaaaaaagaaagaaattcctagtgtccaaggaactgagaagttactgaatgttaggagtggtcaatactgttatcctgagaaccctaaaagaacagtttcacaaatacagaatataccagagactacctccagcatagcatctgcacttataaaaccccccccagccctgagctaccacatccagttatgaagaagccaggtgtcacaagccatttaccaatcaaaacgcagcaggtcaggcatctgctttccctctttcttcagtgtacctcttttgccttcttcctattctctttaactttttgtttctttctatctcattgctcttctcattagtctgtcaattacaagacttttcaaagccaatcatttctatatgaggacgaacataatccacactagtacccaattttattatgggagacgatacctttcttgatccttctgcccaattatcaagctatcttatgtcccagagatttttaaacttgccaaataattccaacatgtgcctcctggtccccaaagcaccctctgccagatttaccttccaccactcacttccctccacaccaaccaccctttccccaccaaaacttaacctctagttagtcccttacagtctaagtcctttgctcttggcggtcttactacatagaaggctctttaaactctctccacctgtcaacaaactctaattgatctttaaaaaacacttcatctggtgacaaagagaaaaaagttcgtggctgcacactggatgtctcaagggctgagatgagaggtgcggaatcaaaataagccacgagaaaacgggcactgagggctctgagagaaagaaggggttggaacaacttcccctacttaacagttccgtcctggattaaatcagctgtcgagcatagaaagaaaccgcgacctgtgtcggcctcaatttccccctcacgccctcaccttctgctttctccacatcttcgcagagaagcccacgcgcacccagaaacacacaccattcagcctcagtcctcatgggtactcccaagcccccagaaagagagaggagaatgctcatccctctcccagcctttctcaaaggcccaacccgatgcagcaagcctcgagccgccgtccctcgaaactcctgctggcaggacgccagcgacgctcacccagggcagccctcccgcggccgtccgggaaccgctatccccaggacacaacgcgaaagctcgactgaggtcccgtcccgccaggcctccgtggattccggaccccgaccccccgggtcactttgtcaccgatttctgcgcgccagaatctctgcagggggagacgcggacctcccgctcttttcagctcctgtgaagcctcaggcgccctctcccgcggagactcacctcttgctgagcggccggacccgcacggcgacctgcacgttcgccatccgtctgccacaacccaagtccagcgggtcagctcagcggcagcatcccaggcccccgccctaagcccagacacagccccaacccagccccgcccgccccacgcgcctctggggacgccgccgcgcggacgcgagctgccgcccgagcggggcggtgcctgcctagcttcggccaatcctgagcccggtgggcgggagaactcccggccccgcctcccctcaatcctccttaaagcctcctgactcgcccccgcccaaacacgcgccgcagccagagcaggcgggcccgtgtggacgttcggccagtccttagcctggtgggcgggaggatgccagggctcgctccgcctcgttccatccgaagcctcccgggtcgcccccgcccaaacacgcgctgcatcccgagctgggtggtgcccgccgagccttggctagtcggtgggcgggaggacgcccgggctcgccccgcctcgctccgccctacagcctcttgggacgcccccacccatgcgcgtgccgcaccgggcccagcagtgccggcccagcttcagccaatcctgagccgagtgggccgcgaggactcagtgctaagtctgttgttcctggccccgcttacccagaaatagtttttgttcctcgactaggtgtccgtgctatgtaaagtcaagtaaatcaacttttggtccgaaagtttgcaaagtaatttgctaaatacttttattctctgcgttcgcttgaactgtcaattctgtggttaaattttcgaggcaggccgggtgcagtggctcacgtctgtaatcccagcactttgggaggctgaagcgagatcacctgaggtcaggggttcgagttcagcctgaccaacctggtgaaaccccgtctgtactcaaaatacgaaaattagccgggcctgttggcgtgcgcctgtaattccagctacccgggaggctgaggcaggagaattacttgaaccctggaggcggaggctgcagtgagcctggatcgcgccactgtacttcagcctgggcgacagagcaaaaccctgtctaaaaaaaataaaataaaaaaatagaaggcagtcccttactggcaaggtacttcctgacatcagggacaaagcatagatggaaccaattcagataaagggttattgtccaggtcttcttgtacaaccaaaagacaggtggctggtgtttatcttttcccttcaaggcttgagggttagcagccatatagataagggcagtgctgatcataaacccaactgcatttgcacaaaatattagcgtatcccttcctgccttaaatcctggtgcttgcttctcttccttactaataaatgtcctttgtggcatttatttttccagaatagggaacttgcatatgcaccgaaaagctgttcaggcagataccctttcttctcaattatttccttaatggtgtctaggaactcatttgctccctcttggtcagcagaagctgcttctcttgttatcttgacatattttaaaccaaacctttccaaatttatcaaatcatcccttactggcataaaattgtttggatccttcaccttccttttgcttcaagttgtcatataatgactttgcttgttctcaaatcatattaagagtatataggtatatagataggtatgttttccttttttttttttttttttttttttttttttttgagatgttgtctcactctgtcgcccaggctggagtgcagtggcgcgatcttggcttactgcaaccttcaactctctggttcaagcaattcccctgcctcagcctcccgagtagctgggattacaggcgtgtgccaccacacccagctaatttttttgtatttttagtagagacggggtttcaccatgttggccagaatggtcttgaactcctgacttcaggcaatctgaccacctctgcttcccaaagtgttgggattacaggtgtgagccaccacgctggccaggtatgtttttcttacagcaatcctgtacccacataaaagcttcattttctgtttgttgttgttgttgtgtgtttttg

SEQ ID NO: 1242449 - DNA, 4001 bp, Homo sapiens
accttcagggcaaaccagccagaaatggggaaggtgaccaacagcagcaagaaccccaggaaactgatgaggccatgacagaggcaggagggccagctctggggtacatctgcaggtgagagcagaggtggtcaactggacctgcacgacagctgccaagcggagtgaacttgggcaagtgtaccttacgcccaccttcccctcgagaggctccttccttctcagggctctcaatctggctccttgcctaatattcccgtatctttgggcagctgcaagttagggtctgttccctcctcccatacatcaacactcatttgtcccaagtccaacaaccctcacaaggccttattctctgctaggcaacagccattcaatctcagaatccagtccgcgtgatgatgctctcctcactggactgagtaggggtcaatcctctcgtttaatttatattgcctacccatacctggcatggagccaggagcacctgggcatctgtaaacatgcactgaatactgctggcaaaacacattcctcctataccatcagccccagaagtgtgctttccaggagtccttatgaagatgatgccttagcctacagggataaatcataaatagcttatcaacgggagccacagatgaggaattagattattattttctattccacacccaactttaatgccttaatgaccattaaaaaatgcctatttcacgagatggcgccactgcactccagcctgggggacagagcgagactccatctcaaaaaaacaacaaacaacaaaaaacaaaaacaaaaaaaaaccctgcctatttcaattcaagaaaattgttaggggtcggggtcaggggcagggctagaaagatgaggcttatccaagccaaatgtcctggcccctggagattcaggagcccaagttgggagcaaagccgagacagctccagaatctgggatgaggttatttgccgctttcctcccaaccctggacaggaagcagtcgggagccctgctccattcttccaggaagccctgccctctgggctaagccccagagcactgaggctccactttgtgcctggctctgatccaccaggcctctcaagagacttctggatagggagagctttcaggacaggaaggccagggagggatcaaatccaaggttaggcggttaggctgaacagcgtgggatctggcctgtaggccaaaggagccacagaagactttgagggcaagacagaagcagggcagatccaacaggcagctgaggacctgtcattttggcctgcacatccaggagatgcctagttcccgggcttctagaggtgccccctagggcgaaaattcttccatttccctgcagcaggtgcctttagggtgctggtggcctcctctgcctagacctcggtttcttctatgcgaaatagaaacctgaaacgtcttcccaggcctaaagggctgataagagccgaggacaaatgtggtgaggtgaggttttggaagataggagcaacgctggctggctctggggccaaagccccatgaccctagggagggcggatcggcgctagcaccaggcgccgggtccagccccctctccacatcgtatccctttctcagtcccccctcgtagggtgcgacggcaccgggccggccgactcctcggaggcagagattcgggcctgggggttgccggccggtcccccccggctccgccgtgccaggcggccactcaccggcccctgtccccacgccgccccgctccggggacaagcagcccttctgcgagcccagaaagccgaagctcgactgctggaagcggtcaaaatcacccaggggcagcgcccggtacccagacctgccgagcatggcttttgacaggagacacgccccgcgcctccgcgcggcgccctccctggccagtgggccctacgcggccccgccctcctggctgctgcttccggcttcacccgcgcggccacccgcggcggcgcgggcgcaggaagaggaggccggccggggcccgcttccgccgtcgcatggctccccctgcgctgggaggaccgaactgcagcccagggctactgggtgtgatcggcgttcctcggaccccgctggggtcatcgcctcctcccctcttctcctactcagccctagaaaagctggaggggaagctgggcacggtggctcactcctataatccatcaatttgggagactcaggcaggaggatcgcttgaggccaggaattcaggaccatcctgagcaacatagtgagagcccatctctacaaaaaatttttaaaaattagcctggcgtgggatgcctgcctgtggtcccagccacttgggaggctgaggcgggaggatctcttgagtccaggagtttgaggctgcagtgagctatgatcgtgccactgcactgcagtcggagcgagagagcaagatctcatcagggtttacaggaagccaatcttctccaggatcaaggacatgctatatcagccttctcagcactccttctctcacactggaggcaggacatgccatatctggactttgggtttctctgggacatagtctgcaaattattcctctttgtgaacccacagcccagcaagcagggactggcatagggcaggtctcaatacttatttgttaagtaatggcctggccaggtcaccgtgatcaaggtggagtaggaaggcctgaactttggcacaaaaagaaagaagtttcacatgcagacttcggggagcatgggagtgtaaggaagaaggggatagcacagagctacatgagggcaggggccccagagcaccacagaggtgaggccctcagtcctgcaggtccagaaagagcatgccccttgatccaggtacctggaattaacttgcctctccagggcttgagaaaacctgaatgcaactcgtgaatttcctttgagaagtgttaacttccaacaggactttggggtagtctgggagcaggctatcttccaaagcaagcaaagaaatgaataaagcttccccagctctgcctcctcagccaatcgcctctggcctccgaagccccatcctgccatagcccacttccaggtcccttgtgcagatggctgcccaccatatttggctttcatggactgattctctaaaggcctgggagtactgaccaggctggagggaagggcaggctcctgaggccttacagtccctaggaagttgcgtatctgcccaacccctgctctccaccctgcagactgtaaggtttacaagagccaggccctatcatcatcctttctagtctgtttctaagttggaacagagtacggaatgggtacacaggagccagcacagtggttgcgatggtttaagtttgaagccggggcgctgacccagtgaggtcacctggaactgtgcccctttccccttaccagctgggagtctgacatgcttttccattggcgaagacctagctggctctcccctcaccctcttcatacccgctctccagctctccccctccctcctgcccccaccacctcagatccaccagcctttccagctgtcactcaaggcatcatcctgctccctcacctccagtcactggcttcccaggatctctgaatcaagtccctcctctgcatcccacagccactgtcctagaccagggcacctgctcctaggttgtcagagtgactgtcccatcatgcacagctgatcgtgttgttccctggttccaaatccttcagcaacttcccatcactcacagaactggttcaatctcctcagctaggatcttgtcctagcacactccttgggtatcatttctcatgaattccctcttaaatctgaaaatggccaaaattagttcccaaacaggcttttgcaagagctatcttttctgtttcaagtgtcccccgtaccccaccacctacaaccctaaatccctggtgaatttccactgcttttgcaggtcccagctgtgggctctcctt

SEQ ID NO: 1242450 - DNA, 4001 bp, Homo sapiens
catagtgagagcccatctctacaaaaaatttttaaaaattagcctggcgtgggatgcctgcctgtggtcccagccacttgggaggctgaggcgggaggatctcttgagtccaggagtttgaggctgcagtgagctatgatcgtgccactgcactgcagtcggagcgagagagcaagatctcatcagggtttacaggaagccaatcttctccaggatcaaggacatgctatatcagccttctcagcactccttctctcacactggaggcaggacatgccatatctggactttgggtttctctgggacatagtctgcaaattattcctctttgtgaacccacagcccagcaagcagggactggcatagggcaggtctcaatacttatttgttaagtaatggcctggccaggtcaccgtgatcaaggtggagtaggaaggcctgaactttggcacaaaaagaaagaagtttcacatgcagacttcggggagcatgggagtgtaaggaagaaggggatagcacagagctacatgagggcaggggccccagagcaccacagaggtgaggccctcagtcctgcaggtccagaaagagcatgccccttgatccaggtacctggaattaacttgcctctccagggcttgagaaaacctgaatgcaactcgtgaatttcctttgagaagtgttaacttccaacaggactttggggtagtctgggagcaggctatcttccaaagcaagcaaagaaatgaataaagcttccccagctctgcctcctcagccaatcgcctctggcctccgaagccccatcctgccatagcccacttccaggtcccttgtgcagatggctgcccaccatatttggctttcatggactgattctctaaaggcctgggagtactgaccaggctggagggaagggcaggctcctgaggccttacagtccctaggaagttgcgtatctgcccaacccctgctctccaccctgcagactgtaaggtttacaagagccaggccctatcatcatcctttctagtctgtttctaagttggaacagagtacggaatgggtacacaggagccagcacagtggttgcgatggtttaagtttgaagccggggcgctgacccagtgaggtcacctggaactgtgcccctttccccttaccagctgggagtctgacatgcttttccattggcgaagacctagctggctctcccctcaccctcttcatacccgctctccagctctccccctccctcctgcccccaccacctcagatccaccagcctttccagctgtcactcaaggcatcatcctgctccctcacctccagtcactggcttcccaggatctctgaatcaagtccctcctctgcatcccacagccactgtcctagaccagggcacctgctcctaggttgtcagagtgactgtcccatcatgcacagctgatcgtgttgttccctggttccaaatccttcagcaacttcccatcactcacagaactggttcaatctcctcagctaggatcttgtcctagcacactccttgggtatcatttctcatgaattccctcttaaatctgaaaatggccaaaattagttcccaaacaggcttttgcaagagctatcttttctgtttcaagtgtcccccgtaccccaccacctacaaccctaaatccctggtgaatttccactgcttttgcaggtcccagctgtgggctctcctttccagaatgtctccgtttgcaggcttgctcttccattacatctacggctcttagaaagcaggggctgcgtgtggctcatctttgtacgcccagctcccggcaggacgtggcacgaagcagtgccagtgtgaacggatgaatggatcaaagccgggagcagggctgcccccctgcagctctgccctacctctcccgctttaccgtaagtcagcggtaggtctgcagctctccgcctctacctcctccccgctctgggcgtgtctttaaaacccacagtcggcctctctgccccctagaaccgcccccagcttctgtctcacttcctctccagaggcgggccctgagccggcacctcccctttcggacagctcaagggactcagccaactggctcacgcctccccttcagcttctcttcacgcactccaagatctaaaccgagaatcgaaactaagctggggtccatggagcctgcacccgcccgatctccgaggccccagcaggaccccgcccggccccaggagcccaccatgcctccccccgagaccccctctgaaggccgccagcccagccccagccccagccctacagaggtactattgggttaggggatgatggggttaagctttgttggtttgctgtggtggggagaggcgggaagagagggtctaacggaggatttggtcaagtaccctagagagtgacacaaagcgggaagtccagacaccagggtcctgaccgtctcgggtggggcagggaagggagggtaggatagagtagaaaagaggacacggaggagttggggcggcctcgctgggctgcggtttctccactgagcagttgggcaaggtgagaagggtcagtggcctccgggcctgggcccttccgcccaccctcgagccctgcctcaactttgcctcagatgcaggacttcagattagggaggatggaggtagtacccctgttgcgctggcctggagccaggggcatgtcccaggcacggcaaaactaaaaccaacttcccagatccgaggtgagaaactggctcagactgaagaggtatctttgccaaggcctcccagctcatgtggtttctgcttaaggaagcctccccaacgaacccttctcttgccacacctttcctgcccacctcccacctcccccgacaaaggaactacttgggtttcttgctctgctgcctttcaggcccttttactccccttcatgaaagtacagaggacaccgtattacagtaacttttataaacattattacaactaagaataacattacttaacaatactaggtaacatttatgagcacttcaaatgtgccaggtactgtattaagcactttggtttttttttgttgttgtttgtttgttttgctttgttttttgtttgtttgtttatctgtttgtttttgagacggagtctcacactgtcgcccaggctggagtgcaatggtgcgatctcggctcactgcaacctcctccttccgggttcacgccattctcctgcctcagcctcccgagtagctgggattacaggccacgccaccatacctggctattttttatatttttagtagagatggggtttcactatgttggccagattggtctctaactcctgacctcgtgatccacccacctcggcctcccaaagtgctgggattacaggcatgagccaccatgcccggcctgtttttgtattttacaaaatgtggtaaaatatacctaatggataagttcctatgttaaccatttataagtgtaccattcagtggcattaagtagattcacaatattgtgtaaccatcaccaccatctatttccagaactttttcattactccagaaactctgtactctttaaaccataggggagggaaagatggcttgcctccacccttctagtttccttggctgggctatgaattaaatagcctatgaattaaatagtcataaaatagattaccagcggaaaacccatatttaattacatatgtatactcaggagtcccacaatatatgagactcaaagaaaggtcagatgattgaagcctgtataacatcctgagctacggaaaagagcttggagcttctgggtgatggtgataacacaagttatgggagggtgaggagaggagctgtttggtgaatagaggttgtcttgctatgtagattaaaagttcttagataataaaagttgtctggagcagccctcttttaatatagatcattttactaatgtagattttcttttaagatataa

SEQ ID NO: 1242451 - DNA, 4001 bp, Homo sapiens
ctgctatgcccctcgggttggagctggcccatgaaggccttgggacagggcttccttcctctcatgtttttgttcaagttgattaaacctgaggaatttttgcatccaggagcagaggcccacgtgcatttctgcgggagcctgtgattatcaaatcctcaaagggcaaagtgccaagcttagaagaagctaacagcaggccagaaggaatggggaaggccagcagcatccccagaacctcagaaacatcccctcaaggactcccagatctcccagagaacctccagaatctcagcaacatttctgagtttcagtaatgccataagaagccctgcaacctcagtattgcccccaagaagccccagaccttcagtaacacatcagaaccactgcaacacctcaggacactcaaactctggcaaactcaaactctggcaaatcaaccacagattggaacaagatgttcaaaagcctgtgaccatttgcagaaaggccagagacccccgttgctctccaccctcccatctcagcccttgactctgagtccagcagcaaacccaatagtttacaatactcaaacctcaggtacacccccaacttcgatagcacggaagagaacacgcaagagaggcgttccaggagtggggggatggccactgtgcccacctgtgcagcccagtccccttgagagtccatgaataagcagccgagagagtcaacctcatgcgggcccgtgagcttggggtgtgccctcagtggcacagcacactcacacacacatccaactgcccttcgcacacatacgtgcttaattctggcaccagaccaagtctgactccacacagtgggctggaaggcagtgtcgtcggctgccgtgctcacggcaggaagagtatgggtgactctccacctcctgtctctctacctcctacctcccctgccatgtgggagggtcagaagcaccatctgatgtgcccttcctgcaattctcatgcccccctcaccaacagcatcatcataacataaaggatttagaccaggctgttctggtatgagggtggacactggtgaggaggaggagggtagccggctgtgccaggggagcagcatgttctttccctcccagagggctaggctagtactgacctggaggagggaggcagatttcagctcagaacaaaggtagccttctagagtagtgaggcccccatcaagggaggcaatcaagaagaggctgttaacatcaagatgcaacagagggcttcctgccttcggaggactagacacaaggccatgaagattccccagctataagagccccacgttctccgttcccagcacgttcctccctgggctggccaccgtggtgtggccttgagatgtaggctttgtgctgccctccttcctcactgaggacattgactgctgggcagatcccctgacttctctctccttgttcccttgctgaccacaggacagggctctccaccaaccttttgcccacagccagtcagatccaactcagacaggactctgcgaatgtctcctgccttttggagctcctgctagccccccagtgtcccctgagggcagcccaccccaggtctccaaacttactcatcagaattgctccagcccatcactctgctcacttcctgcccctaggctctgactcctgctcacttcccaccgcacaccccatgtgccttctcgctgttccccgacctgttccaatcccacctggcctcccagacttggctccagcctacctccaatcaagcgctctcctgacctctcccttccttgtctctttcctttcctttattgatctctcccggaaacttgtccctccaggcaagcagggtgctcccaacacggggccttctcctctgagcccagcaccagctgggctgggatcctagaggggtggctggttgtgtggtctcggcagttggccctgagaagtgtccccagcacctgctttaaaaggtgtttgatctgctcctcccggaaggcagctccccccttctccagtctggctctgcccctcctcctgccctcacagacctcccgcccttgattccgggatcagaggaacccaccccacccccatctccagctcaggcacagagcaggggctggggccccacacaacacacagggcggcttgtctccagcggtatagcctctccacacccccaaaccgtttgctcgaaacttgatctccttggccctcagagtcacctcagtggagaagcctgcacagggctttgatggctgagtttccccagatgtggccttagagaagctgaggaaccccctacttacctccatttgtccccatccatcactcccagggggccactgcctgatgaattgccagaggggaaccaccagctcggctcttaataaccggatctgcatcctgctgctgcccagctgggctgagggccctgaccacagctaaggggagtcatcacagggcttcagggctggaattccaggtatgatctattcccaggggaagtgaaaaaggccccctcggagctttctcttctatttctcacttctcacagacaggctggggttctggagtcctgctcttcaccccaagtacatgcctgcaacctccaacgctgctggacagtcggctgcatcccccctcacctgagcacaggctctccctacccctccctccccttcctagagggggtatcctgcagggatgcagacaagactggggaaggaaatggtgctcagagggtgctccacctaggtgctgtggcaagcagggcagggagagagtagataaaggccgggccaagaagcggggccctaaattctcaggagaagggccctggagaggcagtctcttccttgaaggagaaagggagtgccatctataaaaaggtgggaccacaggcttttgtatgtgagattggcttccaatgatagtaaaagaccctggaagagagaaggacaatgccagagccaggcctgcccaggagaggcagggagagagggagagagagagcagctcaagccgagaaagggaagcagccagccagcttggatctgatcaccatcttgtccatggagaagaggatttttagttccaaagggttaaacccacataaagagaaaattaacctttggcacacttttaggaatccattcccaaggaatgcctgcatgcatatatatggagacaaaattcccaaggccgtttgtaatggcaaaaataattggcaacaaccccaatatccatccatcaatgctgataagttgacacactgaagtactattttgctgataaaaagaatgaggtaattctctggactgacgtggcagaacctccaagacatattgccaagtaacagtaaccaagaaagcaagttgctgaacaatacataaatcgtgatctcattttatgcttctttaactaggtagacatatgtgtatgtatgtgtgtacacataaaaagtgaatctggcagacacacagcaaactgttcacagtggtcacacttgggggaggggtgaattttggagaatgaagcaggatttttcacttgtttgaaatgcatattttaaaactcatactgcatgtgtaattctttttaaataagcctgctgtgagtaaggagctgtgaaggcatcactgagctgtgtgaatttgattccgtccccagcccaatattgcacacttcccagtctcccttgaagctagatgtagcccttagactaggtattggccagtgacttggaaaaagagtgttgagcacaattcccaggttgtgttctcaaaaagagaggtgttctctttaccccctcctccttctagctgggtgaaaaacagttgtgatagctggatctcaggcagccatcttggactatgagatagaagtcatgagttaagtagaatagagcagtaagttactggcaaagacagagccttagctaaggccagattataaggctgaaggagactcctgctgtacc

SEQ ID NO: 1242452 - DNA, 4001 bp, Homo sapiens
cccagcccctggggaggcacgcaaggatttttccttctcaagtttcaggttttgatggagaacagatgtgcacacatctggctcggcaacccccagcctcacctttctacttctccaaaccgtcagacagagcagggagataagggatggggccaggcctgggaacaacaggggagaactggctctgggtcctacacaggcaagacatcctggcaggaggtgggggacacagaaggggcccagctcctccaccagggtgcccagactaaaccccggtagaatggacccaggcaaagcagctgtggctgggttctcaggccaccctggggcgggctgccttcctgctcccaccctcacctgggctggcctgagcacttctgctaaagggaataggctctcctcatcctctgagaccatccaaagacaacaagggtgcttgtttcctcagtgacttctcaccaggctttctccctttggttctctgccttccccgaatcccccagcctgcccagagaacttgacacttggaaacaccacacccaaatgctcaccacagagaccaataaccccttgaagggaggtctgcttgcctcaactgctctcagcagcttctccatcctggctatgggccagaatcacccagggagccatccctgcagatctgaatcatctgtatttttaacacgtcacacatcatacctaaggtgaccagccttaggtgtcttaacagcagggtgagggatgttgttctcatgtaacagaggcagagactgaatgaaccccagagaggctgtgacttgcccaaggtcacacagcaaatgagtggcagagccagacctagcagcccctgcccaggagctgctccctggccagttgcaacctctgccatcaccccattctgatggctgacagagtgaggtggggtggttccacacttacccctctggctggagctcctcgcccccctggggctcatcgatgtaccagctgccataggagtagtcctctgtggccccgggggaggtctggttccctgctggctgggacgacattctctggcccttctcctttgaccccaggcgagagaaaaaaaaagccactacagatgtgaaaagaggcttaaaagagaaaaaaaaagaaagaaagacggaaaacccaaacaaagaaacatttctctttaatcctgaaggttactttcttacttttagctctctgggaaaagcccgtctgggactgagggcctgagcaagctggcacgggaagaggacagggcctctcgtgtcccctcctcccttcccgcccatcgcactggtcctgcagagatagctgtccccttggggccccggggctcccgctggcgcatctgtctgaccaaccaccagcaggcgtgtgttcaaaggaccattttcaaagaaggcttgtccagtctgagctgcctaaagagacgccccttccttcccctttcccaagcccacctagacagacccacagacacaccagaagggaggcccagggaggaaggagttgcagagatgaaagggtaggcagcccacggccagctccgcactgcctgcctgggccctcccagctgggctcccttgagcccctcccccagcctcagcctgcccctttctggcccctttgggcctcggtgatggaaatacaccataatccttgacaaagcccccctcctgggggaggaggccccagcaccattggcggcctgagccctgcaagggtgtggccaggagccacccccacccccgcacctgacttcacacacatacctgccttcagcgcctgccccagagctcccaagcccctgcccgccacatctgcagtgccgcacacagacaggagaccagcattacagcaacaaccgagtgagacggaccgctggggctgggctggggcggaggcagggaaggggaatctgtccgtttcttctcctagggtttccatgaaggaggcaacatgtgtctcattggtaaaccctttttgttcctacaagttgatttcacaaggagataactcacccccacaaggcggaaattagctctttaaacacaaaccagacccacgggtaggcaagaggagccccgcctgcctcctgctcctcctggagtgaggttgagggtgagcaagggaaggtctgggccagggaggagggctcctccgcattctccctccccaggagcaggaccctgccccagcctggaggaaggggcgagaggcagaagaaggtagaaagcagttctcaggccactgtccctggtggaggtttaggcccctaaaactgtgagggtctctgtccttccaataccctacaaggggcttcggcttggaccctgtcagctaaggcagtcattcaacagcttttttaagaagacattattcatttagtcttttaacttaaatttattgaacacacactatgtgccagcactgttctgagccctgaggcaggagagatgacagttcagcggggacacagccagataactaaatcccctccaaagtctgagggttacaaagggaatcacaggttgagctggtctgtaccatgggaaaccaaatttagtccaagagcatttggggatggggggagattcctgaagaaaagaacctttccgtggtgatctgaagggcaggggaaagtccgctgagcagagggtggcaggctcaggatggggatgggggtgggggaaagtgtgttccccacagaggaaacagcacgggtgaagtctcagagtagacagggcttgaaatcctggaggctctctttcaaattcccaagcctgcagggcaggattaggggctgagcaccctgctagcctgagttcctcccccttcttcccaaatggcccttcttgcaggaagagggctctgttgctctccaccatcccacagagatatcagcatctgctgactcagagctgaacccgagctttatttgatgtaatgaggagcccacactggcccttctgatcccagggatgcgggaaacttgccttccaggcgcgagtgtgagctcccggagggcgggactctatccctcccacccctcctcctgccttcccctgatgctcagcgcctggcccttgggtaagagggacttcagaaattgagcttggcaaagccattgcttgttctggcggccagtattcatttgtgggcctgtcctatacaggcggctgctgtgccctgaggttcaccagctgggcttcccagagtccccgtgcccacaccagaggccagcaagcccttccctgctcaggggtctcagactgttaccttagggagcagccaactcccatctgattttaaatccacctccaaccattggagtccagttccagacagggagcccactccctctacaaggcagcagtgtcaggggttagacatccttgcctatcagaaaccatgccctttggccaggtgtggtggcttacacttgtaatcctagcactttgggaggccgaggcaggtggatcacctgaggtcaggagttagagacccagcctggccaacaaggcaaaatcccatctctactaaaaatacaaaaaattagccggacgtggtggcgcacacctgtaatcccagctactagggaggctgaggcaggagaatcgcttgaacccagggggcagaggttgcagtgagccaagatcgtgccactgcactccagcctggacaaaagaggcaaactccatctcaaaaaaaaagaaagaaagaaagaaaagaaaccatcctcttccttggaggaagcctaactctgccttccccaggctggtttggcagcgagcaagatgagtcaaggcctgcaccaaatggaacctgatgtatggtagggcttaggggagacaacaccagaggggaagtgaagtgggggaagagaagagagacgggagttggctgtttgagacaaggtggtcagggaaggcctcactgagaaggtggtgtgttgctgataccagaggggagagagggaggtacca

SEQ ID NO: 1242453 - DNA, 4001 bp, Homo sapiens
ccagtccccttgagagtccatgaataagcagccgagagagtcaacctcatgcgggcccgtgagcttggggtgtgccctcagtggcacagcacactcacacacacatccaactgcccttcgcacacatacgtgcttaattctggcaccagaccaagtctgactccacacagtgggctggaaggcagtgtcgtcggctgccgtgctcacggcaggaagagtatgggtgactctccacctcctgtctctctacctcctacctcccctgccatgtgggagggtcagaagcaccatctgatgtgcccttcctgcaattctcatgcccccctcaccaacagcatcatcataacataaaggatttagaccaggctgttctggtatgagggtggacactggtgaggaggaggagggtagccggctgtgccaggggagcagcatgttctttccctcccagagggctaggctagtactgacctggaggagggaggcagatttcagctcagaacaaaggtagccttctagagtagtgaggcccccatcaagggaggcaatcaagaagaggctgttaacatcaagatgcaacagagggcttcctgccttcggaggactagacacaaggccatgaagattccccagctataagagccccacgttctccgttcccagcacgttcctccctgggctggccaccgtggtgtggccttgagatgtaggctttgtgctgccctccttcctcactgaggacattgactgctgggcagatcccctgacttctctctccttgttcccttgctgaccacaggacagggctctccaccaaccttttgcccacagccagtcagatccaactcagacaggactctgcgaatgtctcctgccttttggagctcctgctagccccccagtgtcccctgagggcagcccaccccaggtctccaaacttactcatcagaattgctccagcccatcactctgctcacttcctgcccctaggctctgactcctgctcacttcccaccgcacaccccatgtgccttctcgctgttccccgacctgttccaatcccacctggcctcccagacttggctccagcctacctccaatcaagcgctctcctgacctctcccttccttgtctctttcctttcctttattgatctctcccggaaacttgtccctccaggcaagcagggtgctcccaacacggggccttctcctctgagcccagcaccagctgggctgggatcctagaggggtggctggttgtgtggtctcggcagttggccctgagaagtgtccccagcacctgctttaaaaggtgtttgatctgctcctcccggaaggcagctccccccttctccagtctggctctgcccctcctcctgccctcacagacctcccgcccttgattccgggatcagaggaacccaccccacccccatctccagctcaggcacagagcaggggctggggccccacacaacacacagggcggcttgtctccagcggtatagcctctccacacccccaaaccgtttgctcgaaacttgatctccttggccctcagagtcacctcagtggagaagcctgcacagggctttgatggctgagtttccccagatgtggccttagagaagctgaggaaccccctacttacctccatttgtccccatccatcactcccagggggccactgcctgatgaattgccagaggggaaccaccagctcggctcttaataaccggatctgcatcctgctgctgcccagctgggctgagggccctgaccacagctaaggggagtcatcacagggcttcagggctggaattccaggtatgatctattcccaggggaagtgaaaaaggccccctcggagctttctcttctatttctcacttctcacagacaggctggggttctggagtcctgctcttcaccccaagtacatgcctgcaacctccaacgctgctggacagtcggctgcatcccccctcacctgagcacaggctctccctacccctccctccccttcctagagggggtatcctgcagggatgcagacaagactggggaaggaaatggtgctcagagggtgctccacctaggtgctgtggcaagcagggcagggagagagtagataaaggccgggccaagaagcggggccctaaattctcaggagaagggccctggagaggcagtctcttccttgaaggagaaagggagtgccatctataaaaaggtgggaccacaggcttttgtatgtgagattggcttccaatgatagtaaaagaccctggaagagagaaggacaatgccagagccaggcctgcccaggagaggcagggagagagggagagagagagcagctcaagccgagaaagggaagcagccagccagcttggatctgatcaccatcttgtccatggagaagaggatttttagttccaaagggttaaacccacataaagagaaaattaacctttggcacacttttaggaatccattcccaaggaatgcctgcatgcatatatatggagacaaaattcccaaggccgtttgtaatggcaaaaataattggcaacaaccccaatatccatccatcaatgctgataagttgacacactgaagtactattttgctgataaaaagaatgaggtaattctctggactgacgtggcagaacctccaagacatattgccaagtaacagtaaccaagaaagcaagttgctgaacaatacataaatcgtgatctcattttatgcttctttaactaggtagacatatgtgtatgtatgtgtgtacacataaaaagtgaatctggcagacacacagcaaactgttcacagtggtcacacttgggggaggggtgaattttggagaatgaagcaggatttttcacttgtttgaaatgcatattttaaaactcatactgcatgtgtaattctttttaaataagcctgctgtgagtaaggagctgtgaaggcatcactgagctgtgtgaatttgattccgtccccagcccaatattgcacacttcccagtctcccttgaagctagatgtagcccttagactaggtattggccagtgacttggaaaaagagtgttgagcacaattcccaggttgtgttctcaaaaagagaggtgttctctttaccccctcctccttctagctgggtgaaaaacagttgtgatagctggatctcaggcagccatcttggactatgagatagaagtcatgagttaagtagaatagagcagtaagttactggcaaagacagagccttagctaaggccagattataaggctgaaggagactcctgctgtaccccagactccaacacatccaaaagaaacttaagcccagagaggccacatgatgtgccagggtcagtgactgacctaggggaagttttgccagagattcccccccaccactacgcacgcacacgcacacacacacacacacacacacacacacctcactgctttttcccccaagaacattccttcctagagcttggactccgtttcattctatggctgggagactccttctgggattgagggaaggccccaagtgttgattaagccaaattgcaggattgggacacacctctcaatactctgtctgataacacagcagaacccctgcctactgctgggtctctctgtcaatatctgcccctggcttttttttttttttttttttttttgagatggagtttggctcttgttgcccaggctggagtgcaatggtgctatctcagtccactgcaacctccgcctcctgggttcaagcgattctcctgcttcggcctcccgagtagctcggattacaggcatgcaccaccatgcccggctgaatttttttgtatttttagtagagatgaggtttctccatgttggtcaggctggtctcgaactcctaacctcaggtgatctgcccacctcggcctcccaaagtgctgggattacaggtatgagtcacggtgctcagcccct

SEQ ID NO: 1242454 - DNA, 4001 bp, Homo sapiens
tgggtctcactgtcctctctcaaatccggcctggagattctccagttgtgaactctccccacaaggcccccgtccctgcacaccagtaaccagttgtaacaagaaggtcacagagagtggttgtgacttcctaggtgcccccattgcctcccacctgccccctcctggcccccagctgccctgcccagtctggtgcgggcagggtgggcaggctgggttgaagatccatggatagcgggtggccgcgtggctcaagctgcaaggtgagcccacttcttgagcccaaggtacctcctcagcttggggctagaatcgcttggagctcccatctgcaaaatgggaggctcggctctgagctgttaagaaagatgctacctgggaagacggcaggaggcaagaagtgttaggaagagaaggatggtaatgatgtgcccctgaagaatttctccaaaggcctgggcagcagagtcaagggcctgccctctggagctggctttaaaggggcactgatacccaggaaggcccagccctgccctcaggagagcaaaagtgctcaaaagacagaactgccaaagcctgaggagcggggagggaaaggaggagatggcttgggcagtcttgcaggctccctggaggagggggcctggagcagggccctgaagccatggaagatctggaatggtaacaagaatgaattgacacgtgtctcaggagtgccaagaagggaagtctgagagacaaggagagagtagcataagggtcagggcagggctccctcgctgtgaccagcatgaacccacgtgggcactcagatgaggctgatgccagtatccaaggagcagctcaaaccagcaggtctcccaactgggcacagattggcgggtggctaagccctgctcactatgggaggaggtcctaaaaagcttctggactctgagccagtgaaggccatctgccatttgggcttggcacagagctgctatgcccctcgggttggagctggcccatgaaggccttgggacagggcttccttcctctcatgtttttgttcaagttgattaaacctgaggaatttttgcatccaggagcagaggcccacgtgcatttctgcgggagcctgtgattatcaaatcctcaaagggcaaagtgccaagcttagaagaagctaacagcaggccagaaggaatggggaaggccagcagcatccccagaacctcagaaacatcccctcaaggactcccagatctcccagagaacctccagaatctcagcaacatttctgagtttcagtaatgccataagaagccctgcaacctcagtattgcccccaagaagccccagaccttcagtaacacatcagaaccactgcaacacctcaggacactcaaactctggcaaactcaaactctggcaaatcaaccacagattggaacaagatgttcaaaagcctgtgaccatttgcagaaaggccagagacccccgttgctctccaccctcccatctcagcccttgactctgagtccagcagcaaacccaatagtttacaatactcaaacctcaggtacacccccaacttcgatagcacggaagagaacacgcaagagaggcgttccaggagtggggggatggccactgtgcccacctgtgcagcccagtccccttgagagtccatgaataagcagccgagagagtcaacctcatgcgggcccgtgagcttggggtgtgccctcagtggcacagcacactcacacacacatccaactgcccttcgcacacatacgtgcttaattctggcaccagaccaagtctgactccacacagtgggctggaaggcagtgtcgtcggctgccgtgctcacggcaggaagagtatgggtgactctccacctcctgtctctctacctcctacctcccctgccatgtgggagggtcagaagcaccatctgatgtgcccttcctgcaattctcatgcccccctcaccaacagcatcatcataacataaaggatttagaccaggctgttctggtatgagggtggacactggtgaggaggaggagggtagccggctgtgccaggggagcagcatgttctttccctcccagagggctaggctagtactgacctggaggagggaggcagatttcagctcagaacaaaggtagccttctagagtagtgaggcccccatcaagggaggcaatcaagaagaggctgttaacatcaagatgcaacagagggcttcctgccttcggaggactagacacaaggccatgaagattccccagctataagagccccacgttctccgttcccagcacgttcctccctgggctggccaccgtggtgtggccttgagatgtaggctttgtgctgccctccttcctcactgaggacattgactgctgggcagatcccctgacttctctctccttgttcccttgctgaccacaggacagggctctccaccaaccttttgcccacagccagtcagatccaactcagacaggactctgcgaatgtctcctgccttttggagctcctgctagccccccagtgtcccctgagggcagcccaccccaggtctccaaacttactcatcagaattgctccagcccatcactctgctcacttcctgcccctaggctctgactcctgctcacttcccaccgcacaccccatgtgccttctcgctgttccccgacctgttccaatcccacctggcctcccagacttggctccagcctacctccaatcaagcgctctcctgacctctcccttccttgtctctttcctttcctttattgatctctcccggaaacttgtccctccaggcaagcagggtgctcccaacacggggccttctcctctgagcccagcaccagctgggctgggatcctagaggggtggctggttgtgtggtctcggcagttggccctgagaagtgtccccagcacctgctttaaaaggtgtttgatctgctcctcccggaaggcagctccccccttctccagtctggctctgcccctcctcctgccctcacagacctcccgcccttgattccgggatcagaggaacccaccccacccccatctccagctcaggcacagagcaggggctggggccccacacaacacacagggcggcttgtctccagcggtatagcctctccacacccccaaaccgtttgctcgaaacttgatctccttggccctcagagtcacctcagtggagaagcctgcacagggctttgatggctgagtttccccagatgtggccttagagaagctgaggaaccccctacttacctccatttgtccccatccatcactcccagggggccactgcctgatgaattgccagaggggaaccaccagctcggctcttaataaccggatctgcatcctgctgctgcccagctgggctgagggccctgaccacagctaaggggagtcatcacagggcttcagggctggaattccaggtatgatctattcccaggggaagtgaaaaaggccccctcggagctttctcttctatttctcacttctcacagacaggctggggttctggagtcctgctcttcaccccaagtacatgcctgcaacctccaacgctgctggacagtcggctgcatcccccctcacctgagcacaggctctccctacccctccctccccttcctagagggggtatcctgcagggatgcagacaagactggggaaggaaatggtgctcagagggtgctccacctaggtgctgtggcaagcagggcagggagagagtagataaaggccgggccaagaagcggggccctaaattctcaggagaagggccctggagaggcagtctcttccttgaaggagaaagggagtgccatctataaaaaggtgggaccacaggcttttgtatgtgagattggcttccaatgatagtaaaagaccctggaagagagaaggacaatgccagagccaggcctgcccaggagaggcagggagagaggga

SEQ ID NO: 1242455 - DNA, 4001 bp, Homo sapiens
ttacaggcacctggcccccagccagtgcccaggccctgaggctcccaaggacacagcttcagattagagccttcacctaggtcagaaaccatcctcatgggttcctgggcctgtcctcattctggtctctcgcaggccacacatacacagcaggatatgtggagcccacaggctctcggtcagtcaggcaagatgagtggggagcacgcccttgctgactgcaggctattttccaggtggtcagaaccctgagtcctccaaacaacagctccttccccgaggcctgggtggagcctctgtccctgctggatgacccaagcccagccaggccgcagccccagcccctggggaggcacgcaaggatttttccttctcaagtttcaggttttgatggagaacagatgtgcacacatctggctcggcaacccccagcctcacctttctacttctccaaaccgtcagacagagcagggagataagggatggggccaggcctgggaacaacaggggagaactggctctgggtcctacacaggcaagacatcctggcaggaggtgggggacacagaaggggcccagctcctccaccagggtgcccagactaaaccccggtagaatggacccaggcaaagcagctgtggctgggttctcaggccaccctggggcgggctgccttcctgctcccaccctcacctgggctggcctgagcacttctgctaaagggaataggctctcctcatcctctgagaccatccaaagacaacaagggtgcttgtttcctcagtgacttctcaccaggctttctccctttggttctctgccttccccgaatcccccagcctgcccagagaacttgacacttggaaacaccacacccaaatgctcaccacagagaccaataaccccttgaagggaggtctgcttgcctcaactgctctcagcagcttctccatcctggctatgggccagaatcacccagggagccatccctgcagatctgaatcatctgtatttttaacacgtcacacatcatacctaaggtgaccagccttaggtgtcttaacagcagggtgagggatgttgttctcatgtaacagaggcagagactgaatgaaccccagagaggctgtgacttgcccaaggtcacacagcaaatgagtggcagagccagacctagcagcccctgcccaggagctgctccctggccagttgcaacctctgccatcaccccattctgatggctgacagagtgaggtggggtggttccacacttacccctctggctggagctcctcgcccccctggggctcatcgatgtaccagctgccataggagtagtcctctgtggccccgggggaggtctggttccctgctggctgggacgacattctctggcccttctcctttgaccccaggcgagagaaaaaaaaagccactacagatgtgaaaagaggcttaaaagagaaaaaaaaagaaagaaagacggaaaacccaaacaaagaaacatttctctttaatcctgaaggttactttcttacttttagctctctgggaaaagcccgtctgggactgagggcctgagcaagctggcacgggaagaggacagggcctctcgtgtcccctcctcccttcccgcccatcgcactggtcctgcagagatagctgtccccttggggccccggggctcccgctggcgcatctgtctgaccaaccaccagcaggcgtgtgttcaaaggaccattttcaaagaaggcttgtccagtctgagctgcctaaagagacgccccttccttcccctttcccaagcccacctagacagacccacagacacaccagaagggaggcccagggaggaaggagttgcagagatgaaagggtaggcagcccacggccagctccgcactgcctgcctgggccctcccagctgggctcccttgagcccctcccccagcctcagcctgcccctttctggcccctttgggcctcggtgatggaaatacaccataatccttgacaaagcccccctcctgggggaggaggccccagcaccattggcggcctgagccctgcaagggtgtggccaggagccacccccacccccgcacctgacttcacacacatacctgccttcagcgcctgccccagagctcccaagcccctgcccgccacatctgcagtgccgcacacagacaggagaccagcattacagcaacaaccgagtgagacggaccgctggggctgggctggggcggaggcagggaaggggaatctgtccgtttcttctcctagggtttccatgaaggaggcaacatgtgtctcattggtaaaccctttttgttcctacaagttgatttcacaaggagataactcacccccacaaggcggaaattagctctttaaacacaaaccagacccacgggtaggcaagaggagccccgcctgcctcctgctcctcctggagtgaggttgagggtgagcaagggaaggtctgggccagggaggagggctcctccgcattctccctccccaggagcaggaccctgccccagcctggaggaaggggcgagaggcagaagaaggtagaaagcagttctcaggccactgtccctggtggaggtttaggcccctaaaactgtgagggtctctgtccttccaataccctacaaggggcttcggcttggaccctgtcagctaaggcagtcattcaacagcttttttaagaagacattattcatttagtcttttaacttaaatttattgaacacacactatgtgccagcactgttctgagccctgaggcaggagagatgacagttcagcggggacacagccagataactaaatcccctccaaagtctgagggttacaaagggaatcacaggttgagctggtctgtaccatgggaaaccaaatttagtccaagagcatttggggatggggggagattcctgaagaaaagaacctttccgtggtgatctgaagggcaggggaaagtccgctgagcagagggtggcaggctcaggatggggatgggggtgggggaaagtgtgttccccacagaggaaacagcacgggtgaagtctcagagtagacagggcttgaaatcctggaggctctctttcaaattcccaagcctgcagggcaggattaggggctgagcaccctgctagcctgagttcctcccccttcttcccaaatggcccttcttgcaggaagagggctctgttgctctccaccatcccacagagatatcagcatctgctgactcagagctgaacccgagctttatttgatgtaatgaggagcccacactggcccttctgatcccagggatgcgggaaacttgccttccaggcgcgagtgtgagctcccggagggcgggactctatccctcccacccctcctcctgccttcccctgatgctcagcgcctggcccttgggtaagagggacttcagaaattgagcttggcaaagccattgcttgttctggcggccagtattcatttgtgggcctgtcctatacaggcggctgctgtgccctgaggttcaccagctgggcttcccagagtccccgtgcccacaccagaggccagcaagcccttccctgctcaggggtctcagactgttaccttagggagcagccaactcccatctgattttaaatccacctccaaccattggagtccagttccagacagggagcccactccctctacaaggcagcagtgtcaggggttagacatccttgcctatcagaaaccatgccctttggccaggtgtggtggcttacacttgtaatcctagcactttgggaggccgaggcaggtggatcacctgaggtcaggagttagagacccagcctggccaacaaggcaaaatcccatctctactaaaaatacaaaaaattagccggacgtggtggcgcacacctgtaatcccagctactagggaggctgaggcaggagaatcgcttgaacccagggggcagaggttgcagtga

SEQ ID NO: 1242456 - DNA, 4001 bp, Homo sapiens
ctacaagcgaggtccctgagagtttaggcgttactggttgaaatgctgcaacggggcaaaaaagagaaagctgccctgccaaggtccaaaatcacctaggagaagccccagttggaattctttctgtccacctggcccccttctgtctcctttcttcgtatgcttttagatagcttaaacacaaccctcagcgggcctcatgttaggaaatctgctcagcaactcaatatgtctaactactgtctggcattgttgtactgaagtagtaagggggtagaggaatccagctgtgtccttattttccaaatcccatctttactagctaacattattaagcgctatgtgccagcacggttttaagtcgtttgcatacacagtatcaactcatttaaccgggtgcaacaactctgtggtaactaatattatcattctcattttataaatggggaaactgaggtatagaaagactatgtaacctgctcaaggtcatatggctaggaagaggtggagctgggacaccaacccagacagtcacaccccaaaaccactaaactacactcctcccatcagttttcctctctagaggctgaggtcttcagctcttcacctccagattttccaggcccaatccctcagaactggtctcctgttacttaccataagagcagctgttgaaggttacctaggagggaaagagtaaggaagaaaactaccccaatttcactttccttgccctgccacatcccagtcccagccctggccacactcacctccctggcactgcccattggtatcaggctctggctgccccaaaatggagaagacctcatcctgcagggagtgagtgacacggagcagcccctcctgaaaggcagcatagaggggggcccccactgtgcgtagcagaccgccccaaagagcctccttggagcctagctcccctgttggggtaagcaaacccaacagaccctgcaaaaagtgaggagctgcctccctcccatcgaggcctgtggcattggtggggtccacactgggctgcacctgcaccagagcttgccagcgtgtgccctctaacaacagcagcagagaaggcaaccagtcagcagccaggacacagtcagacggcccatcacgggtgcatgggggccgagttggggtaggggggcccccaggaactaaggctcccagcagcacctccacaagtccacccagcacccctgcctggtgcaccaggaaatctcggggagtctgctcctgtcccagcagtgccagcatatcccctagcagccctagcattggctcccagtcggggctacctctcagtgtcactagaaaatcatggagccgcagagcaggcggctggagaggtgggggctctcctactggtccttcccccattctcccaggctcaaaggaagaagaaatgttggccaggaatgtaaagaaccgtgagcggctcagggagccctggggagcctggtccagagtggagagcaatgacttcaggaaggagagaccagggtccagggaatgaggcccagtaggggccagagtcactgtaaggagagaaaccagaggtcactgaaggagaggaacacagagcccaaactcaaccctgcccctgagcacagttccctacctggatctaaagatgaggtgaggggatggtgagctgaacccctttcactggcctacagtaagtcttggcctgcttttcttaaccctcatttttcccttttgcacaagtctctgcctctctcctttgtccttctatctaacaggttcacctccatattcttaaagtctttttccagccaccctcctcctcatccccagttctgctcactgttcttcttacctgcaaaggacagcagcagcagcagcagcagcagcagcagcaggggccagaggctgagagccatgtttccaagtgaacactggtaccggaggtgagttctggttattctcacctgtgtgggatagccaggtgagggcagggcactgcaggcaacctgaggctccactgacactgtagtgtggtctttcaggaaacaatatgtgtaacctgacagcaggtttgttacctgagccgctgaatatctgatcctttagctctggagaagggtatgcttctgtgagagggactaatgataggggatcccaggggcccctcagagaaacccaaggagattgcttgagttaggagccagtgatgcagaaaggaacaggcagacatggagatggagaactggagaccaggggtgtaatctggggttctgcagaagcaaagaaaacaaagaggatatgaaggagctaagaagcaagtaggatttgaggaaattgaagaagaaatgacgcccaggagaaacaaactgcacagcaaggtataaacagacgagaggtccagtccaaggatggagaattcaggaagaggagagctgctttcaactactacccagaaccacagagtgtcaagagctgagcagtaccccagagatcacatacaccaaactttttcacttatggataaggaaacagacccagagaaatgtgatttgctcattaggccattcaaatgtttgggtctttccttccccctccgggatcccctatcatttggttctttctctgtggcctaggtgaaagccctatcaaaaactctgagctgagaagacagaaaccagattaaatcactatgcacagggactgatctccctacacacagaactgctcatggaacagagaaagagatttcattcaaaataatctggtctggtcagggttagaagtcttttttcgtcatttttgttttttgttttattggttttttggttttggtttttttgagatggaatctctctctgttgcccaggctggagttcagtggggctatctgaccactgcaacccctgcctcctgggttcaagcgattttcctgcctcagcctcccaagtagctgggattacaggcacgtgccaccacacccagctaatttttgtatttttagtagagatggggtttcaccatgttggccaggcaggtcttgaactcctgacctcaagtgatctgcccacctcagcctcccaaagtgctggggttacaggtgtgagccaccgcggcatttttttttttttttttgagatggagtctcactctgttacccaggctggagtgcagtggcactatcttggctcactgcaatttctgcctccttcattcaagcgattatcctgtctcagcctcccaagtagctgaggactacaggcatgcgccaccgcgcacggctaatttttgtattttttggtggagacggggtttcactatgttgcccaagctggtcttgaactcctgacctcaagtgatttatccacctcagtctcccaaagtgctgagattacaggcttgagctactgccccagtccaggattagaagtcttttccattctccatctatatctccccaaaggccttcactttataccaactctaaatagtaattcaacactgaagctatacccaaacttttattctgtccttctttccctagaacccttccccattctctccctcaaatccacacatggaacttcattattaatgtgcttctgatctagaagattcacttaggatcatagagttttatttttgtgtatttatttacttagagacagggtcttggtccatggcccaggctggaatactgtggtatgatcctagctcactgcaccctcaaactcctggactcaagcaatcctcctgcttcggcctcccaggatcacagaagagacctgaggaatcctctggtaagaacttctcattttatagacaggggaattgaagcccagagaaatggaatgacttaacccaggtcacaaagacagctgggagcaatgatgggattttccaaggcaaatcaaaagttgagatcagtgaaatgatctgttgtgtaattttaccaatattccctttgcccatcaaggataccacacctagtctaaaaa

SEQ ID NO: 1242457 - DNA, 4001 bp, Homo sapiens
gagtccctgcctttgtgaagtgttgcttcaaaaccttcatagtcctggaattcaggaaaagcattcattaaaaaaggaaaaaattaaagtctgacttgtattgtgtgtgctcctctctgggtgtcagcctgtgtctactggggtctagtcacatactgcaaataccagcccagccgagacttgtaaagctctgcccacccagtggcagtgatggcaatggtgtgggagagtcatgtgggtcactcccggaccgaagaaccaagagagcgacccagtccctgctgaaatccacgccatgcctaatccatgagggcttcatttttatactaatcactgccactatcaatttcctcctcctctctgctctcactgctcttttccaacaccatcatgaacttatccacctcctgattacgagtgcttctccccctaccaggtgtgaacctcagggagccaggacattgttatcatcatctctgcatccccaaggactaatcccatctctgacaaatactaagtgctcagtaagtatttgctgactcaagaaagatgcagaacgagcctgtacctactgcaccaactggaacaagcagaacaagtcacctcttctggaaagggcaggaagcagaaacacagaggagaccagcatagaccagaaccaccgctgagccgactacagtgcccagtcctccctcatgcaccctccttacccctcacctgccactctctgagccccaaagccacccacattcacctccccaagggctagaaagccagcaagcattcccccagcgtcccaccccaccccactggggctgctcttatcagagcccaagacaccaacgttaagttacccttaaacggagtaatttgcatctgtaatttccggataaaggagtgtatttcatcagccctgctgaaccctggacagcagagatttctaccacccgtctgccgaagacacagcggtgccttgctcctccctggctaaacgcatttgctagcccatccctgcaaaacaagtcattttctttcccttgcgctaaaacccgtccataaacaaatccttctgtgtccctaagaaacggctcccacgcccacggagggcgccctgcacatacagaaatacacactcacaaaccccaagagccaccaggtgtaagcacgtttgaattctgttctttaagaacaagccaacaacaataacaaaatctatctactagaatgtaactgaaactaaaagcagcggctaggaagcttatggaaacggagctataaatgccagcagcctgacatttataagttgcaaaactacttatggcgctaatagttcaaacagggttttaaaacagcccttggggaggccgctttcaaagaagcgcacagctccaggcagcgggcaagtccttgcttttctgcgccggtttttcaagactctccgatcttttgtgccatttactatgaacagcactcagctgtgcgagcgtgtatatttcagcccaggcaggcgagtctgggagccctggcgcacgcggggtccgcgccccggctgggtcggttgcaccgcagcgagcaacgcagtcccctacctgggtggcaaatccgctggcggccgcctccggatgcaggcagagcagcgtccgccccggcagccccgcgtgcagctccggctaacgcggagctgggcgatccgggcggaggcaggcgccggcgggtgtcacacctgcatcaccgcgcccacgccgcccccgccagccgcccaggcgcagcgcgcagcgcgcccccgcgctacagagcacgcggggcgggaggctcctgggtcctctactcagcgggatcagatcctaacccgctttcttcccggcccgggcattaaaagtattcgctgcgggcagctctgcttctaaatctccttctgatcgaaggctgggtgtggagatagctcagagggaaggaggaccagtgaggccgcaaggtctccggatttgcagaccaataaatattaaacttcttattcctcgagttttgtaaccagctgatcatgggcgtcgtctcgctgtctccaccccgcctagggcgagggggcgctgtggactccacatgcccttccacccactccgaactaggatgcgtcagaggactagacgcaagttcccgggaaggggaatcctctgatcacgccgcccccaaagtatcgtcgatcatggtgctgttcgactgctttgttctcgtttgcctcatcaggaactgaagagaacctacccggccagcgcggggaggaggaaagcctgcaaggcttggtgcattcaaacaagccctccacctctgtctccctccttccaaaccaccacccactaactccactgacgagagttcagcaaactaaactgccaaggctcagcaccgaaagactctttaggagcatagggctccttctaggagcaagtaaggagcaaggaaaggacactggaaattcggatgcggactcaaacagcacaacactgcaggtgcctggcccctctaggatccgaagctacgttcctttcctaacagggctaaaatgaaggccagttctggaagagccttccccctcttctccatggagcacatcctccatcatgaggtcttcagctggactccccactctcgctgccgtcaatgacctgcgctccagctccctgcctcttccctggctggggcctccgccgactcgcacctggaccacccgcaaggacttcaacttctcaggctcctggagtcatttctcaacatgtaaatctgatcttgactctttcctacctaaaaccatgtgatggcttcccagtgtccttgaaaaatccgaaacatttttttttttttttttttgagacagggtctggctctgttgcccaagctgtggtgcagtggctggatcacagcctcaacctccgcagctcaagcaatcctcctgcctcagcctctcaagtagctgggactacaggcatgcgccaccactcctggccaattgttaaacgttttgtagagtagaagtctcactctgttctccaggctggtctggaactcctgagctcaagtgatccgcctgcctcagcctcccaagctgggatgcaggctcgcgctacagcgccagcctaacacatcacatttagtgctggaaagcaaacccttgctaaccccccacagcctcacccctccaccctcatcttttcccctgtactctggccatatggaacttctaattccttggacgtgcctcactctttcacctctaggtctttgcacatactgttccctctgcttggaatgttctcctcctcccattcctcttacctctgcctaaagccttattctcagctgagccatctcttcctcaaagaagtcttccctcattcctgaaatacctgaattctccctgctccatgtgcccagagctaccattagttcctctactacagcacccaacgccttactaaagttgttgtccggcttccataagagaatgtaagctgtaggaacgcacgcctctgttgtctgcctcatatggacagggacccagaatatcgtatctgcttaatatctattgctacagccaccatccagattaaggtggcaaacagtcctggcatcaaggggtctctttatgctctttcccaggcaataccagtcaccctccacctaggtgtaaccaccactctgacccttttcagcagcaattagtatcacctgctcttgaactactcatgaatggagtcatacagtatatatatagtatgtactcttttgggtgtggcttcttttactcaaaataatgtctgtgagattcttccatatcattacatatatcagtaggtcatttttttcttattgctgtatggtattctattgcctgaatataacacaatttatcccttcttctatgagtgtacatttgagttgcttccagattttagctgtgatgaataaagctgctatgaacttgttttttgttcttttttggtttt

SEQ ID NO: 1242458 - DNA, 4001 bp, Homo sapiens
tgagcatccacgctcatgcttcttgtagtgcacgctgcttttcaaataccttaatgatgatgtaggcgcatgtaacacacatctctggcaaatacataacacaagagcttttcattctatcatttttcgtcacccatcacagctttggtccaggaagaaacatccttgagattggattttcatctcccagaaaagactggtagtaacagctttagttttcccttattccacccatttagggaaaatcaagggagagttttccttttgaactgggctgggacaagaacagataggtcggggacccagggagaagcagacagaagttcatctgctctgaaactccctcagaattttccagagtccctgcctttgtgaagtgttgcttcaaaaccttcatagtcctggaattcaggaaaagcattcattaaaaaaggaaaaaattaaagtctgacttgtattgtgtgtgctcctctctgggtgtcagcctgtgtctactggggtctagtcacatactgcaaataccagcccagccgagacttgtaaagctctgcccacccagtggcagtgatggcaatggtgtgggagagtcatgtgggtcactcccggaccgaagaaccaagagagcgacccagtccctgctgaaatccacgccatgcctaatccatgagggcttcatttttatactaatcactgccactatcaatttcctcctcctctctgctctcactgctcttttccaacaccatcatgaacttatccacctcctgattacgagtgcttctccccctaccaggtgtgaacctcagggagccaggacattgttatcatcatctctgcatccccaaggactaatcccatctctgacaaatactaagtgctcagtaagtatttgctgactcaagaaagatgcagaacgagcctgtacctactgcaccaactggaacaagcagaacaagtcacctcttctggaaagggcaggaagcagaaacacagaggagaccagcatagaccagaaccaccgctgagccgactacagtgcccagtcctccctcatgcaccctccttacccctcacctgccactctctgagccccaaagccacccacattcacctccccaagggctagaaagccagcaagcattcccccagcgtcccaccccaccccactggggctgctcttatcagagcccaagacaccaacgttaagttacccttaaacggagtaatttgcatctgtaatttccggataaaggagtgtatttcatcagccctgctgaaccctggacagcagagatttctaccacccgtctgccgaagacacagcggtgccttgctcctccctggctaaacgcatttgctagcccatccctgcaaaacaagtcattttctttcccttgcgctaaaacccgtccataaacaaatccttctgtgtccctaagaaacggctcccacgcccacggagggcgccctgcacatacagaaatacacactcacaaaccccaagagccaccaggtgtaagcacgtttgaattctgttctttaagaacaagccaacaacaataacaaaatctatctactagaatgtaactgaaactaaaagcagcggctaggaagcttatggaaacggagctataaatgccagcagcctgacatttataagttgcaaaactacttatggcgctaatagttcaaacagggttttaaaacagcccttggggaggccgctttcaaagaagcgcacagctccaggcagcgggcaagtccttgcttttctgcgccggtttttcaagactctccgatcttttgtgccatttactatgaacagcactcagctgtgcgagcgtgtatatttcagcccaggcaggcgagtctgggagccctggcgcacgcggggtccgcgccccggctgggtcggttgcaccgcagcgagcaacgcagtcccctacctgggtggcaaatccgctggcggccgcctccggatgcaggcagagcagcgtccgccccggcagccccgcgtgcagctccggctaacgcggagctgggcgatccgggcggaggcaggcgccggcgggtgtcacacctgcatcaccgcgcccacgccgcccccgccagccgcccaggcgcagcgcgcagcgcgcccccgcgctacagagcacgcggggcgggaggctcctgggtcctctactcagcgggatcagatcctaacccgctttcttcccggcccgggcattaaaagtattcgctgcgggcagctctgcttctaaatctccttctgatcgaaggctgggtgtggagatagctcagagggaaggaggaccagtgaggccgcaaggtctccggatttgcagaccaataaatattaaacttcttattcctcgagttttgtaaccagctgatcatgggcgtcgtctcgctgtctccaccccgcctagggcgagggggcgctgtggactccacatgcccttccacccactccgaactaggatgcgtcagaggactagacgcaagttcccgggaaggggaatcctctgatcacgccgcccccaaagtatcgtcgatcatggtgctgttcgactgctttgttctcgtttgcctcatcaggaactgaagagaacctacccggccagcgcggggaggaggaaagcctgcaaggcttggtgcattcaaacaagccctccacctctgtctccctccttccaaaccaccacccactaactccactgacgagagttcagcaaactaaactgccaaggctcagcaccgaaagactctttaggagcatagggctccttctaggagcaagtaaggagcaaggaaaggacactggaaattcggatgcggactcaaacagcacaacactgcaggtgcctggcccctctaggatccgaagctacgttcctttcctaacagggctaaaatgaaggccagttctggaagagccttccccctcttctccatggagcacatcctccatcatgaggtcttcagctggactccccactctcgctgccgtcaatgacctgcgctccagctccctgcctcttccctggctggggcctccgccgactcgcacctggaccacccgcaaggacttcaacttctcaggctcctggagtcatttctcaacatgtaaatctgatcttgactctttcctacctaaaaccatgtgatggcttcccagtgtccttgaaaaatccgaaacatttttttttttttttttttgagacagggtctggctctgttgcccaagctgtggtgcagtggctggatcacagcctcaacctccgcagctcaagcaatcctcctgcctcagcctctcaagtagctgggactacaggcatgcgccaccactcctggccaattgttaaacgttttgtagagtagaagtctcactctgttctccaggctggtctggaactcctgagctcaagtgatccgcctgcctcagcctcccaagctgggatgcaggctcgcgctacagcgccagcctaacacatcacatttagtgctggaaagcaaacccttgctaaccccccacagcctcacccctccaccctcatcttttcccctgtactctggccatatggaacttctaattccttggacgtgcctcactctttcacctctaggtctttgcacatactgttccctctgcttggaatgttctcctcctcccattcctcttacctctgcctaaagccttattctcagctgagccatctcttcctcaaagaagtcttccctcattcctgaaatacctgaattctccctgctccatgtgcccagagctaccattagttcctctactacagcacccaacgccttactaaagttgttgtccggcttccataagagaatgtaagctgtaggaacgcacgcctctgttgtctgcctcatatggacagggacccagaatatcgtatctgcttaatatctattgctacagccaccatccagattaaggtggcaaacagtcctggcatcaaggggtctctttatgc

SEQ ID NO: 1242459 - DNA, 4001 bp, Homo sapiens
aaagtctagggcagtgctggggacccagggagaatcaacaggtatttactcatcacctgtggatacctgtcacatcaccgcagtcattccatatgacaacccccatgttcctctcacttctaatttttaaaagtcagtctcaaatctttaactcacagctgcaaactgtactcttaaaatatttgtgaaattgtgcagatgttatttccatctgtccttttgagaactactgatagtgtgatttgggaatatttccaattctggctgaggcagggcagggcgagggccaaacgctagggctggactgggcatagtttacatcagccacaggtgtcaccccgccggtgtcagagggtttgcttccctgaaatagtaactgtttatatcactctgcacttgtaataacatcctgccaaagggccccactttcccacaacttttacactacgcagagatctgacgtcagcgtgtgctgtgagcaaaacatcttcgatcaagctctgttctgcatgagggttgctgcccctcccaagatcaaacaaggcagccgcccagagagccacaactgcggcttccaactgggaaatcatattggcaaaataaaaaccgttttggaaattaatttgagttttcccctgaggagcgctatagacagcggggctaccataagccgtcacttctgcaagtgagagaggtttctcggttgactcttagatctgggtctactgagtctacggagcacggaaaatggaaggaaaacctagagctaacagggtggcctatcaggatgcgcccagtcacgcttgtcaagagttaaagcagctgccacctaaccccatgacgaggacggggctatccgctaggacctgccgccccgcgctcgcccgctgagtcgatggaccagcggaccgagtccgggtccccatgccattcgggcaccctctgggcgggccctaccggtccgcgacgccgcgcccctggtgaaggggccgctgccccacgccgtcaagggcagggtgctggggcgacggcagcgggtatggggtcagcgcgccatccccgcgcacggacctgccgctcctcggcctgtatcccgtactcctcgcgcatccgcagcagcgcgtcctccagccgcgcgcgcagctgctccaacccgagcgcctcgcgccgcagcgcctctgcctcctgcgcgcacagccgcgtctcttcctccgcctggagtctgctctcctggccgcgccgcagcgcctcctccagctcgcgcacctcgtcctcgtacagctgcaccgtctcccgccacgactcggccaccagcagtgcgtagctgtcgtgcacctcccgcaggcgtggcggcggcgcggcggggccggtggcgcgggcgcggaaatgcatggtaaggctggcggcgcgcgcgcgcagctccctcacgtcgcgttcgtgggccgcgtcgaggcctcggcgctcggcctgcagccggcccagcagcgcctcgagggcggcgcgcgcgcccagcgcctcctgcagctcgcgctgctgcgcacccagctcggcgtccaggcggccgcgggcggcgcgctcctccgcatccaggcgctgcagctcccgcagctcgcgccgcagagcgtcccgctcgccctccgccagcgcagtggcccagctcagctcgtccagctgctgccgcaagctgcgcgcctcctcggcgcagcgggcctgcccctcggcccacaggccctctcgcccgcgccggccgcgcagctcctcctccaggagtaggttttcgcgctccagctcccgcacccgacacacgtagtcatagagccgggcgttgagctcctggagctcggccttctcggggcccgtctgcagccgccaggacagcatcttgccgggcgtgcggggttctcgcggctggccggctccctcctgccctggtcttgtcccggtctcgtcctctccgccgcgacgctccggcctcgccgctgccccggaggcccgcagactgggacgcgagcgggagagcccaggcacttagcggacggggcgggcagactgggcgggcggcctgggcgagggccgcggcctccagccaatcagagcgcggcccggcgcggcctctgcggccgcacagcgccccctgccgcaccttggcggccgcaggtggtcggtgcgggcagtcgggtaacagcgggcggggtggcgggctagccaggccgggctcagcgaagggacgccggagagggcgtccgggagcatacgagtgtcctggccttggtggatggaaatagaagcctattgagttgctgtggtgctggcgattttggagcgacttcttacccgaggccctggagattggtggcttttctatttttaaaaaaacgatatgggccgggcgcggtggctcaggcctataatcccagcattttgggaagccgaggtgggaggctcgcttgagcccaggagttcgagaccagcctgagcaacatagagagaccctgtctctaccaaaaaaaaaaaaaaaaaaaaaatatatatatatatatatatatatggagcctggcgtggtggtgtcacacgcgctgcttgggaggctgaggcgggaggattactcgaacccaggagttcagggctgcagtgaacctgattgtggcactgcgctccagcctgggcaacagagagaggcctcatctcatatatatacattacacatacatgtgcattaatttttttttttttttttttgagacagagtgtcgctcttgttgcccaggctggagtgcaatggcacgatctcggctcaccacagcctccgcctcccgggttcaagcgattctcctgcctcagcctcccgagtaaccgggattacaggccagcgccaccacgcctggctaattttttttttttttttttttttttttttttgtatttttggtagagacggggtttctccatgttggtcaggctggtctcgaactcacgacctcaggtgatccgcccacctcggcctcccaaagtcctgggattactggcgtgagctaccgtgcccagcctaaataatctttttaacttaaaacataaatatatatccatttaccagtattttaatgtgcaaaatacttctcttgatgtcagttgacaggagtcccagttgcccttcttatacaagctaccctcatagtacattacattttccaaaacgaatttctttcatttggagtgaaaacttagagaccataaagtgctccaagtacagaactttctagacatctaacatctccccgaacttttacaaatctcacacacacacccctaatgtgacagctgtttctttccagcatttccctaagaaagtattcagtttaattgccatggaaaccacagctcttttttgtacacttgcatttcattagttttcatggcagttatttatgaatgacagttctcagtataagtgtcattaaggctcacagggacaaaccagctgacccttggttggggtgcccttgaacttgtggcaacacaagtgcccagggcgagacctggacggtcatccactggccagagggctcctcatggcagggccagcagttagtgtattttacagatggcatggaaaggtggactactcagcaagctggtccagggcctctgacaaagcttctagtgctctccttgtcacagccatgagcctccaatcacaagcaaggcagaaagtggcccttcctttttctagagaccctatgttggagatcccattctgtaggtggtagaaattaatatctttcaatgaataattccctgtccttttctgctaaaactaagtgggggtggaaagtgggtttattcagtgcttgggttcattcaccttggtgtgggacagggggatttggacccccatcaccccatcattgtccatcctcccattcccccaggtgcacactgacacctggcctttgcttgtcaaacaccagagctgctgtggtgtcatcgcccaaacctatgtg

SEQ ID NO: 1242460 - DNA, 4001 bp, Homo sapiens
tagataaatacttactgattgttttaatgctttatatacaaaagcaaagtagctagtttctcgaatacaaaaaaaaaaaaaagaccgggggcggtggctcacgcctgtaatcccagcactttgggaagccaaggtgggcggatcatgaggtcaggagatcgagatcctcctggctaacacggtgaaaccccatctctactaaaaaaaaaaaaaaaaaaaaaaaaaaattagccgggcttggtggcatgcacctgtagtcccagctactcaggaggctgaggcaggagaatcgcttgaacctgggaggtggaggctgcagtaaccgagatcatgccattgcactctagcctgggcaacaagagcaaacctccgccttcaaaaaacaaaaaaaaaccaaccaaacaaaaaaaaccaactctagtactctagtagcacaacttaaatagattaaatacacgtgtttattaaacatgggcagctcatttctcaagacatctcatatttaaggcttgaaaagttttaaatacactaatgtgacccaaataataatttaatcagtaatttttattggaaatcctaggtaattaactatatacacatatttaaaattacaggtagtattttatattgtttccacagcaacaacttacctcgctgtcagcctcgctttccttcattttcttctttttcatgtccttgtcttggctttgactaggaggaggctgaaagataaattataaatgactcacatcaatggcaagaaaaagcaacacattttaagaagagagtcatgccagcaggctgcaagtgccccgtgtttagaggctcatagctgggctctcctgaccaccagctacagctctcagtgggcaagtcattctccagggttcagtccttcctgtcacactgttgctaagcacatttaatatattgtgctcttgaaaaccttttgtcctgaactttaaacaaataatgtggctggaaaatgtgtggttgctgcccgccacatcaaatgcactatttcctgaagatgttgctagttcaccgcagctgtccttcctaaaggactgcagaacatctcagcctgagaagcttcaggactcagaaagtatgatgttaaaagaagataatttatcctttctacaaatcataaaatactgtattaaataaaaatgttaaatatacagctatcctctcaagatgaaccaccaaaacaagagcacaaaaagcgaaaacttctcgtccaaaaaaaacccaacaacaaaaaagaaccagagggaatgagagtttacatacgcagctgttagtctttctgaccaaggaaagaatgagttttaaacactccagcattttttcaaacaaatgaaaacactatttctgctactgaaaaagatgcgtggcaggctctttaatggacgaattgagaaatcaacagcatttggttaagtctggcgactgctggaaatccggcggctccccaggccacacgggaccaccgagcagggcagggcgggccagccgcagggcactgggagggcactcccccggggcgcccccgcacctgcccccgcagttgaaaacctttcggtgcgcaccgtctcggcccgccccgcccgcgtcctctccagtgtccccaccgcccggttacctgtgcgccggcctcctgcgccgcctctagctccgcgctctccagcgtggcctggcggctccgctcctcggcgaggcacagccgcaggctgcacaggcggtggcgcaggtcgcagttctcggcccggagctgcgccacctcccgcgtgaggcacggcccctccgcctggcagctgtagggcgcgttcagctgctcgtccctcaggcgctcgacctccgaccacagccagcggatgtcctcctcctgccgctccaggcgcgacgccacggcctccgccgccagggcctcggccgccatcgcggcctccctcaggcaccgacgccgagcggggtgcccgcgactgcggcgagggcgacgcggacactcagcgcacggcagaagacagggctcccgggaggggcggggcgatggggcggggacggagccatggggcctcgttggagccgaggcctacacgttgcaggggcggggcgctgggcggggaggggcggggcctaggccagataccctgcaggggcggggcggggcggggcggggcctgaggccagataccctgcaggggcggggcggggcggggcctgaggccaggcccaccttagggtcacgggcagtggggaaatggggtctgaagggcctcccctgcctttcgaggcctgtctagaggctattggcagtagtttttagtccgttgaaacgaaaatcttccaaaaccttgcaaaaaggccatcgtctgcgttctccaaaaaggcttcaccctttcttcctcttgaattctggcagtcaccattcttttgccttgcaaacaggttctaaaaagtggccattcattataaatggactttctggcctttcgtgccaaacttgcccaagtactgaggcctctgggccagggcatatagaaaatcgctgtgaaatctaaatccgaccagcacgaaattactggctccttgagtctagggcaaatgccacatatatctttgtatccctcttaaccatgagcgtgaaacttcctggagcaggaacagaaattgatttttatcactattcttagggcttaggatgtgacaaacactgttctaaactctgtaacagtagtaactcctttaatcttcataacaggagatactgttatatccgcttatagctggagaaattgaagcacagtgagactgtgttacttgactaaggtcacacagccactacatgacaaagggggaatcaaactcagatagtctgatgccagtttctacacacttaacactagtacttttcaactttggcagaatttaattgagcatgtcatataatgtgatacaggtaataatgcccttataagagtcctgaagtggaagagcttagcttggactggtgtggtttgagaaagggagaaaattttgagaaaggggaaaaggtttattttgctctggaaaataaaggttgggagatgttagcaaggaggaaaagcaggtaaattccactccaggagcagaatcagtgcaggagaaggagcggagggggacaagctcattggattaagctaagtggaatcccaaacagcacccaggaggagattccatgaagtatgttgctaaccaatatcactgtatcttttttagtccttcctcaggaagcctctggatacagttacataggacccactgactcctcattattcatcatttctcaatccactgccatggagtttctgcttctgccattctgtcatgaccaacacatcactgaatgtcatggacccacttaagccaccccagaatttcctcgggaccctctggaatttgtctctcttgggtctccattcccaatacctaggcaaccaccagtctgcttcctgtcactataggttagtttgcattttcttgatttttctacacatggaaccacaccgtatgtcctccttttgtttagctactttcagtcggcacaataattttgatatttacctatgtttgtgtgtatctattgttctttttttctgagtagtattccattgtatggatataccataatttgtttattcatttgttgatggaaaatttgggttatttccaggttttagctaggatcacacaatacccagtgagcccattgggtttccaaactcacactgtagttatttcgtcagttccagaatgcagagtttgaatagatatactccaaactggcagaatccctacagtgtttccctgaccctcggacataaggctattattctggtaggaaaggccaagcagaaaccactagaactttatcaacatacaaaaataataaatcaaaagtaatactgcattcctgaaggaattgcacagattactgttgccttcaagaacttgaa

SEQ ID NO: 1242461 - DNA, 4001 bp, Homo sapiens
agtggctcagtccctctaaaagtttcctgctgctagaggccttggcttcaggcataaatctcctctccccactgcatcattgggttaggggttttctcccatattttcagtaaaaaaagaaagcctttggaggacaagaaaaactttttatgagggttttaatgccaagtttctctgaatactcatagccacagaacctccaataaagcccagggaaggtcattgactttgcttaagcttccctccctccctccctccctcccttccttccttcccttcttccctccttccctccttccttccttctttcttcttcttcttcttctttttttttttttttgatggagtctcactctgtcgcccaggctggagtgcagtggcgcaatctcagctcactgcaacctccacctccctggttcaagtgattctcctgcctcagtctcttaagtagctgggattacagggactcactaccacgcctggctaattttttgtattttttagtagagacagggttttgccatattggccaggctggtcttgaactcgcgacctcaggtgatctgcccgcttcggcctcccaaagtgctgggattacaggcgtgagccactgcacctggacaggttctcttttctactccagttcacctgaggacaagatagactcccaaccgtaacaaggggttcccacttcagcaattattaccaacccaggtgtggagggtgtatcatcagtacagcaccgtgatgaagaaaatggtttaaaacagtggttcacaaagctaattgtgcatcacagtgccctggagggatgagttacaaaaaacacagatctctgggcttcgtctccagtttattggttcagaagatctggggcccaagagtctgcattcttacaagttcccagttggtgctaatgctgcaggtttggatgccacactttgagaatactgagttttgcaccccacctgtctgggtcgaaatacaacttctgccacttaacaagctgtgtgactgtaggcaagtgacaaagtctctgtggctccatgttctcatttataaaaggaagacaacagcattattcacttcatagagttgtgatgagaatgaatgactataaataaagcatttagaacattcatcgtacataataaatgctatgtgacagtttattttattagccttctctaagctcagagaaatgagaaagatataaagaaaatttaaagcaaggcctggtgataatttgccataaagcagtaacatttaaaactcagggagaggagtgtccattttgcatttttatgtatcactctcttaatcactatgattaatgagacttaagattggctaaagttattgtaattagttatgattttgaaaaaataccgtgtggaaaatttttatgactgaagccgacttctaacaaatagctgtatcttgtaaactgggtttagaactacctactaacaaaagcattactgccacctggtggcagtataccaaaattgttggcaaaaagcaccgatgaaaatctatcagcatcttcaggttcgcacctgcaaacctacaactcaataaagttagaatagcacatatgtggagaaggttttgctggcttggaaagaaggtgaaagggggcttggatgtctcagtcctgtccttgggctgatggtaagagtaaggtacaaccgcccttgctccaccttctatgttagctcagggttctagcttttcctacccagcaggggaaaatggtcccagtgccaaccagaggctggggagggaggcactcagagctgacaaagaacacgcaccaggatgaaggaggctgactgtctggcagagaggctgttttcaggagagagggtggtcatggcccctgctgtcttccgaacagcctctgatcagaactcacttggagccctagtgatgcttaatccttttcggagatgggttgcattcccaggaggaactggctgctcctgacctcccacacttgaacagagccggccagcagtgtgtcacaagtcccctggaactctcatcacaatgacctggaacacgggaacacccacctttagagatgagacacaagcaggagaagagggattaaacctgctagttttggaaaaaaaaaaaaaaaggaaagaaaagaaaagaaagaaagaaaaacaaaaaacaacaacaaacagaaaaatgcaaaactgcagaacacgcagtggaggttggattcagaggacatggggatcagtgtgggctgtgctggtcaaggagggcttccagggagaggtgggccatgaagccttgctctctatctctgactcttcctctggactctcttagctggactccctccctattccaccagaccagtgcccaaagttggagaataactagaaaccaggcttcagatgtcttgggtaccagttataaagattcagaatcagtatgtcagtgctggggcctggggggctggggaatgtgttttgatatgcctcctggggtgacttagcttcagcattggaatggtagcttctggggtggagatcagttttgtttagctttttatttggagcacttacgatcgtgcctgagtagctgagttaatgatttaattgaatgggagaataaatgaagctgtcttagacctcatctcacttccctctctgtatgtatgacagagatttgtgcctgccccatatcacctcctaccctgagttcctttaggccagggtcaacatcagattcctctgtggttccctctcccaatgccagttctgccatcacttggcacttggtaggtgctcaatatttgttgcatggacccaaggagttggctctgcttggctccagcatcactcttctccaccttaagcattgcttgcacttctactcaggtcccatctggctctaaagcatccttagtcattaggagatgatagtaattcgaccaaccaaattggaatcaggagctgggtgttggaatttggactctgacctcaaatttggatgctccccgcttctgagctacagattccccagacatgaaatcagaatacagtcaacctctggctttcacctccttattaacataatgaatcactgtccatatggagtcttccacggacacaattcattgtctcatttactgtttctgttctgcttgcctgcggcactgcagaaggccttttaaatcaaaatgccttattatcggcctctctcctctacccactaccctagctcaacctaggagagagttaagagcctcttccctttgatctactgcccctaggtcttcatggagtgggaggtgggcaacgttgagtagggaaggtgtggagtaaggatggggccccttgcacattagggtggcttcattctaaggtctgcaagaagtttccaaagcaaatgtttagagcaagagacatagacatcatttaggattatctatgtctctgttcttccacattaaccacgtaggcaactgaggattcactgcaattgttccttgagaagatgaggatcaggtcgggaattggaaacatctgagggctcaattcaacctggcttctaaaacgaacatggtgaacatagatcaactactgaacttcttttaacctctggcatcctatctgtgaattgtaggtgataacccttccccaaatgagccaatacagtttagtcatattacaaaagccccatagcaaccacatggaggcttaatattcaaacagaactgcaggactctgtaacggaagcaaaaagggcttttattccatccctctttcttcttttttcagattctgaaagggaattacatgtgtccatttttttccagggctgaatgatccttaccatgtccatttatttacataattgcccaagtgccttggtttcccatatattgcttttctgttatgcattttctcatctctgatgggaatccagctttctgctttaaacttctatacgtgaggattcttcagggaaaatattat

SEQ ID NO: 1242462 - DNA, 4001 bp, Homo sapiens
agggtcattaccaagtttatacaggcactctctaagtaagcctgtgtaggactgcaacccgagttggttttctttggggaaacaggctgtctgcacccacttacagacaggacaggggagcccaagagaacatgggaatcagatcctgcttgaactggcaaaagctgagtcagcaaagctctaagaacatctccagggagcagctccagctgttagcagctctgggggtctgaggaacagtcctcagctcacaaggccaggagtttgcctagtctgctctccgtgtggccagctttgagagcactttcatacatcccagcccaaccctgttgctctggagaaagcccaacctggaatacggaagaggagtgagagtgagggtggagactcacagaaaccaggcagggagcaaagcctggaaaaaggatacccagctccaggcctgggcccagatccctccagatgctcaaagcaggtgggcccctaggaggtgacagtctagtcccccagaactcccaaggacaggggaggcctttcagcaccaggactcctgactctactctcctgcttctacactgtatctctcattttgtctgtccactggaggattaagggagcctcaaaggagcaaggcataactggctgaaaagaccccctcccacccatcctggacaaagcaaggaggaagaacacaggatctgccacctactggctgtgtgaccttagctggagcatccccgtccactctggaggaaaatgtagtggactgtctctaagggccctgccatctgactctttctgtctacagtgctaaatgcactctggctcacgcctggcatcccagcactttgggaagctggatggggaggatggtttcggcccaggagttcgagactagcctgggcaacatagtgagacccccgtttctttaaaaaaaaaaaaaaatttaattagccaggcgtggtggcccgcacctgtggtcccagctacttgggaggctgaggtgggaggatctcttgagcccaggcatggaggctgcagtgagccgagatcgcacccctgcactccagcctggacaacagaacaagatcctgtctcaaaaagaataaataaacaaataaataaaagcactgacatttactgagcagtttaaagtataattcatttaatcccaacaccccatgaggtagatactactgttatcccattttacagaggaggccgctgcagcccagagcggttcactgaggtaccaaggccataggcaaagttctaaaggaggccccaggggtagaagcctacgctcacggatgcctgggaaggctgcacaggacatccacgggatggtgggggtcgggagacaccagagactggcccgaggttaggcgcagagggagataatgggtcaaggtgtctgagaaaggagacggggcttggtagccccagcgagactggcctaagcccagatagtggggaggagataggaacgagggcgggatgtggagaagcagggaaaggcaggccgacgtgggcaggggcgaggaggccttggaggaaggagggtggatggcgcaagccagtggcggaggcaggggacgccggcggaagcgcgcgggcggctttggggcgagcggtcccaccttgagcaccgtgacggctcccgcgctgtgcacctggaagtgcgcgggcggctccgtgcccggctccgccgcctcgtcggggccctggtagctgaagcaggcgtccgcgatgtccaagtggccgaggggcagcgcgtcctgcggactcttgaaatagtaaaggtagcagcggcgcgcgtcgaacacgaaccagcggctgcggtagccacgcagggggcccttgcccgacagcttctgcagatagccacacagccgcgctggctcccgcgccggacccgccccgggctccgcggccgccccctgcgccgcgccctcgccgccgccgccgccctcctccgcccgggctccggcccccggcatcgctaccgcgcgccaaccgtaggcgcccgcgccctgcgcctccgcgccgcggccgctgcgccccctaccccctccgcaccgccccttcgctccgcacggcccgcgggcgcgcaaagcaccctgggacttgtagtctcgcccccgcccgcccgccggccgttgccccctcagcccccggaggcagggtcctgcgaccagcaccccgcgggtcagttgccttcgtgccacctgggctccaagtcctcgccctgccggatgaagcaatggtctatttctttatggcagtgtaggtacatgggagtgtgcatctctcaaaacccagcggagtgtccgcttaaaactgcatttcacactgtgtatcttattctaaaaacttgatatttaaatctccctcctgccagagtctcaagctaatattgtaaaaatgagacagcctattgcctggtgctgagtgggtgctcagtaaatatttgcagaattcatgaaagccaaagcgtttcctgcctctccagacctcagttcatttattgaattcaacatatatttattgagcgccttctgaatgccgggtacggttctgtatgccaggccctggcggatacagcagtgaacaaaccaatcattctcctgccctcgtggaggttatattctagtaaggcagggaggtgacacacaagaaagcagataaaagtaatgtgtgctatgttgtataaatgccgtgatgacatgtaaatgattaccgcttaaaatagcacctagtatttatcagtgctttatagactaacttatttgaacactcacaacctgagaaggcaaatctattgctttgtaataaagcaaagagaaagaatgaataagaccaagtatttgctagcacaacagggtgactacagtcaaaaataatataattgtacgtttaaaaataaccaaaagagtataatacagacgcggtggttcacgcctgtaatcccagcagtttgggaggccgaggtgggtggatcacctgaggtcgggagttcgagaccagcctgaccaacatgaagaaaccctgtctctactaaaaatacaaaattagctgggcgtggtggtgcatgcctgtaatcccagctactcgggaggctgaagcaagagaatctcttgaaccccggaggtggaggttgcagtgagccgaggttgcgccattgcactccagcctgggcaacaagagcaaaactctgtctaaaaagaaaaaaaaaagtataataggattgtttgtaacacaaaggataaatgcttgaggtgatggataccttacttaccctgatttgattattatgcattgcatgcctgtattaaaatatctcatgtaacccataaatatatacacctactatgttcccacaagaataaaaaataagtaaaaagcaaagtgagaggatgaagtgatggggggcagatagcaggctgctgccccaggacaggcaaggaggctggtctgatcctgtgacatggagcacaaacccagatgatgggagggacaggggcaaccagaaatgtgggtgaagcattccagggagagggaatagtgagtacaagagctcactttattcaaaggaaaaaggaagtgtatagctacatagctacatttgtgaaagcccaaaccaaatatctcaccctcatagatttgcatgttttatacagacacactgaaagacccaggtggaaaactgacctttctgagctggacagggacacaaattagactgcctgtttggagccacccaggtaggaagggcaggttctgggtcctcacccagcctgccgactctctgcaggccctaaagtggcaccacgcaagcattcctttcctggggcccatcagaggtgtggctgacctctccacctgtctttgagcacaatcagcacagtgttaaggactgggctctgacttcacactgaccagatgtgtctcctagctctgccacttaccagaggcatgaccttgggcaagtgatttaacct

SEQ ID NO: 1242463 - DNA, 4001 bp, Homo sapiens
aagcaggtataggtgctgcctcctaacagcagttaataaaggaattaaacccattaaaaataaaagcagtgggcccttaggtttcagttgatgtttttaagtcatttcccatgttaagaacataatacacacacacacacacacacacgtgtgtgtgtgtataaaataaaagtactctgtttcagaaggctcgaaattctagctctggactacttttcttgtcgctgacatctttcaggtaccataaactacatctgatactggagaggaaaatggtgaggagtactgaagaaaaaaacaacactttttcatataaagtacaagatccccaataatcatcgcggtgggagggtgactcaaccaaaggtcataattacattgttctccttttaactggttaaatcaaatgacccctctggcattaaagttttaaatgtgcaagtctagacattacatcaaagttcaggtgtccaacttgggggagctggactccagccctgagaactactgcttaagcagaaagcagatggagttcacgctgcctagtctccacgttgcttcccctcaccctttatttaaaagaaacaaacaaacaaacaaacaaaaacctcagcagaaccccaagatgccatggaaagctctcataccgcactgaagtccagtaggtcgctcagctccttgtcggtccctatagcggccatgcgttgttgctggggattcatcttcggccacttctagcaggtcctagggcagaggaaacgggctcagcgagagaccaccgaggcccaaagtgtgtgagggaacagagagaggtactggggaagattacgcaagagcgctgggggcgccgggatgacttccaggaccccgactcgctcccaccgcggcgcgagcaaggggcgggagggctcagtgcccgcgccgggtcccggaatccacgcgttcctcgccgcggcccgagatcgacgcggcggctcccgcaactcgccgcctctcccccaagtttccgagccagtctctgccacctcctcggcgccccctgctccgcgccgccgccgggtgctccgcgcgccgggcccggccgcggctggggtctcgaggagcggggtgaggggcaattcggcgtccagcgagcggagcggcggcgagcggagatgcgaagtgactcactcgctcggcaacaatagaactgacaagttgcagggaacgcgccgctcgcaggcccgcgtctgcggccgccgccgcccggacgtccccggcgggcccaggaggtcggaaagcacccccagctcatccaaggggcgtttttaaacagaaaacagaaaccccgacaactagtctcgctctcggccggcgtcctcctccccaggctcggcctcctcccacttttgctgccctgccccggacctgccgaacaatgagcctggctccgcggccgaagccgcccgatctcccgcgcgccccggagcctgggcgccggcccgagtcgggcaccgaacggggcgcacaggccgagcgcgccgccagcgggcctgagcgcccgcgactcgagcctccgcccccactccgctccccaacttggaggggaccccgggtttcgcgctgtacaaaggggcgcggagttgaggcgggggacgggggcgcccccactccggcagggacgcggcggcgccccgcagcccccagccccgccgcgccgccccactcccgctcgctagcccgcaattacctgccgccccgtctccgcatccaaccaccccgattaaagttcactttggccgggagaacgggcttgggcttccccttgcaccgcccagcggctcggttcactttgccccgcacgagctctcgggtctgggagggggaggcggctttcgggcctggccgccccttcctcccggggcgggctgtcggtccccccgaatagaacttgtgggtctcttcaggcggacatttttttcgctgaggcggcctcaccaccgcgctcggctcgcctccggatccctccgcgccgggaagagccgcgggttaacccttccctccccgacccgctccgccgcctaggaagtggggccggcagagggggcggggaggagctgtcggggactgggaggagccgcaccgcggcgggtggacaaagcccgcggtcgggtgaggcgggacggagttggggccggtggggaggggcatgaggcgctcgcaggcacctcgagaagcaggccccgaccgctcgccgacgaagcctcgtccgggcctcctgggagcggggtggcaggtaccgtggcgcctcctcgcgttggtcttgctggttctcggcccccgaagcggagcgacggagacacagctgtggaagcatctggatccgctgcccaggtccccgagcttcccggaacccgaggccgcaggacactgaaggctgccattcccgagtaggtcacgctggacgccaccctaagctgggcccagaggctcccgtccaggagggctgcagtcggcgcagacaccgcgcgtgtggagacgggagacccatcctcctcggccgttccgagagtaggcgcggccggtcagattcgatgcagagccgaatgcgggagaaagggcaaaacgtacctcaaaccagacaaagccttgtgagcttcaggttctcaaataccccactcacccagaccccacatctccagtcagcccctcgcacccaaatcccattcggagcaaccgaactgcacgtgggactagttcttgggaatggatcaagccagtctcttcatctaacggagacagccctgggtggctctgtcacacagccactgtcttgtgcacaagttctgaacttggcctcagagaagccccagagtagaaagaagacaaaataagccccagttcttcgattctgggctgaagtgagattttcttgaatggcagccattgttttgcctcttaggtaagtgagtgcagtaaagaccggtaaggcccacgcagaagaaacactgaggaaagaagacacttccaaagtaacaaatgggaggaagcagccaacgcccgaggacaacatggcaagaaggagcctttggattccggactgggatggaaagagaggtagattcagctaccatatgccattactgtagttagtacagttgtctctatatccgtgggattggttcccagactctggattttctaagatgttcaagtctcttacataaaaatggtgtgtttccccatatactttaaatcatatctagattacttataaaacctaatacaatgcaaatgctatgtgaatagttgttaaggtgtatttaggaaataatcatccaaagaaatctctatattttcagtacattttcaggctatattttaggctctatattttcatgtattttcaggcctggtaagcctaactacattttttgttttcagttgattgaatcccggaatttggaaaccccagatacggagggcggacggtacaaccggagctgtcaggtggatttccaaggctttgcattggctgtacctgaaacttatggtggcctagactccccagtatccactcttccttatcttggtaaacaagcccagttctgagtcacatccctgctctgcctacttacaggggcatgtggtcccaatctaagcaacgtagcataattccaacctaaatcagcagaatcccattccctgccacagttattggctggcaatgagcgtaacatatttgggccaatgagaggagcaatttcctggtctttgttgggaaaagtttttctttcattttctgagagcgcttcagaggtaacccattctttctgcatgtcctcaaaaaaacgggtcccctggatggtgggtagccatcttccaaatacaagtctagccgggttaaaataaagaagacatcaagaaaacaaacatgcatagagatctgatctttggtgactttttttttttttttttttgagatgtagtctggctctgtcaccaggctggagtgtggtggc

SEQ ID NO: 1242464 - DNA, 4001 bp, Homo sapiens
ggttcagggtcctacataattaattttactgaacttatacacgtgcacacacacacacacacacacacacacaccccacacacatacccacataccatgttcagactgttttacttaaaatcagacacaaaagaaaattattttcacatttgaaagacagctggcaagaaaattatatagagattaaataatttcactcatccatctaaatctacttcttacattatccaaagctctgcttatatgggcagcttgaacatacactttttaatgagtttaaagatattttgacttgcttatcttttttgaaagcttacccaaaagttcacaaccaaacactggcccagtccaaagagcccttactaaagcaatcagtgaatgaaaaagtgcttttattagttcttagtatcctagttgtagccataggctactttaaaacatttccaagtgatgaaaagggaagagacaaccatatctaattttaagcccattttagtaaaatgtaattgaatattctctataacttaaaacattaacattaaaaatgctcccctctcccccccttcactaagcccatatatgcattttttcataagacacctgagggtaaaattatttgtgaaagatttagaaggaaaacactgagtttctgacataaaccaacactgttattcattagtgtaccttttaataatatttatcaagtatcttacaaagatagctcctattgaaactttccgagtttactcttttttttttagaatatataaaatcctctggcttatagatttttttgtagaaacacagtaaattattaacattaggtaattaatttaaagaatagaactcttgtttagcaaaacaaaaaagtattattttaaaacacctagtcatgtgcttgctataaatcaaccagaagtacagtgcattctttggaaaatgtataaatgcattcttttaaaaaatagtgatttatttcatgaatccacacaaggtcaaaattctagtttgattggaaacagatggtatcccagagaagtcaggctctggacctgaaactctaaacaggaaatacggcccttactagctgactgcttccctaatcattaccagagcttcatacttgttatttttatgaatatcctagatgactttcatcttttccttccatctacaaagcatcaaataattctcaatacatatgtgtgtatatacatattttatgtaaggatttgttcacaatatacgaaaacataaaaacaaatgtactttcaagctcattgctagtaaagatatcaggctaataacaactcagaaactcaagtttattttctacactatcttaaaaataaaatgaaagccaacaactattgagtagctatgtagcagacaggactttactgacactacttctaaagaaatctacaatctaggctgggcgcggtggctcatgcctgtaattccagcattttgggaggccgaggcgggtggatcacctgaggtcaggagttcgagaccagcctggccaacatgataaaaccgcgtctctactaaaaatacaaaaattagctgggcatggtggcgggtgcctgtaatcccagctactcgggaggctgaggcgggagaatcgcttgaacccgggaggcgaaggttgcagtgagccgagatcgagccactgcactccatcctgggtgacagggcaagactccgtccccccgcaaaaaaaaaaaaaaaaaagaaatctacaatctaatacattgcataaaaggataaaacaaaacctcacagattttagtaaaaagcgagtaatgtatactgctttcctttaaacaagtgagttagaagctatacaaagaaaaaggcttaccgttttcccattgtagtaatacatcaaagaattgctgcccattccagggacaggataagcacaatacatgttgattttgaaaatgttactatttgtagctaatgcacacagcctctctccaagacatatatccacacaggcaaagggagtaagtcttcagtactatgcattcacacatggatctactcaaaaggaacttatgcaaaataggactgaaccaactcacagagcacagagggagggtttatgctgtaagtaacctctttcaatttccatcaagtccttgcattggtggaggataccaataagacaaaatttgaggtattaaaaaaatgcaagtcacttttaagcgctaaataaatatgccctgaataaaaataacccaagaaattattagatttgtctcatatatacatatatacacacacaaaaggaaggcatactgacagattttctgctaatctgtttttagttttaattaaattagagcacttgtggcagagaaacctagcttgctacacctccagcgttaccatctgccatggtctaaagttgcttcaactttgataaacacatgatcaagtaatcaggaattggaaacactgaatcatgtgtaacaagaaggatctagacagttaaatcttgtacaaaatcacttcctggagaaagcagaccatcatgcaaatacctcttaactagctagaacaaaccatactttaagctacaaaaattatgttgaggaaaactgaaaggaacacattttattaaaaagcttagtccaaaaatcagatagattatcttgaaactaaattacctgtttttaaaatggaaacacttaataatacagattttcagttataaagctccttgaattcttcatacacaacaccaatcaaaagtttataatgtcctgcaataggactgttcttaaaaaaaattcacacatctttcatataaagtatgagagaataaactaaacagtttcctataagtctttcctctaagtttattattgttcttaatactttgtatattcatatttttatgctaatgctcacatttctcagaaaggaaaaataagaagtgtgggaataaatgtcttacagacatttctaactcatacttcgaagtcaaaaggttttaaaagttgtctacaaaaacatgtgtctcttacacagacacgttttgctatttaaatgttttccaatcaatcgtttgctgtaattacaacctggaaaaacagaatagcaactttccctttttgtgtcatttcccttcatcaaaacttctttgtactatccttccctctatgccttgtaggttctaacgggattgtattaatcagaggagagctcacaagctgcaaaagggggcacatcactttttttaaaggtacctttcatgaagcagaaatcctctgtgaaatattctaggaatatactataagggaccccctatccccccaacctcatttttactaacatattgatcaaattatagtaacgaaactaaatcagacaataagggcaactaacttcacaatgttttaaaagctgatagtattggaacaacaataaaacctccccacactctccagatatagaaaaggctaagcagcagctgcaaaagaacatcgctgtacagcagactattaaaatgccagtctgcggagtggtttgtaacttcctccctcctgagagaccacaaagacccatttcaatccttggagaactgtgtaaaaagctttgattcacaattaacaatagcatgccttaaaaccattcaagtaaattttagtcttccatacacagtctttctctactgacagatcggctactctcaaaacaaaaaaaaaggaaaatcaaacaaaatcgaatcaaaattttctttttctattaattattaaaaataacacttacttttcaatagaaattgaggaggaatagggagaagaggggagccacaaagcactgacaatacttcaacatttttataatcatcgcttcaatctgagaaaactttcttatattggttaaaaaacatccacctatgacagttaagcccatttccctgatgccgggcagaaaacagagagggtacttactatgttgtttgataaaacaaacatcataat

SEQ ID NO: 1242465 - DNA, 4001 bp, Homo sapiens
ctgggaagtagcattctaatgatcaatgccaagacaacaggtggcaaaacagataccatactgttataatttcatattcttgcttacagggatggccagacattttactcttctacatgacacagaagtattctagaagattcaggtagtgtagggagttactctgttcatatgcttcagatgtgcacaactcagagtacagataacagaacaagtaacaactggccaccatataatactgtttagctatctcgttttataaagtaactcgtgctagaatacaataatagtccctgtatatttctcattttaagcaggactgtatccctaaggatgcaccagaaccaggtgcaaaatacactctcaaataactgaacaaataaacctaatccaggtatttaatactatatggttaatgataatgaaaataaccgttttgattgaggcatagctgataaagaactatatatagaaaacagattaatttgcttaagtacacttttgaactgggataatcggcccatttcatcagagagaagaagatatgattatcttcctacttgctgtggtaaattggtctgtgtatagttcacctaaacacagtacctttcagttttaatttcaaatatgcttatagatcatatgtagatcatacgataactctagtttaaccctctgatacaaactgccaactatttccaaattttaatctagttattttatattaaaacggaagggagttgttaaaaggcacttttttataagggtatgtatgatggcaaataaaacagacatcgcctctgcccttggaacttacagtccagtggagacagacaaaaaggaaattcacaaatgaatttattgtaacaaattatgctaattagaaagaaaaatcactgagacaatgaaaaagaccaacaagggagcctacttagcatggtcaaggaaggccactcacattacaggttgaaggcgtgtgtgactgtctctttcctgagatagaaagaaaacctggaagagtttttggaactaaaaggccagtgaagctggagagttttagggggaaaaggggaagagggaataagatcaaatagaggaggcaggaggagccacatcgatcagagcttttgaaatgcaacaggaaactactgtagaattttaagcaaaggcatggtagatcaaattaaaagattacactggctgctgtgtgaaaacttggggatgaggagtagaatgggccaagaatgaaagcaccgttgtcaggatagttgtaattacactgagaacagataagaaaaggaatatttgaacgagaatggtaattctgattgcagtgggaagcatcctttcaatttagaaaccaacctaaaggaaatttacacaaggtaaactctatgaacttgatattaagcgaaataacctaaactatcaagtgaactaactattcgtggcaattcctgctacccaaataacttccaacagtatcttgctgtttacttgggctacgttttaaattaaacaacatgcttacttgggctaaattttcgcccacttcaaatatcttctaatacgcaggcgaactactcagatcaaagacaaagaaaggataaacggcaggtgaacgagatgacgagaagggaatgctgcagagtgagtggtcccgaagatccagccagtctccagaaaaaagtacttgtaagcagcctcattcagatgaaagaaagaaggaaaagttcaaccgccgaatttcttacttatattcttcctccaaggcgaggaggtcgggtccaggtgtagagggttgctgaacgggtggcgggaacggagtccctggaacgctgcttctctgtaaaagagccacagactttcagacccgaagttaaaggaagttaggcgtcctagtcgccggaacccagacgctccccaggagcctggagttgaactgaccgtgagacacagacttcgccccgccatcttcggcgactgcgacgcggttaccgaggcaacgacgcatcttcccgcgagagtttccacatcccggttgcctcccgcccgggcgcctacgccttcccactctcaggttctgtgctgcgagcggcgcgagcctctggcagcgggctcggcctttgctcgcagcactcggcgctgtcccaggaacccaggaaggcttcctaactgcaaattcgacttagttagtgcaaattctcaacttgtgggggttgaaagagtttcagccaaaacaggcaggtcctttgccgctactctatagaaagcaagctggtgaggcaatccctccctgttgtgcttttcaaaccgttagtggctaatccgaccttcaccccgtttgcttaaagtgagctcttcagtggaattcagaagttttgatttctaatttttgtttacagcatgcatggctaagactcaggctctcaagttagtcaacctaaattattatcctggcactgccacttaccagttatatggccttgggcaaatcactctgtatatcggccacttcatttgtcaaatggaagtgagaatagtgcccacttcacagttattatgagaagcaaatgaattcgtgcttaggatcatgcctgaaacacgtaagcggttaacaatttcaattgttttggaataaaattgacatccaaaaataaaccgtgatatgatgtatggtcatctgatctttagaaagggtgcaagaccattcaatgggaaaataattgtcttcaacagatggggagacaactggatatccaaatgcaattagacccttaacttcacaccatatacaaaaattaaaatgtatcaaagacctaaacttaggagctaaaactctaaagctcttcaaagaaactgttggtgtaaatctttatgaccttgaattacaattctgagaatccttgatggattcttagatatgacaccaaaagcagtagcaaaaaaaaaaaaaaagaaaagaaaaaagaggctgggcacagaggctcatgcctgtaatccaagcactttgggaggccaaggcgggtggatcacctgaggttgggagttcaagaccagcctgaccaatatggagaaaccccgccactcctaaaaaaaaaaaattagccgggtgtggtggctcatgcctgtaatcccagctactggggaggctgaagcaggagaatcgcttgaacctgggaggcagaggttgcggtgagctgagattgcaccattgcgctccaacctggtcaacaagagcgaaattccatctcaagaaaaaaacaaaaaaaaggaaaaaaaaatagataaactagacattatcaaaactaaaaacctttagtttcaaaagataccataaataaagtaacaagaccacaggaagaggggaaattcttgcaaattatatatctgataaataacttgtgtctggactatataaagaagtattaaaattcaaaaataggtaggtgcagtggctcatgcctgtaatatgagcactttggaggctaagtcaggaggatcacttgagcccaggagttccagaccagccaaggcaacacagcaagactccatctctacaaaaaaaaaaaaaggaaatagataaataaaaattagctgggtccagtggtacatgcctgtagtcccaactactaggagactgaggtgggaggatcacttgagccagggagatcaaggctgcaaagagccatggtcacaccactgcactctagcctgggtcacagagtgagaccctgtctcaaaaaaaaaaagaaaaacaatttaaaaaaatttttaaaaaagacaacccaagttaaaaatgggcaaagaaatagggatttctccaaagaacatatacaagtaggcaaaaagcacatgaaaagatgctcagtattgtcctcagggaaatgaaaattaaaaccaaaatgaaatgccacttgacacccactagaatggcgataatcaaaaggatggatagccaggcgcggtggctcacacctgtaatcccagcactttgggat

SEQ ID NO: 1242466 - DNA, 4001 bp, Homo sapiens
aaatctctttgagtgcttttgattactttaacacacatctgtttcataaactagttttttattattataaaagaaattaagcataatgatcagcatattgtaggtactcagatttgctaggttgaatagaattctctatcttttgcaaaatcaccctgtacgtatttcagatttcagatttaatcaacatcttattgagggcctatctactatgtgccaggcactgtgccaggtacgctaggacagttatctcatttaatcttcatcgcatccttgcagggacaaaatgtcatgtcatccacacttggagatgagaaaatcaaggttcaggtgggttaaatatctcgtctaaggttaaaccaggattcctgagcccagtccagtgctcttcccatcacccccaagagctgttgcccactgttggctttcactcatgatcaaaaaaatgtccacacccactgccagctaagaaagcacttggcttttacctaacagtggaaaaagaagcttgccccctttggagaccaatttattagacagcactaactggctacagttcaggttgggcacatgacgcaggctactcagcaggcatggcagcatctgcctggcagcaagcgctgggacaaaattccatcctctagagacatcctgggccatgttaatctctgcctaagacaggaatgactcttcagcccaggtgccatctattcaaataggaggttcattgactactgggcatatttgttttccttgaggtgagaggagaatggggtgagatgatcaggaaataaacagaagactgtagaaagaacttttaaagtaagtgatcttagtagttatcctagagagacactcccacgtgagcacacagaggcatggataagtatgttccttgcaatattgcttgtgtaaccggaaaattgaaaacaacctaaatgcccatcaataggggacaggattagaaattacttgcactgatactatgagaaatattgaggtagatctataggtactgactggcatggacagagctcccagacatactgtggagtgaaaaaaatcaagttgtagaaatatacatacaatatgatgataccatggatataccaaaaaagaccacacatgctaatcctatgtattacattgagtaaatgtatgtctgagtgtaaatgtgcagacaaaagacaggtaacagtgtttactctggagatgaggctgccattggggatggcgggcagaggactatagctttatctataattatttatttattttactccaactatgtattcccatatttcttgtgcaattaaaagttatgaaaattttaaaacaaaaatttaaacacaaaaagtaataaataaaggtaaggttgttacagttgtagaggaagttgaaagcttattcctctaaatgatttcaactaacgatttaatcttcacagcaactctttccagagtgagggggatgatatagagagaaggttggtgatgggaagattagctaagatcagtaatagaccttctgaaatggaggaagaagagaagatatgaagattcagagaacttaagagctggaagacaatttcaagattgtctggtccaatccctcctttttcaggcaagggggttggaaactagaggcgaagtgacttgtccaatgtcaaagggtcagctagtagcagagaaggacagaaaccctgaccccctcatctctggccctgccctgtcccacctggctatggaggcaggcatgttagcaagcagctgtgtgctgtgtttacctgtctgcctctacgctgtctcctggttctcaagccaccaatgaatactgaggtttctgggattcttgcttttcctgcctcagttctgtatttacttctttatttctctgaatccaccctccaccccttgacttcctacagtctctctctgtccttcttatccctgaactccagtggccacaggggctttccctaccttgggccatggtagctgcctccggttcctgggatgctccccacagaacagctgggcggtctggagcttcagcaaactggtgccagagtgtctacttccccttccattggaagcctccaggagaaccgaaggcggggctggactgctgcactgccacctgattaccgagcagatcacaactggtttgctcacttgccctcaggtttttcttggcagtgttgctgaattgaaaggaggtgtggaggctgatgaactgtcacagccttatgccgtgtgggcctttgatagctcttgagcaatagggcattcccagggaggtgctgtgctgtggtggagaagtcaggagggagaagcgagctgatgggcccgccagagggatgcagggggctgctggaaggagcatcagggtcccaagactctgctcacagcttaaagcacctcattgagccgagaaccctgctaggtaaccaaggcctctcttttatcctgaaaagtcacttcctgaacattaaatgcaaacagaaccctctctgtctggatctccttcggtatgatttcactgtatttagctttggcagtggcattgtcttgcatgagacctggcaggtccaagacaaatcacaaataaaagcaaataatcacaaataaaatagaggaagaaaaattgggaagatttgtggaggaggtgtggaaataggtgagagggtgggaatgccggtgagcaagggccttgatcctagtaagaaaggcacaagccctttcatagggagaaaagcgcaggtggaaggagagagagggcaggagggggaagggctctgcctgtggagtgggtgggacccccatgcctaccctgtctttctgtgctctggggcacttctccccacatcccctgctttctgggtccttctccctggggaacctctttcaccagcattgtcctccctcctgtattttcaattctctctgtccccactcagctcttttttaaaacctatgtaattatttttatttttaatgtccagaatgtgtactataagggccagggcttcttcctggacttaattttataaattcttgattggttggtgagaccaatagcgatactttttcttgtctaatttggtttccgggaaagcttcgttcaagtcgtcaatggtcatctgatcaaatggtattaagttcctcatcttctccagctgtttctcatattctccaacctggcctttgagagagacacccactcagcacaagttttcccatcttctttttcttcagcatccacctgggcagtatatttatcctctggtacaggaagcttcaggacattaaacttcttctcaaagtcatccaccaagcctgccttggccacattggccttgtagtaagtccagtcaatagctggtggattctcaggtaaagtagccagcctggaggtgagggtctcattccaggatttcagataattagcaatggccttttggttttggggtatcatctctgcaaaagctacccagtcaatggtttttagagcaagttttcacccagccatcttggtatacttcactgaccatggcagcccatggcccacaccccactcacctcttatagggtatatgtgcacaaatgcagttcactattttaacacagcacatccaccttcaactctcatccccagcttccctagcagcccctgccctttctctcaactccacttctcagccaagctccttgcccactgctttgcctcccaccacccctcacctgctgcagactgccttctgtcccacggctgcctcgacgccacgctcacctcccagctctgagggctgggctctgggcgcctttcctgctcttaccctgcaaggcctcctgcagccctgcgggtactgtccactcctcctgggcttaggtgacttctctctcttggttgtctagctgcctccttatccccactgtcctcttcctctcagtccccatcacagactttcccttcttgaactggtgcctcccagggatttg

SEQ ID NO: 1242467 - DNA, 4001 bp, Homo sapiens
atcatctcctgctattcctgtaactacccaattccatattatcagccccctgttacagataagtaggaagatgataggcaaagttaagtaacttggccagtgtcacctacttaattaagtggcaaagttggcatttaaacctagacagtttgactctagaacctagttcttaacttctggctggtggtactggtctgaagattttcaaattttttttccaagtaagtgaatattgtgctttcttcaaatgaaaacataatgaaaggccgggcgcggtggctcacgcctgtaatcccagcactttgggaggctgaggcgggtggatcacgaggtcaagagatcaagaccatcctggccaacgtagtgaaaccctgtctctactaaaaatacaaaaaattagccaggcgtggtagcgggcgcctgtagtcccagctactcgggaggctgaggcaggagaatggcgtgaaccctggaggcggagcttgcagtgaaccgagattgcgccactgcactccatccagcctgggcaatagagcaagactccgtctcaaaaatatatgtgtatatatataactgttttagacttattctagttggtgatagccaaggggaaaagatatgctaaactctagcactaaagtaccctggaatctagcacgtgacaagcttcttgagccttctctgtcaaactctgtcttgcatttaaaaaccatttatatctctatttttattttgtgtttgtttgagacaggatctcactttttctcccaggccggagtgcagtggcgcaatctcagctcaatgcagctttgacccccccaggctcatgcagtcctcccgcctcagccctccaagtagctggaactacagacttgtgccaccatacccggctaatttttgtatttttagtagagacagtatttcactatgttggacaggctggtctcgaactcctcagctcaagcgacccgcttgccttggcctcccaaagtgctgggattacaggcctgtgccaccacgcccagtgtgagacacagtgcctggccattagaacatgatacatgctttagaacattattttaagacatacatggccgcgtgtggtggctcatgcctgtaatcccagcactttgggaggccaaggtgggtgggtcacctgaggtcaggagttcaagaccagcctggccaacatggcgaaaccccacctctactaaaaatacaaaaattagccgtgtatggtggcaggcacctgtaatcccagctactcaggaggctgaggtaggagaatcccttgaactcaggaggcagaggatgcagtgagccgagatcgcgccattgcactccagcctgggctacaaagggagactccatctcaaaaaaaaaaaaaagaaaaagaaaagaaatacatgacccatgtttagtgccctccctggcaggccgcatgtgttggccaggctggcccagcctgcgggggcctgttcttctcactcccaggagaggagtggcagggttctgaagggatcgaaaaaggggcctgaactcaggggtgggggcagcaactctcagtgaggacctgagagtcaggggagaagctggacaagggagaggtctagggtctgagaggggtcctcccacagcttcagagttggccatagaaatagcctcccaagcacccaaggacacctggtggcaggggccaagctctttttggggctcctcagacttcccaaggccatttcagccccccaggttttaaagaaaaggctgttcacagcttcagaaaagaaaacgaatggctgtaggatttgtgccccaaggtccaaatgcagatggagaagtaagaagaaggagccgtattgcacaatgaactaccaatcatcaatccaggctctcctgtcgcttccctacatcctctaccctctccaaacttctcccctctcttgacttagcacctccgaaaaggtaagtcgattcccagtactcaccctgatccatctccctccttctcctgtcggtcaaggcccttcaactagtcaccagtacgattcgagacctaattgcctcttgagcatttacagtcaccctactagaaccttcccttccatccctgagtcgggcggggctgccacttcctcctcctcccactcctcctcttaaatttcccgttgttccaggtacatcttggcttaaggaagggagcttctgacttaagccttgtaaaaatgtgctgagggatttgtttctgtggcctcctttttgagctgagaagactcacaagtgatgtgaatggcaaagcttggcttgaagctgttcccttgtgcctctgtcacttcaaggcctgggacccgattcgatctaagccagttcggtctggcttcccctgaccatatgggtgttgggtaagaaagagctatgaggaaggtcatagaaagagtcatgaagaaagatttgcacagcccatcaggacccagggagctttgcatcttgaagaaaaataaagcacactgaaatactgaattattaatgctgctgattaaaaatgaagttgacaaagtttccagtgacaaggaaaaatgcccataatgtgatattaactggaaggaaaaagtagaataggaaaacagtgcagttgttctcactcatatgtgggacctgaagaagttgagatcagagaagcagagagcagagtcgtggtgcttagaggctgggaagggtgggtgggagcagggatagaggttggttaagggatacaaaattacagctagataggaaaactaggttctagtgttctataacactgcagcgtgactatatttaatacgaatttattgcatattttcgaataactggaagagaggtttttgagtgttcccaacacaaagaaatgatcaatgtttgagatgatggatattctgattaccctgatttgatcattatacattgtatacatgtatcaaaatacatcagaatgtcactctgtacctcataaatatgtacactattacatgttaattaaaaataaaataattttttaaaaaacagtgtagtttaacagtgtaaaaaatattatttatgcagatagacccatttttaaaagatagaagaaaatataacaaactgtggctaagagcagtgagattgtgaatgtgctttcttttttatattttactgaattttttaaaaattccacagtgggagtgtaagatgtttttaattagggagaaaaaaacacttttttttaaagagaaagaaagaaaaagaataggaagatcatggcaggagatccagacatgtgtgtatgtgtttcccagattcaaagtttaaggagagaagtgtccattcagcactcctggaggaggaacttagtttggtcaaagaataagtgctgcagacagaaaaactttaaagctatttacatgtttactaattattgtcaaacatatagaagaccttcgtaattccctgagttaatctgtgtgattcattcgtcacaaattcctgcacctattgtaaccaaagctttcagtcacatcctctgcctcttttaatacgttgagtgtattcacaaaatgatggtcaggcgaacacattgaactcactcattacccggtgttcagtgggcaccctatgggctttattttgttaaaattgctgtaccttggctcagaaaaatacctgattactggtgccaagaatcttttgtaatagaaatatatgctcttttgaggaaggcagatgtttttaaaataactttttttttaaatttagagttctaattcataaattaaagatattttgaattggttttgtttttgtttttgtttttgaaacagagtcttgctctgtcacccaggctggagtgcagtggtacgatctctgctcactgtacctccacctcccaggttcaactgactctcctgcctcagcctctcgagtagctgggaccacaggcatgcgccaccacacccagctaatttttctatttttagtagagacggggt

SEQ ID NO: 1242468 - DNA, 4001 bp, Homo sapiens
ttccataaatatttattgaattacttaaatttgtaaaatattgttttaggcactgcaatacaatggcaaagaaatcagacatgatcctagctctcatggagcttacattctaatatgagaaacaaatattaagcaaactacacaattatttcatggcaattatggtaagtgctactgaagtatctgtgctattgaatcacatggagtacacgaagaatgagagtacataactaagggatcaaggggaaagatgtttagctgatttttaagggaaaaagacttaattggcaatgatgggagtgggaggggcatagttccaggatattataatacatgcaacaactgagcaaagtcttgttggtaggaagtaatatagtatagtatgtccaagaactgaaaggtcagcatgatggtacacagtgagcaacagggacagtggccttggttagggctagtgtggtatgcagggggaaaaaacatgcagggccatgtaaattgggttaataattttgctctttatcttaataattgcaagatgccattaaagggtcttaaatacccaccccaatgtaggaagcaggttagtactgcagaaagagtgttggtctggcaaccggacctaagtaaggattacagacccctgaggaaattactaacctcttgctataatttaatctgtgtaatggtggcaaggctgaagtttatcacaaggaaggctggaaagttttctttaaaatggtacgtggggaagaaggtagtagtaaccagatgcaaaatgagtgcaaacaatgtttagaaggaacagaaaagtaggcagaagagagcaagatggggaaagtcagctcactagggatactgaacttaaaggcagctggagctagttatcagtcataaaggaagcttggggtgggaagggatttattagcaagctccatcatcttcatctgtagctccacatctccttcgccccatcatttgtgacacaaataagggactttcctcaagcttatgtaatgttatgcaacacagtttcaagcactccaatcctggagatttgctcaaattaaaccctttctatttaaaaactctggagcagcgagtgaaagcaactcactactctgcaggacaagactctgtgtgtgtgtgtgtgtgtgtgtgtgtgtgtgtgtgtgtgtgtgtgtgtgtgagttttgggggaggagcagttagaaggaattaactgggtcacttaattccaaagtgttaatgataagtgggaccttggagatcacctctaaagcacacccctaactttgcagattagaaaacaggaactttcgagatgaggtgcctttcccaaggtgacactaagtggaggagcccagccagagtccaggggtccttacacaaccttcggtggtctctctttacctgtgaagctgcagcctgcttcccagctcgggggcgtgtacaggagactggacctggggcagcctcagaatgcctggctgcctggagctctcctcgcgtgtccaggcggcctgcttggtctccctcctctcccctcttaggtgccggggcgggcacccggtgcagggtgggcacggcgcctgccaccagcctcaggcgctgggagaagcgcaggttcttctggataaccgaagagacgtcaaaacaggctggggcaaagtggtcagagcagatgaccgagcggtcattgcctccgtaccagtcggcgcggcaaccccgcacgaagcggtcccagagcagccgcacggcccggtccttgggaaagcggaacagcgacttcccagacttggtggtgttgccgcagtgggcggccacacaacgggccggcatggcggccgtcttcggtgcgcgggagccgggttccctggaccttcgcccttgggcacgctcctcgcagcggcctcggcgaggcaagtcctcccctcctcacctgtccactccgggtcgggattgtttccttccctacctctggtcaccggaagtggcgatctggggcccccaatgggagggctctttgatatcttcctcctcctcctccctgcgctgctccccaggagccagtggacacaagcagagggatacaaatttcgcgcgggcagcgctgaggtgggccgtaaagaggaacggaccggaagtggtggtggttatagcaaccagtgtggccagcctcttccccagcttatcctcctcccaatactcccgctctgtttttatgaggctgggaaaatagaacgaggaagtggtgacgcactgggctctcacgaatacaactagaagctgcaacgactgtgtggctctatcgattcgggagaggtccagaccggaaatggtcgtttccatggtaaccctgagcaggttgcctgggagatgacctctttcgggtctctttgaatctccgctgtagcgtcacctggaaggcagatctaacagagaacctggactgtctcctatcatgattcccgggaaatatcgctctgtttctggccgggctgcgaacaacgtaagttgggccttctactttctctttcttcccactggtactctttctgactggcgtctttgtcctaggagatgggctgtattattaggaccggcaccgctgggtctactcaagctattgtctgaccagggtttgaggttcgtgggctggaccaaggcacaatttaatattgtatgatgggtactcaaagtcttgtccaggatctgggctccccagaaggtggagctggtctgctgtgaaaggcttgggtttatttaaattcctttggccagtcaattcctttttcttttcttttccttttaactgtgaagagaatttatcattagggactcccacctccttcacctgtctcattgagatgtttatttagacctgaatggcaaatgtcgaaagcctgaggtactaactagagggttaaattgctgccgacattttggaaaataaatcagtgaaaccttttaattcttagatgtgattttattgttttcagcaaatcctcagaacaagatcatttaccagaaacagaaatagagcattgtgttctatttttttgttgtatttctgtttgtaccttttttttttttggaaatatgtgtttgtgtattaagagcaaattttatggtttaatttttacatttcaggtgaactgcgggcttcatctggttattcaaacatcatcgcttcctgaaaaaaacaaagtaagatttaagaaggttggcatttaaattgaagattgttttaaattctacacaaatagcagcatgacttaaagtgtagatagattctaaactgaaaaatttaagtagatttgctttgatttccagtttaaagctagttcttactttctgcctacataaagctaaaatagccctctttaaaaaacttaatgtgattttattgattacaaaagggtaagggtttttttgttttttttttttgacatttacacttttttttttcttgagacagggtctagctgtatcacccaggctggggcgctggggtgcagtggcacaattttggctcactgcaacctctgcctcccaggctcaagcgatcctcccacctcagcctcctgaatagctgggaccacaggtgcatgccaccacgcccggctaatatttttgtattttttgtagagacaggtttcaccatgttgcccaggctgttctcgagctcctgagctgaagcaatccgcttgctttggcctcccaaagtgctgggattacaggcaacagccaccgcacccagtgatatttacacatttctgaaatcaggagccttcttaaaattgatggcatgtcatagtttaattggggaggttttttttctttcttaatagagggtaaaataatggtatgtcttactactaatgacaccttagataaaatggtaattgggagggcatatccacacatcccatttaaaatcagggaagaaaaaaataggttagcagtggacacatgttagacttaacgttatttagaagtta

SEQ ID NO: 1242469 - DNA, 4001 bp, Homo sapiens
gcctaaggagtatctaaggcttgaacaggctgactgctaaaggaaaaccatttcttgtttccttgagtagttttcaaagtgtgcttcccagaccaccggcatcagcatcacctggtacttgttagagttgcagttttacagaatcccagactctggggctggggtgcagcagggtgagctttcacaagccctccaggtgatgctcatgctgcctaaaatctgagaactgctgcgttagtttacagacaggatttcctgtagccctcctggcaggtcacctgtctagcagatgatcccacggagcagggctcagagaagaagcctcacctggaaattgtcattgacgcccccctttgcgatgcggagtctggcgatgctggccaggtctctggtgaagacgctttggatggggacgtccaactcagcattctccatcttttcacagtcgatgtacagctgggccctgtcttcctgcacaaacagggtgatgctcttccactggccggttgccaggagagcttcttccacagacaccacgtgctgctttccttggacggtcaggctgaggtccagggtgcccgccttgccattggacaccacgctgaagacctggccagagtggtctttccgctccagggccagcagcgtgccccgggtcttcttcatctgcctcagggatgccagaaggaggaaacccttttctgcccgcacagcatccaccaggtcttggaacttgtcatcaggcacaggggggatcaggttggcatcctcgatgcggaaagctgggctggaagggtcggggcccttcaccagtcggcgcccagaccccttgcgggcggccccggtgagttcaaagatgtcaaacacgctgttgtctccgccagactctgttagacaggagagaacacaaagtgagctttctaggctgggaccagcagtagggggctgagtccttaggggtggagacaaagggttggggtgaaaactcctggcaaccactgaaagaggtgaataaataccaggatcagagtgaagctgcgtcctgatgtccagtcaggctcaagagggagaggacagcacgtgagggggcacacctgggatagccagcacctcttccttgtccctccttcccctaaaggtgccacacaaactcacctggaatgcggttggtgccacacacatgcatcaggaacaggacgcctagtccccaggccagccccatggtggagctgttggtgcccagcagggatcctgtagcaggaagcacaagagccgagggtcagagatcagctaggcagggagggacggtgcgcagaaacggggctgggcatggggacagggccgggaccatccctctttgaccccgcgtttgctgaaatgaaggacaacaggattactttccagagagcatgagagagagagagagagagagagagagaggtggaggaaagagatgctggttttaaagtgtggggggcgcaagaccaacaatttgggggcttttgggaagtcgaaggtgagcaagatcaggaactgtagtttggggttgcagggagggcaggggaagtacagactcttccctggagtgctgatacaaaggcttaaggaggacttcagagagtaaggaaatcttggggtgtcctgatgagttggtttgtgaacctcaaggctggagaggatggctctggagccttgccctgaagagtcctccagcggctgagaggagcgggctggggtaggcgagcggggagagtgtaggttccggggtccaccagagggactgaagcctcagcgctccaggtggatgtcccgggcagctttggtcctcggcggccgccgggggcgacttacctgtgtgtaccggagcgcggcggccgggagcggtggcgagggcggcgagggctggaggggcgcggggaatgcctgtgcgtccggagtagaggttgctcctggagagcgacaggagccctgaactcgcaggccagctcgggcgcagcggctggcaaggcggaggagccgcgcgcttttaaaggggcgctcgcattcctggggattcctccggccaatgggcggcggccgggcaggaagcgggaggtgggggccagtctgggctcctctctccgccccccgctgcctggcgcgcaactttccagctagaaagtgaagggggcgggggtcggggcttgggagcactagaacttctcagaaaagtcggtgcccgcccacgcagccttggcgcgcacgggctcggcgctcgtactcttgcgccacgcgggctcggggtgatcagcaagcatcccgaaaagggacggggctggggagaccacctaggagggcccgcggggtggcgcaggggctttcgggcgagctgatctcccggaatgcctggttgatggcgagaggtggatactagagactgggcccgttttgtaaaaagaaaaatgggccgacggggcgcaggggacaccaagagagccattcgttaaagtacctgcccctcgggccctcgctgactctcctccaccgtccccgtggggtgaggacacgcgtcccccgagcgcctgtcctgagctggccccacgcccgccccggagggaggtgagcgcggcgtcggcggggccggcaggttggtgcgccgcgttcgccttcgctgccttcgggccctttcctgccgcggctgccagggggcccacagagacgcctctcccgctgccgcggcgctccctcggccggccgcttgggggcggtgtgcgtattctcatcaaggggcccggggaggacagctgctttctactcgaattttaaggaaacttactcgtatccagtttccacaagccaaattgaaattgtgtcttgaaaaacagtttttgtgcccactcgtgcttcttaacgtgactcctgtttggagaatttgcagaaccatctggctccagagtcttcagctatttacagagcagacccatagagtaataaattactctctgcctattattgtatttccctttttcctccctaaacgttcttttcatttttcggctcctgaacccgaggtgtgggttacatttctgtgggtgcacacattgccatgagtgccgctgcctagtgcttctgtcattgaagtctggtctccaagccactgtcccaagccagcatgactctagcttcctggaattccattcatctcttcgggatgggacgtcagccgcctcgctccctctgctgtgatccagcgctatcgggctcgctccgaggccagggcataggtagaagcttgaccaaataaggatctcagcacgggcagggggaaacccctggggttcacctcccatcttagcacttaaacctggcaggactcccgactgctgcaaacagccaagtgtttacattcatcaaacagcagtttcgcttttcttgcgtgggagtgttgtatgacaagatggtgtgtgtgtgtgtgtgtgtgtgtgtgtattacggaaagagtgttttctagttactcaatatgtatataaaatgcctctaaaagatgaccggtatgttcctaaggcacatgtttgttggatttcagatgttgggaggcagaaagaaaagtttctactggttgatgaataaaatcagattcttgtcccgcaaatcataggtaatgattcatccaagcagatctgaagattctggaatcggcacccatccatctccctccccttccttctccttctacagcattcatcttgctcttcgaaaagtaattgggttttttttttcttctttccacttgctccatgatactggacagtcagaaatagttcttggagggatgggccgctcatggctctgggctcctctggcccactggatcattgtgtacaaatcagatgggggcttgagggctgcaagaggcccacaaaagcagaatgcatcttgtatgaaaagattatctcccctaggcttagctgtgcagacagagtagaaaccagcactcactgccccttcaggattcatgctgc

SEQ ID NO: 1242470 - DNA, 4001 bp, Homo sapiens
acatacttttaactcataagacaaaacctctgccttcctctctcaaacgctgagcactgtctgaaaagcaccaagatttgggtgagcctgtataatccctttcatttttcatctgctttgctgattgtcaggtgaagcagagccatttgccactctgcatgtgacacaaggctaggggcacacagattccggcgtggccttccccacgagtcagctgtgtgcaggtaactaaagcctgccctttgcttgctgttaataagaataattggcacaccactgaggggctgctggagcactgtgatttgctcagttcgggggtctccccagaccatatgtgcatgcagcggtgatagaaatattttccatatgagctctcctctcgcctgcttaaatgctccaggctgagtgaggccagcccatttgtcattcactctacacacgaaaaaaatcaacagggaaattgcgaacttcaactacaactagagggcaatggtctgctttcagcttccagcatcactcacccattcagttcctcctgctcccattcaagggctcaatccccccacaggcccagaaaatgtctacagagcagaggacatgagtaactaataagtgaaaagcctacaacaagtgacccgttgctgcatgtctctgagctgcatgtctgttttgaacagagcaacaagcctgctgaaaccacagctagccttgcagccgtgggcttgggagcactcccacttccactcttcttagacaagggaaagtaattacattaggctttcagagcctgcttggtccctgacaaggctaacaaaaggcaaagctgtgaagtggcctcatggcctttttaggagatacacttttcatttggcttttcaaagacgaagatggatgcaggagaaaggctgtcctttcgttactcaggcatcagggtaaggagggaaaggagtggatgagggaaatacgttgcaggcttgtttgcaggtgagggtggatacaccaaggtgcttccctctctggactcaatgatcatctatcccaatctctttgcctgcatcaaaaactgactccaggaggtatcactgatgttaaaaaaaaaaaaaaactgtacccaacaatcacatgaactaaaccagtaataataaatcatcctcatgaacttaaaatatgtctccctgctaaggtacatctgggtacactcctagccctgttgtatatcattctccctcttcaaatctatgatagaaagttaagcacagatttttctaagcacatcaaagaaaaaaaaaaagagagaagtgttgcaaaagcagggaagaaaagcaattcccctagcatgtacattctctctgcagcactggagaaaaattctcaaaaggtaacagtccctaacgaaatctgacatggcacatctttttttttttctgctacagcaggagaagcgtgcgtgctacaggcatctgtcaccaaggccagagcaacttcccagtgtggcaactgcacagacagcttcaaaatgacattttagaaagtataaaattcttcaagaagaaaagaagtcttcatataagaaaaggcaagagaagcctacaaaagtaatataaagcattactctttgcaccccataaaattccattccctgatccctcttggtagatagaagaggaaatataatgctgaaaaaaaatacaacttctgacaagatattttatttggcttacctctcccccaggtcttgctaacactgctgtttgaacgtggagcaatgttaatatcaggtagctgacaaacattattacccaaagttagaactaccctagaggagaactccgtctgccaagtgctaacagctagcagatgcacttgtgtctcgggattccagccctggagttccgctaggcaccgcgctggttccctcggctctccctcactgtactgcccggcgcttcgagctcagcctctgttctgaagaaaactggtaagctgatctcttcatgtaataacttctcccggctgggggaggggacaggagccagctgggagctggggggctgcctttaacagaaagcagaaaggggagggacagaaatgatcaatgtggagttctgcatctggtctcattcatgaaaagggttccaaggtaagcacgccacatgcagggggacagcccctacctcgtccactgaggcagggaggaggcagtgaattgcagcaggatgagctccgggctgggaacggggagagccagggccttcctagtccaggatctgggactgacaagctgtgtttgcctggacaagttgccagtccgctctgggctgcagtttatttttctcacttatacaaaggttgggtgaatgacttctgagttcccttttagatctgatttgatggttgcagaaatctaggcagttaaaagctgcattatcaagggcagcctcaacagggacagaagtcacaagggtgatgtgtgtttgtgcaccagttgtatagacacaaacggatgggaactgtggaagccattatatccccctcttgctgcatccctgggtcactatgcctaaccaagagcttgaggaattattgcagaaaatgtaaaaataggtggtaacatgggaacaagtgaatcccaagtgtcagacagtgctgtcagagtacactgaaatgcaggatggttttaaagaaataagagctacctctgagtagactcacatagaccatcaaagtggggcttgggagcatggggagcaggctgggaaaagggtcttcctaaagcctacaatgcacttgagatacactttacatggtcacctgttatcctgaaatagcagagaccatggtttaaaatggattagaacccatcaagtactgtattctgcctagagtgggctcaaggtgctattctgaggctcttggtggccacagaggataggatgactgcacggtgcagtggaaacaccctgaggtcctggaattaggcaggtgtgggttaaactccagttgtacttcaaactcttcatgtgtgtctctgggtgagtatttaaccctggtgagccctagtctcccctcctgtgaaatagggaaatgccatcctatggttatgatgactatcaatgagctcacctaggcacaaaatgtggcatagttcctggcacacagtaactactaaagacacaggctttctctttgatctgaaataagtatcagcagccagccccagaaagtaaattaataaacacttgaaaagcctcaggttatgagcattttcctgcattaatgaggaaactttaaacctaactgcagttcgtagccatctcagaaagtttattatcaccagtcacatgaccatttaccagtggggagttttttggtgggggacagggagggaagaactttcattcctttttacagggctgtaagagaaaaaaaggtatagtgaggataatatctccagttaaggaaagaaaggaatgaatttttcctcttcctccttcttagtcattgttactgttcagctttggttctgttctgctacctaactaaaggggcaaagttatctaccgagtaacctcatgagaaatgcaggaattatttaagaaagccaaagttcttgaaagaccaggagtgttgtctagccaggggttgggaaactttctgtaaaaggccagatggtaaatattttaggttttacagaccacgtgggctcaagtagcaactactcaacgccgccattatagcacaaaggaaaccacagacaacacacacatgaatgggtgtagctgtgttccaataaaactttatttgtaaaaacagacaggcggccagatttgacagtagtttgccagcccctggtctagacacttctcaatcacccttcaatccactgcaatcttttgacctgtctgctctactgcaagggctctggaaaggtcaccaatggcccctgtgtcacaaaattcaaaagagaatcactaagaactcatttacttctctgtaaccat

SEQ ID NO: 1242471 - DNA, 4001 bp, Homo sapiens
tcctacatggggtcctgggtgcttaaaatgccatggtcctacaatgaccctgtgggccaactgcatttctcactaccctatagttttataacagtattttggaacttccacaaactagatgcatatttcatgtcttgaaatatcttttaaactcttttttaaactatagttttaaaaaagcacacatgctaatttgtactagatgccaacttctatcctgaagagatcaccaaacgttaatttgggctgtcctcctcgtggctcaatatcatacagccttcagaatgaagctttttctttcttttctgaccatatctgacatgcatgtgaatatgtcattgataaagaggtttgtagttctctgcgggtatttggattgcaggcctgcacacgtctgcccatgtaaaattatacaagcaactacatactaaagctcacacacatgcactgcactcagttaaatgccaggcattagcccaagggcatctgcttggcaaatgctctagccctggttggccaaccacctgtggcaccatcatatgtaatatgctatatattacagaccattttactttctgttataagttctaggcatgtgggactaatgtacaggtatggaaaaaagactacaagatatcataatgattcaacttggaaacaaaacgttcttccttcccctcattccagattctcagtcaatttatttaaatagtatcctaaaatagtaagatgagcttcatcacagaattgttaccaattgcaagtacttacctgtaatgggttaggattttcttaatgctacacagctaaaacagctgcaaaataaactagatgcttgggcagatatttaagctgccaaccataaatcctgatttcaaatgtcggtatttatcaaaattaatgcattgatctcataatgtataaatattataaatttaaacttataaagtaaatttatattaataaaatactgtcattgtctattttatatattgagattttgcataggattttgattgaagaatttttaaaaggctctgtcagcctttttaaaaagtttgaaaacaacttcgataacatggactacagttgcaatgctcagagcccttattctaactctgcacataaaggaaggtgacagccatgatgtaagctctctgagcattggttttctgatctacacaaaagggataatagtacttactcaacttgccacgcatggttgatataaagattgaattttaaaacgcaggtgaaagtcaaaaatgttttgtacataagggacaagagagagcaccattttaaaataccagattcagtcaaaatctatggcgttgcaaccagagaacaatttttttaagttctttagaaaattgtattatgcaaccacggtaaatatacattgatctgaccccacctccagggttcaagtgattctcccgcctcagcctctccaatagctggtattacaggtgcctgccgccatgcccagctaattttgtatttttaatagagatggggtttcaccacgttggccagagtggtcttgaactcctgacctcaggtgatctgcctgcctcagcctcccaaaatgctgggattacaggtgtaagccactgcatccggcctaaaaaaattttcttgaagcctacagaaggtctcccagaagatagtagattgacttcgaccccaagccactcagcacagcacacagctcccaaggccttggaggcccttctgaatagcaaacttttacacaagtggacgtattatatcaaaaatatcagtcagctgcagacccttaagatcacttactttaagaaatgacagagtaaaatgcaaatatcaaatttcttattctcctgtttttttaaaaaaagtttcttcacttacctgagagaccccatgaaatgggaaaccatgatgctgggggtccaggcaaaagcaagggctcttcagagacgttgccaattttctgcaattgggagttgcgttcaagtcctatggaaatgaacaatgttatttttagcaacatttacttaggaagattctagaagcgtaactcggtcaacaaaaccagaaatgagcaaatggaagatactaaaacaaaagtgcccagttatggttcccaggatttcccaactgaaatctgattatttatgaacatgaggtaacaagtttacaagacaaccagcacagtgcctgacccacagaagatgttcagtaaattactatcagaacgatcacctcagactctgagctaacaggggagctggtgctaggcacacttgtgctggaaatccagccccatctattacaggctatttgaccatagatgtcatgtcacattcatgtgtcttggtttccctaacagtgcaagttgagtaaaaatattgtctaacaacaaaaagaaataaagtactcatacacgctacaatggggatgaaccttgaaaacattatattaagtgaaaagagtcagatacaaaaatagcatgcattatatgattccatttataggtaatgcctagaataggcaaatctatagagacagaaagtagattcgttggttgccagggattgggggttgggaggagttcatgggagggtacagtgtttcttcctggagtaataaatgtgttctaaaattagattgtggtgatggttgtacaaccctgcgaatataccaaaaactactgaattgtacacgaaattgtgaaacgtatgggaaataaattatatctcaataaaacttatttagaaaatactgtctaaagaactcctgcaggttgttataaagattaaatgagggaacgcatgtgacatgcttagactgtggctggggcagcgtcaccctcagtaaatggttgctctgatgatactgagagtttggatacttgtcctcttccaatctcatgccgaaaactgattcccagtattggaggtggggtccattggaggtgtctggtcatgcgggtgggtccctcatgaatgccctgatgccctccttgtggtaatgagtgagttctcactctattagttagggtgagatctgattgttaaaaagagcctaaaaggagtctggcacctcctcccttctctctcactccctctcttgccgtgtgacacactggctgcccttccttctccaccatgattgaaagcttcctgaggtcctcaccagaagcagatgccagccagcaccatgcttcttgtacagcctgcagaactgggagccaaataaacctttctataaattacccagtcttaagcattcctttatagcaatgcaaaatgaactaatatggtgatgcaagaagaggtcaaacaacacttaaaatacgttgtcacagtgaaaacatggaggtaaaatctctcgcccataaatactacttcattcagaagccctcactaaacaaaatttctaaaaattgtcaagtgagccaatagtttcaaaggcaagttatgaatagcaacagaaagcccaggatgggcgggttggttgcaacgtagtaaaacttagagaataaaacagaacatggcccagtctcctctcctgctgcaactccttgaagggaaagacaaatgaagcaaggttccaaggtgggccagggatcctttctaataaaggtggagttctctaagatcattattttcttgtttcttccagagacttcagacttccttttcaccagaaaatgtgggtgggaaaataaaggacaaggatttacaaaaagatagtcatgagaaccagacaattccattctcagggaaaaagaatcaagattttaagttaccacaggccctttctgcgggttattaagaaagtaaagcctcttaactgtaatcatccctaattagccatcagcaactcatgaaattactcctggtattgaagacccttaaattcttggctctcagtcagaaattacactgagatccaccaggaagaaggccaacaagtgcaaattggaacagttaaaatgcctttgaatcagaggt

SEQ ID NO: 1242472 - DNA, 4001 bp, Homo sapiens
ctaccactctgtatacaataaccaccttctactcccatcctctcaccccattttattttctccagagcatgatttgaaattgtcacttgcttatctgtttaatctgttccctgctttggttaccatgtccccagcagctcaaacagtgtggtaggcactcagatgttactggcttctcaatgaacatttgttgactaaatgaagtgcaatgagaaggatgaaggcaaaagtatatacttatcctagcacttaacaggagcagggggcctcaccgcctcagcaaaaatccaaattagccatttaagactttaagtttgcaagaatgtacgcaagaatgtactcatttagtcagccaatactgactgaacacctacaacgtttaatacacatctgggtggctgggcgtggtggctcacacctataatcctggcacttcgggaggccaaggcaggcggattgcctgaggccagagtttgagaccagcctgggcagcatggaacctggtctccactgaaaatacaaaaaaattagccaggcatggtggcgtgggcctgtagtctcagctacttgggaggctgaggcatgagaatcgcttgaacccggaggggtggaggttgcagtgagccactgcattccagcctgggcgacatacactgtctcaaaaaataataataaataaatatatatatgtatataaataaatgtgtatatatatgtgtgtgtgtgtatatatatatatatatatatatatatatatatatatatacacacacacatacacacacacccctgggtattgtgttaaaacctgctgcttgcctctgaggtatttttagactagatggagggtgagagatgtgcataatcaaaacatatggagaaatggttaagtgccacacaaaatgtgtatggcaattcagacgctggactgagcagttgtcactgggagaagaagccttaaagggtaagtgaagttaagactggcctggaagagtgagaactggcattccaggcagattgaacaacacacataacacaaaacaagcagtccagacctgttgattttctggactggacttcaatatgctagagtagatgtagtgtgtaggaaaatcaagtctgggaaggcaggtagggcccaaattgtgaggggtcttaaacagtaggtagtgaggaactacccattttgttgtgaaaactgttcctatttatttgtttccttccgaagggacgcatagtcatattagtctcattcggggtctgtggctgttctaaggacgctgccaagttctggttagcaaggaaagcaccgtgcacgccatctgagacgacagtaaccttccttaccttagaccattcggtggtatccacccagtagaaggtgatttttcgggcgaccatgacttcccggactctcttgggcaacaacttctccatcacctgcttaggggtgggcggcaggcgctgggcctgggcctcgcacccagacacgaactgcagcagctccctctgcgagtgcggacagggggccaggaggaagacggcgttcaccaagcccccgagcgcggcctcggcctccttggcctcgctctccacgtccagcagtctcctcccgctgctccgcaggatcggcttcgtgggcgacgtgatctcgggccggtcccactggtagtctagcagcgtctccatcagggcgccgtgcgtgtgggtggccctgggcgccgggccgggcaggtgggcgcgatcctcgagcctggcctccagctcctcctcaaagtcctcccacgagcgggaccccagctcgcggaagtcagacacgcgggacggccggctccgcgccccctgcgagtcaaagaacttgaaggcccagtggaccctggccaggccgaatcggcaactcagataggtgaggaggcgcagggcggcccgccggacccggctgtggcgggcggcgccgcccgcggtgtccagcagcagcattactttgtgacagcatgccatatcggccgtgccgccgccccggggccccggtccgggcccgcgccaccgtcccttagtcccttccttcagggaaacagcaccactcactgctttcctttgggaccctggtcgaaaggctcccgcgctctccaggaactgctgctattgggggagctagtttccaaggtttgctcctattggctgcttgccttacgtaagttacgagagcaacttccatttttggcggtgattggaggggcagtggagaaaacttcagtctgattggtggagggagtgacggtgggcgggtctctgtggtccgagagaagcttagcattcattggcctgggccttcgttttaaattttaaagaggtggtgcctcgggggcgtgtcgagaagtttcgccattggaaagaggccagcgtttgtgcgcagtcgtgagtgcggactgcggggccacgtttcccaagaccgaggaaaacttagtgccgggagggaatttgggatggtttgaatcgaacttgttgaaatccctgtggaccgcctaggaagtagaatctgacgactacggctttttctgtaatttaaaaaattttattaaaaattaaaggttcactccctttgccccagtaacttctaggagtttatctgcagaaggtaatcggagagccagataaaagacgtctgtacatcttagagtttatttaacatcagaaaaaatggaaacagtttgggaatggttaaataaggtatggtacacgcccaaggggagcatcgtgcagctcctttttttttttttttttttttttttttttttttgaaacggagtctcgctctgtctcctaggctggagtgcattgacacgatcttggctcactgcaacctccacctcccgggttcaagcgatcctcctgcctcagcctcctgaataggactacaggcgcacgccaccaccccagactaatttttgtatttttagtaaagacggagtttcaccatgttggccaggctggtctcaaactcctgaccttgtgatccacccgacttggcctcccaaagtgctgggattacaggcgtgagccaccaagcccggcctagtgcagcttcttaaaatagtgttttattatgtaatgttaggttttaaaagtggactgcaagcagcacctgcagtgaattccctaaattttctatctacatgtatatatagatagaaatcacatgtagatttgcattacagatagaaattatatatcgctatatagatagaatacatagaattatatatagataggccgggcacggtggctcacgcctgtaatcccagcactttgggaggccgaggcgggcgaatcaccaggtcaggagatcgagaccatcctggctaacacagtgaaaccctgtctctactaaaaaaaaaaaaacaaaacaaaaaaaaaaggaattatatatagatagataatcatagatagaagttatatatagatagaaatgcatttatatgcatatttttaaactgttaatataatattgtgtaccggaagttgtctgtgatggtctctccatgtgattttttttgaaacttttttacacttcctcttgctggacaccagtgaacaggctgatttcagagatgtgagatgtgcctctaggatcagtggaatatggtatttggaaagaagaaggggacaaaaaatgaaggtcggttacctgaatatgtgtttagggagattgatccaatactccacaccattgaattctgcttgctaagtaattctgtttccacctggaaacagaacaacttcctttatatgctttggctacaacttcctttatgtgccttggcttctccaatcaaagtcctcagcaattactgcctcatgtacaacaattttctcttttggttgagttttctagggctgcctgccataacaaaggatcaaacccaaaaattgcctcacagttctgaaggcttgatgtccaaaatcaaagtgttggcatgcacttgctcccctccagcccc

SEQ ID NO: 1242473 - DNA, 4001 bp, Homo sapiens
gctctttacaaatactatttcctgtcttgaaaaagctattccttgactcctaatatcttccagatctcaactatcaccttttcaaaagtttacctcaatttctctaaatccttctttagtaagcattcatagtgtcaagtacaagtgtcatggcacttatccagtttcaatatcaggttttatttatacagttatttattgttcgtctcccaaactagactgtagctcaaaaagggcaacgaggttaagtctctctgtgttacacagctggaaccccaatgctgttacacagcaagtgctcaatatatatcttttttttttttttttttttttgagaaggagtctcgggctctgtcacccaggctggagtgcagtggcgcgatctctgctcactgcaagctccgcctcccgggttctcgccattctcctgcctcagcctcccgaatagctgggactacaggcgcctgccaccacgcccggctaattttttgtatttttcatagagacggtgtttcaccgtgttagccaggatggtctcgatctcctgacctcgtgatccgcccgcctcggcctcctaaaatgctgggattacaggcgtgagccatcgcgcccggccccaggtgctcaatatatatttgatgaatgatggaatgcaaaaaaaaattccagtttccccaaattggagttagacgatctttaaaatctcactaattctaaatttcggttaccataaatataaaagcaaagcatcggctgggcgcggtggctcacgccggtaatcccagcactatgggaggcagaggcggacggatcatgaggtcaggagttcgagaccagcctggccaacacagtgaaaccccatctctactaaaaatacaaaaaaaattagcggggcgtggtggcacacgcctgtagtcccagctactcgggaggctgaggcaggagaatcatttgaacccaggaggcggagcttgcagtgagccgagaccgcgccactgcactccagcctgagcgaaagagcgagactccgtttcaaaacaaaaacaaagcatcaattcctgatcatgacccactgtaacttcaagcaagctacaagaatctatactagggttcagacctttgaggctgacagcgagctttgagtttgatgacagtacctaaaatatattaagtgtactcaggaactggccaagcatggggtggggcttgtcaggaaactggtatttctttcttctatttgtagtgaataagatgctcaatagacgacttttactcctcgtcaatggtcgcataactgtctctttttagacacttatgaaattgtctgaacttcctcctctacttctccaactcccagaagagtgaaggtaacaaatgttatgtccaaaccacggtttgttcccagaccctggtttccaatgcccacctcttttccaagaagtccaaagagacgcccctcatcgcaaaggaagtgctaccgtgctgcctcgatgtcccccttgggtgccatccctgaaacatcgaacctcccatacctcttctccagccgtccccctcatcctcgttccccgcctaccctctcttcaacttcattcattcatccaacattcgctgggggatttctacattgacacgccccggacagaagcctggggtaaagatgatcaggaacacgttccctcccgctaagcggcttggcagagtaagaggcatcccaaaacctaagcaaccgggacacgcgcccacctccccgcctctccaggccgggtcaggtcgaccccccaacctcctgacccccttcctgcgacaattaggctttcccgctagtctgtctggctccctggctcttccatctggctccctggctagtccgactcccctctccccgcaagaacttcattggcccgccagccagctctcacctcacgcagaaaacacgggacacagcgcggacctcggcgtgcagactaagcgcgcttctcgcgatactcgggaactcctggggcgagaagggcccgcagcgtttggcgccaaatccgtgcggggggctgggcggagcctgcaaaacccgcctctcaggttccgcccagcacgccggtcccgccttcggtcccacaatttccgccctactgaattcttcagaggaactcagttaagcctccttatttgcataaagttaatacttgttattctggggtttttcttttttttttttcttgagactaagtctcgctctatcactcaggctggagagcagtgattcgatctcggctgactacagtctctacctcccgggctgaaacgatcctcccacctcagcctcccttccccgactaacaccaccacaccgaatttttgttttaatgggtttttgtttgtttgtttgtttgttttgcaaagacggggattagttgcccaggctggtgtcgaactccttagctcaagcgatcttcccacctcagcttcccaaagtgctgggattacaggcgtgagccactgtgcccggcactttaaaccttggaaataggtctcggtttttggaaaactgagttgtgggaggaggaaaaaggacagaggcaagcaatagtgaataagaaattaccgcttcttcagagttcatagcagaatgcttcgaactcagagttttatgaattgtttattgaataataagctgagaaaagaggtggtaaagagaggaaaaatagggctgaacatagacactggccaggtgcggtgtggctcgcctgtaatcccagcactttgggaggcccaggcaggcgaatggcttgagcccagaagttgaaggcggcagtgactaggatcgcactgctggcgatccagctggagatccagtctgggtgacagtgagatcttgtcgcaaaaaaaaaaaaaaaaaaaaaaaaaaaagcgagagagtgtgaatgtaaacaaaaaaaaatgtcaaaaatatgttacttggggccgggtgcagtggctcacgcctgtaatcccagcactttgggaggccgaggcgggcagatcacgaggtcaggaattcgagaccagcctagccaacgtggtgaaaccccatctctactaaaaatacaaaaattagccgggcgtggtggcgcgcacctgtaattccagctacttaggaggctgaggcaggagtatcacttgaacctgggaggcagaggttgcagtgagctgagatcatgccattgcactccggcctgggcgacggagcaagactctgtctcaaaaaaaaaaaaagttatttggtcagacttggtggctcatgcctgtaatcttagcactttgagaggctgacgcaggaggattgtttgagcccaggaattcaaaaccagcctgggcaacatactgagaccctgtctctattaaaaagaaaaaacattttttaaaaagttaacttttccatttttaaatagtaagtccaaatatatttgtatttgtttgtatacacacaaacatacacacacaacctcagaaaaatatataactagaacctatgcaatgaaagtggcatatgggatagagtgggatgggaacttaactataattttttttgaacatacaaatgtattaactattcaaaaaactaaatttaaaaatgttatctgaagcaaatatagcatcattaagatttgccaaacctagaagataattagggaatactggcagcattattctctccacttttctttctttctctctgtctttttttttttttcttctttgagatggtctcactttgttgctgaggctggaatgcagtggtgcgatcacagctagaatcaggtgatcctccctccccagcctcccaggtaactggcactacaggctcgcaccaccacacccagctaattttttaaattttttgtagagatgggagtttcgccatgttgcccaggctggtctccaacgcctggtctccagcgatcctcccctcctcagcctcccaaggtgttgggattacaggcgtgagccaccgcacccagcta

SEQ ID NO: 1242474 - DNA, 4001 bp, Homo sapiens
aaaagcaaaatgggagatatgactgctggtgctgatatttcccatacccccacataccatcaatctgagaagcgatcttcaaatgttaccccttcttccttcactgtagtgacagtcttcatttatttgctaacatctcccacggacatgttttaattgaactgtggctaaccttgtcttctaagtgttgtcacttgctgttcatcacattaaaatatcttttttttttttttgaaataggagtctcactctcgcccaggctggagtgcagtggcatgaccttggctcactgcaacctctgcctcccgggttcaagcgattctcctgcctcagcctcccaagtagctgagattacagccacacaccaccatgcccgggtaattttgtatttttttggtttatttgtttgtttatttagtagagatggggtttcaccatgttggtcaggctggtcttgaactccagacctcaggcgatacgcctgcctcgacctcccatagtgctgggattacaggtgtgagccactatacccggcacattaaagtatcttttgcagaataaatttatttaaaaaaaaaaaaccaaactggtgggggcagaaagacactaacatttactaagcacctattattaagccaagcacagtggtagacacctttgtattcattatcagagttgatctgtgtatatccccatgagggagataacaagattctcactttacagaggaagaaacagacactccaggaacttaaggtcacacagtaagtggcacaactgaattctgaactttgctgtccatatttgtcttaccttcaaaattctccacttttaggattctttttcttaacccatctttttcttggctgatcacgctatatacttttttggtaaggatcactctttcacactgtcttatagagcaggaattactttcctcattacctaaaagcagcctcatctcctttctctacaaccttaggattaaattagactgtgctcaattgaattgaataaaacctttatgaactacactgaccactaattttaaaattaaaatgaccaatgccataactggcatcttttttctgtagtcatcttccctttactaggttatttcttttgcaaaagaatcttaatcctaaatctcaagccagtggcatacctaggtggctcctgggattccgcatggattacggattattattaataaaatgcaatatacaatcctgtagataatcagcaacgtaaaccagtaaggtccagacatttttctttaaggatgttttttcctcattacctcagtaacagtttccaggtcggaggaactggaacgcatgcaggtggaatacagtccctgacaatgcaataataatttcccaacttattccccttgccttgctcgtcctctactatgcactcagcagcagacgaatttttggaaaataactgaaaacgcacaccgtgataccaatgaattcttctgctgtctccgcgagagcctggctggaaattctgagccagaacccgccgtaatggagcagaaaggacagacagaggcgggaggccgacgcccgggtgcgggtgccaggcgtcccggccgctccccgtcgccctacgcgccgcgggcacagcgagggtctcggcgaaaccagtcagcgggcacgcggtacaaggcggcgctcggccctgggctcggccttggctgctgcgccccgcgcggcgcgccccgcgtcccgtcgggcccgacagtcgcggcctcgccccccgcccgaccgccccggccgccgctcgctctcccactccggcccccgccccgctccgcgcctagcccggctggggctccgcgcccgcgcggccgcctcaccacagcttcctcttgagcggcaggaggctgccgcggttggagggggtgacgccgatggccatctgcagcaccgtcaggtatttctggtacttcatcttgtccccgctccgctcgcgggcagggccccgccgcctccgccgccgccgcagacacagcccctccaggcgccgcatagatcagctctgggccatccgccgccaccacagctcccaccgctcccgcgcccgccgcacccgcagctgcggccgtgcgtggcccgggctcccgctcccgccgccgccgtcgccgtgcgtgcccggccgctcccgccgccgccgccgtgcgtggcccgcagctcccgccgccgccgccccttccacccctgcaggccgtggcccggcggcgcgctccggtgggcgggtgcgggtctcgcgggaggccgggctggcttggcccccgctccggagccgctgggcgaggccgggccacctgcgcgccggccgccctgcccaggccctgcgcccgcgtgccgcggtgttttcagcggctggcaggagctccttctcaaccgttagcacccaaagagaatcccaacagcacacttccagcgcggattaaaacaaacaaacaaacaacaacaacaacaaaaacgagacgctgcctgttggtttgtaactatcaattgatgtgttctatcccaaagtggttgacttcacattgacatataatgcatatggcgaatacgtactacacgcgcatgcagtcctcgcttgcacggtaattctggacgctggaaatgactgaaccatgcaaaactaccttaataatcactgggaaaaattaagattgtttcacgactttaaacagtttttctcaaaacattcaaagcagtccgggcacggtggctcacgcctgtaatcccagcactttgggaggcccagacgggaagatggcatgagcccaggagttcgagaccagccctgggcaacacagtgagacccggtctctacaaaataaaaaaaaaaaattagccaggcgtggtggtgtgcacctgtagtcccagcttctcaggagaatgaggggggagaatcacttgagccccggaagccgaggttgcagtgagccaaggtcgcaccacagcactccagcctgggtgacagagcaagtccttgtcttggaaagaacaaacaacaacaaaagaaccattcaaaactcgcttaactgatggttacaaataccctgtatatggaaatgaaaaaaaatcagtttaaaacattcaaacattgagaattaaagtattttttgtgtttgtaaaaataaagcttattaagaataacttgaacagtgcttgtcttcttctagtgtaactcttatataccaccttttctgtactttagcaaaacatcacatttggattacacgcaagtattttatcctttgcacttccaatgccatgcaatgtctcagagagttcctttaatgtaaaatgtttttgtggacctcatttcctccgggacatcctcatccttttagtcacagccattttcctcattcagtgtgctttgagtaagtttcactgactgcatatctagtctctggaaagtcagcactcccacagttgtctatttcttctatagtacttcatttgcattcaatttgaatttcacttcaattccatctttaccatttttttatttctttgctgcactttcatctttgttgaccaattccctttcaattattcatttttatacaatgctgtgtgagtttaacacttggagaaaaggaagcaacacaattgcacactttgctgccagtgcctaaactaacagtgcaatgacccgtcactgacagattttgaaagaactgctgtgattggtcactggttgttatggacatctattgtttacatagggttttgtggactaaagagctagaagcaaagattgtactatgtttgttcacagctaaaatagcatgataactaaaatttgttttttttgtttttgctttgttttgtttttgagacaggatctcatgctgttgcccaggctgcagtgcagtggcacaatcatggctcactagagcctctacctcccaggctcaagcgatcttcccacctgggcctcccaagtagctggaactacaggcatac

SEQ ID NO: 1242475 - DNA, 4001 bp, Homo sapiens
cgggctgctttaaatgactgtgaatttctaacaagtttcctgatacggccttctttttccaaaattttgtcgctatcattttatcatgtaggttttcttatcaatatgtcaagttttctacaatacaacactagaagacactgacttggggaaaattagtaaattctacaacagtgactgtctccatccagaaaatacattgtttcatctcgtttattcagatctcactttatgtccttcattaagattccagtagctcaccaatatttgttatatttatttctaggtagtctttttagagaaacatttagtagtatatatcagaatttaaactgcacatagcctttgcctcggtaattccatttttaagaatctgatatacagtaatatatgtgtacagatataaaaaggctactattccaagaacaaaatcctggaaacaaatgtctatcaagaaagcaaagataatctaaacagcagcatattcataggatgacaaactattcaaccattataaagaaaaccgaatcaaaagcactggcttattagacaagagtttcccaaactatcatgctaaaacagtaacagcgagcttccaaattaatgttgcctttttttttttttttttccaaactgaaaggagggtggggaaaacaaacgcatcatatgtaaagcactgagtccagcctggctcttagtaagcattttaatcaccttcaaaaattaaatgtgacttacggaaacaggtcactgaatattatttcatttcacttattcatttatggcctgttttgctctatataaaattctgaagtggctccataatacagcatcttaaaaaaaagctttcaacttgccctttactcgcaaatgtttacaatgcaaaaaagtccctacaacgtaatatttaacgagtgatgcttttcaatatgccatacaaatctcaatactataattcaggagaagtactcctcctaccttactgtggcaatccattgaaaacgtatttctctccatacttgaaataacctcttaaaaagtgtgttgtcttgcatattaagtaccagagatcacacttcaggaacaaagtgacattctgtgtaatacggaaacaaagcctttcctcctaggaaagaaagccccagaaaagacaaataatgggagcttattttaaaaccaaagcaaaatgttgccttttatcctaaatctctggatcaagttttacctttagattgttcttcctcaatgtaaggtcaaaaggtgcaagttaaatttttcttaaacgaagaatactatatcccttaaaacaatctattcattaataagtgtaaccgctagcttctcccagccagcaaacaagcttctgtgagagttcaaaagtttcagaggcatagtattcctgctcccagatgttacgggtaagcatttcaaacaaaaatacacacagaaaaccactacctgcccaagtatctcgatactatttgaagtaatgaattgatattctttaaaggggagattttttactcctcacatttctgtattcctttgtttgaaataacaagtactattttatgatgaaaaaattaatatacaaaatgggaggagcatcctagctgtttttcaggaactttggctttttaatgtaatacacaagttagtttcaaagcaatgggaaaatgcaataatatttcagagcacataggaaaagtaacaggaaaaacgttacttttttcggctgaactcaccggcctttactaatttttaagtgctcatcttattgtccattcgtaggaatactttgtattacttgtgaaagtttaattcaagttaaattattaaatgttaaagaggttattttcaaagttaccttaaataagtaatacagcatgaaagaaaacccgacctactacgcctcacaggctgagtggagtgttttgcagtctcaaagccttatcgctggcgtgcgcataccgcagggagtgacatcagatcgaaactacagggtttcgccggggaccaaccactcctccaaagacagcagctcccggccagcaggaggtggcaccccaagccccgacccgctgagagccggcttccagcccccgaaccctcactggagccgagtttctccgcgagggacctgttgcgtgtccccgccctcagcgagccgcagccaggcacaggcgccggcagctatgcacctgcccagtacggcggccgggcgcccgcagccccctccccggccgcccccagtgcggcccgcgccgcccccgcccgaggggctccccgcggcccgcggcccgcggcccgcggccccgcgccagccctgcccaccccgccgccccggggcccagacagccgccagcgagggagggcgggacgcgggccagatgccggtgggcgggcggcgacggtcggcccggtctggccctggcggccgcggaggcgctcaccttggcggccgcagctctggcggacatcttgtctctctccagcgccgcgcgaggctcctcggacccgaaactccgcggcgctggcccgcccgctcctcacgccacagcccaaataaacatctcccgagagcgagcggggcacgggcgggggcggccggaagggcccggcccagggggagggaattcaactcggacaaaagtccgggaagcgcccgccccgcccgggtcttctccacggggcgcgcccgaccggcacctccctccgagcgcggccacccactcggcctcccgcagctttcgcagcccggccacgtcggcctcgcccggtcgcccgcccgtcagcagcacccgtggcctcccggcgtctcctcggaagccggcttcgccacgtaacttcccgggaaccggcggccgccaaggaacgcggcgtccgctggctcagccggcgccggcaactcagcggccacgcaaacctgccggcccggcccactgagcatgcccggcccggcgggggcggggctggacgaggcgaggcgaggcgaggcggggagggggcggggccgcggcgggggagggggcgggacgagcggccggggtcccgaccccaagcgcggaaggaaaagccgggtaacccaagtaacttggaagacagtttccgctgccgtgcgagtcttcctgtttgtttttatccaaggtctggcagaattcgcccccaaggagaaagcgcctgtgcaccaaagctttccttaagagacttgtccacttgctcctcgacaagccacgcacatcatggggtgagccccatgcatgagtgcggctggaaaggccggcagagccgatacccgacagttgtttccttcactgggcaaacagcatggtcacggctgtcaccgcgtgcctcggcgttgttcccacggaaggcggaatgcattttctgcaaggcgcgtcatggctttcatctccgaggagctccggcagggtcagaagcgttgctctcgttcaccggcgccgactgccaaggctgaaactggtgatgaggtcatgggcacccggaggcagcagcctgagaaacaccctagagacctgtgacatctcggcccacaccccacattagacctcaagatatatccaaagtctctttcccgcccatctagacaggaatcttgaaaagtttatttttggccatcaagattgctgaaattcttgttgaccgaacgggtcaagctgccctgcattccaatgctgtccctccaactcaaagttgggcagaaaagggtgtaaacacgtgcagtccatggtccagtttaatcagccactacacaaacttcccacaatgttgacggctttgctaaacaccaaggaacatggtaagaaaccaatcctagactcactaatctacacttgtaaatgtaaaggtcttcaaaaaatgccagaaatccttagtaacatcaatgataacatctttaaagtatctggtatagtgccacaaccggcacagaagaaatggaagaaatcataaacatcaggctttagacaatggttttctct

SEQ ID NO: 1242476 - DNA, 4001 bp, Homo sapiens
ttcaggagaagtactcctcctaccttactgtggcaatccattgaaaacgtatttctctccatacttgaaataacctcttaaaaagtgtgttgtcttgcatattaagtaccagagatcacacttcaggaacaaagtgacattctgtgtaatacggaaacaaagcctttcctcctaggaaagaaagccccagaaaagacaaataatgggagcttattttaaaaccaaagcaaaatgttgccttttatcctaaatctctggatcaagttttacctttagattgttcttcctcaatgtaaggtcaaaaggtgcaagttaaatttttcttaaacgaagaatactatatcccttaaaacaatctattcattaataagtgtaaccgctagcttctcccagccagcaaacaagcttctgtgagagttcaaaagtttcagaggcatagtattcctgctcccagatgttacgggtaagcatttcaaacaaaaatacacacagaaaaccactacctgcccaagtatctcgatactatttgaagtaatgaattgatattctttaaaggggagattttttactcctcacatttctgtattcctttgtttgaaataacaagtactattttatgatgaaaaaattaatatacaaaatgggaggagcatcctagctgtttttcaggaactttggctttttaatgtaatacacaagttagtttcaaagcaatgggaaaatgcaataatatttcagagcacataggaaaagtaacaggaaaaacgttacttttttcggctgaactcaccggcctttactaatttttaagtgctcatcttattgtccattcgtaggaatactttgtattacttgtgaaagtttaattcaagttaaattattaaatgttaaagaggttattttcaaagttaccttaaataagtaatacagcatgaaagaaaacccgacctactacgcctcacaggctgagtggagtgttttgcagtctcaaagccttatcgctggcgtgcgcataccgcagggagtgacatcagatcgaaactacagggtttcgccggggaccaaccactcctccaaagacagcagctcccggccagcaggaggtggcaccccaagccccgacccgctgagagccggcttccagcccccgaaccctcactggagccgagtttctccgcgagggacctgttgcgtgtccccgccctcagcgagccgcagccaggcacaggcgccggcagctatgcacctgcccagtacggcggccgggcgcccgcagccccctccccggccgcccccagtgcggcccgcgccgcccccgcccgaggggctccccgcggcccgcggcccgcggcccgcggccccgcgccagccctgcccaccccgccgccccggggcccagacagccgccagcgagggagggcgggacgcgggccagatgccggtgggcgggcggcgacggtcggcccggtctggccctggcggccgcggaggcgctcaccttggcggccgcagctctggcggacatcttgtctctctccagcgccgcgcgaggctcctcggacccgaaactccgcggcgctggcccgcccgctcctcacgccacagcccaaataaacatctcccgagagcgagcggggcacgggcgggggcggccggaagggcccggcccagggggagggaattcaactcggacaaaagtccgggaagcgcccgccccgcccgggtcttctccacggggcgcgcccgaccggcacctccctccgagcgcggccacccactcggcctcccgcagctttcgcagcccggccacgtcggcctcgcccggtcgcccgcccgtcagcagcacccgtggcctcccggcgtctcctcggaagccggcttcgccacgtaacttcccgggaaccggcggccgccaaggaacgcggcgtccgctggctcagccggcgccggcaactcagcggccacgcaaacctgccggcccggcccactgagcatgcccggcccggcgggggcggggctggacgaggcgaggcgaggcgaggcggggagggggcggggccgcggcgggggagggggcgggacgagcggccggggtcccgaccccaagcgcggaaggaaaagccgggtaacccaagtaacttggaagacagtttccgctgccgtgcgagtcttcctgtttgtttttatccaaggtctggcagaattcgcccccaaggagaaagcgcctgtgcaccaaagctttccttaagagacttgtccacttgctcctcgacaagccacgcacatcatggggtgagccccatgcatgagtgcggctggaaaggccggcagagccgatacccgacagttgtttccttcactgggcaaacagcatggtcacggctgtcaccgcgtgcctcggcgttgttcccacggaaggcggaatgcattttctgcaaggcgcgtcatggctttcatctccgaggagctccggcagggtcagaagcgttgctctcgttcaccggcgccgactgccaaggctgaaactggtgatgaggtcatgggcacccggaggcagcagcctgagaaacaccctagagacctgtgacatctcggcccacaccccacattagacctcaagatatatccaaagtctctttcccgcccatctagacaggaatcttgaaaagtttatttttggccatcaagattgctgaaattcttgttgaccgaacgggtcaagctgccctgcattccaatgctgtccctccaactcaaagttgggcagaaaagggtgtaaacacgtgcagtccatggtccagtttaatcagccactacacaaacttcccacaatgttgacggctttgctaaacaccaaggaacatggtaagaaaccaatcctagactcactaatctacacttgtaaatgtaaaggtcttcaaaaaatgccagaaatccttagtaacatcaatgataacatctttaaagtatctggtatagtgccacaaccggcacagaagaaatggaagaaatcataaacatcaggctttagacaatggttttctctttagaattcaactgtatgaaaagaacaaatttaacaaagaagtatgtgtaggtgatacataagtatcaattaaggcttcgaagtgccacacatcttgcaacccaaagctgtctgaaccagaaaagagccttctgcaaaccaaacccttattcctttttgttcttcataaaaatggttgaagtcatttttgttttaaagtcatgttgtaattgttttgcttttggacaaagtattatttattcttttaagaattgtgggccaggcgtggtggctcacgcctgtaatcccagcactttgggaggccgaggcgagcggatcacgaggtcaggagtttgagaccagcctggccaatatggtgaaactccgtctttattaaaaatacaaaaattagcctggtgtggcgcgtgcctgtagtcccagctactcgggaggctgaggcagaagaatcacttgaacccaggaggcggaggttgcagtgagtccagatcgtgccactgtactccagcctgggcaaccagcaagactctgtctcaaaaaaaaaaaaaaaaaaaaaaaaaaaaaaaaaaaatggtggccaggcgtagttgctcacgtttataatcccagcacttggggccgtgcgcagtggctcaagcctgtaatcccagcacttgagaggccaaggcaggcagatcacttgaggtcaggagttcgaaaccagcctggccgacatggtgaaaccccatctctactaaaaataggaaagtagccgggcatggtgacagacgccagtaatgccagctattcaggaggctgaggcaggagaatcgcttgaacccgagaggcggaggttgcaatgagctgagatcatgccattgcactccagcctgggcaacaagagcgaaactccgtctcaaatcatcatcatcatcatcatcatcatcatcatcatcccagcactttgggaggccaagac

SEQ ID NO: 1242477 - DNA, 4001 bp, Homo sapiens
aacccgctcgccgcgacctagaccctcattcggggaccccacgggcggcgctgggagccgggctgctgcgggcagtaaagggttaaggcggcgcgctcggaaaggggaaacaaaaggcggaggcccgggctgccccgccgcccctaggtcgggagccccctccgtccccgcgggggatggcaggagccgcgcaggggacccacccctccccgccagccccggggcggcccccaccggccttacctgtgatactgagcttgcaggaactggaattcgtctttgatcctgtcacaagactcagccaccgtgaatttaaatcccggctgcccgggttgatggggagcctggagcccgcgaagacaagacaggggagggggcgggggcatgagaccgcgctcagagcggccccggcccctccccaacggcgcccaaccaaaagaggccaccctcagcccagaaccttcccagcaagtttctcagctctccgacggggcggagggggggcgccccatctctccccgtcggcagcggggctcccatgcctttcaccaagggcctccctctccccagtaaggcgggggcgggagacaagccgggtgagttgggagacttcagagcggggccggggaccgcgtgaacagctccccctggaacacaagcagccccccgcgccactcgcgcggaattaacctcctctctcaacggcgccccccggccgcatccccctttgtgtgagagcacacacacaaacacacacaccataaaggtagcaacaagcaaaatggaggtgccagataaactgcctcgtttaccctgccatgatagatgcttaaataaaccgagttgcaattactcaccggatgtctgccctgcggatacatggcagggaggggtcgtgattccgagagcgtggaagcgccgagagcccgggccggggaggtgcgggggaggggggagccgagcccgagcggggggcggccgggaaaccgagagctcgcccccggcccccccagctcgttctcgcagcgaaatcccagagtcgggcgcccgccccaagtggagacaaagagccgcggagcaggcggcaaagtcgtcggcgggcgccggggccgggcggcgggcgcgggctttgtgcgcctagggctcggcgggcagcggccggccgccttccctgggctgcgtcgagcgcgtcaatgcctgggactgcgcggacatcgtcggctccccagcaggtccggcgcggggtcccgaggccgggggcccctcctggggcgagctcgggccccctccgggtcactcagcgggtcgcgcctgtaggggggcgcgccggggcagccccaagcatccggggcgcgcgggtccgatcctagaggcgtccgggcctggggctcgcggcgagaagaggaaggaggcgggctacgaggtggtggcttggggccgcaggagcgccggagggtgagggcgggagcccggcgcgggcgcttcgacgccccccctcggagaggagagcctgctgttccgtctgctactgccgctgccgccgccgccgccgccgctgcaagcccttcccagggccggggaggaactccgggctcagtaggtgcaaatcaaacgccctggcatcctaagtccagcgggcacgggaagcctccgcaaagggttctcgctgctcccagcttgagcaccgcgtccccaccgaggagcgctcagcgccaccgccgctgccgcgtcggagcgcacaggcaggagagcgctggaggggagacgcagcccgagaccggggagctctacggcttccttccttcccctcggcccggctctcctctccgcgccccggcaaacccccaaaacacacacacccaacacacacacacgcgcgcacgcacacacacacacaccaaaaaaaaaagtgccccggacctacggataccacacacagacaggcgaaggggacgagcacgaggtctgaactgccgcgagagcagttccaaatagggactgaaaagtaacaaaataatgtggcagcttcgtccggcgctggccaatgggagcgcggggcccccacgtggggctgcgggactcggcctacgactgggtgccgctgggcgcgacgtcacaatgccctcttgtgtctaaaactatgcatgaaaagtagcaatcaggccctacccgctggtgactttcgcatgggagtgaaaaacagcgctcctcagatcaggaattaaccgaaagacatataataaatagatatatattatagtcctgggctgctcgagtttttttcctccttttttttcccacggtctactagcaaataattatttagcgggaggaggaaagagggaagacagaggaataacaacaaaagaaaataagacaagctgtacaatcttcaaaacctgtggctggtagtaatgtatcagtttattctgcagcggcggcgaacgattcctccctctaatctcattaggtctgcaaagcagcccaattagatactataaaacaaacaatcactttgtcactttaatgttttcacttcaaaagatttaggactgataaaacggtggctcctaaagttgcctccgacctttaaaaatttgctcggaactcaggatgtccccttttcttcaccccttcttctgcccgcctcccccacattagcccccagctctcctttgttcactcgcccttcttttcagaaagccaaataaacagctcctttgatgtgcggcggctgcctgcgaggagaagtctgagggactctggctaggcgggcagcgcagatggaagggcccggctgcccgtggacaacaggctcagccacggctggccccattcggggcgccttccccgtgggcacaacttcaccctcgacgcagcctcgccgcgcgggctcctcactgcatccccaggctgagggggttggggatggggtcgggaccctgctcggccgaggcccgggaactccgagttcccacctggtttgctcagcctgctcccggcagtgccacggcgttggcggaagcctgtaggtgtctcggtcgctagcctggacactccgagggacgcggacgctcccccgctcgctcgccccggccccgggccccccggaccccccgcttggtcgcacaggccactcgactccggggccagcttgcccgcaaaccgatggcctcgccctcccgcgctcggggttacggcggggcagacgagcaagcagggagtggacctcaaagcgcgcaccgcccggtggacggccaaggcgggacccccggggccctccccggcaagtccgcgagcccgcgcgcgagccggccgcgcgtccccggatctatattttcccctcattaggagccggaggttcgcttttgcatcttaatgaggagctgagagctagcgggcgctcggaggccggagcgcggggagttacacgtgagcacccgcctcagaactgaacctccccgcgcccgctccggccgccagccccgaaccgcgctcccctcttcatttatttattctcctaaataaaaacataaatcgtgtttcggcgcgcaccgaagacgggggagggagaagcccggctcgacagatgcgagcatctggccgcagcattcattagaaacaaaatggctcctctttggcgcttcctttccccctcccccttctctgccctcccccttacgtcacgggtgggcgcacccgcttcttactcgccccgcccatttctcgctccagccccacgtgggggacgccgaccacgcctccgagcaaggtgcgagtcaccaatcacggaccgccgaaggggctcttcgttgctgattggcggagctgctgggccctgtcagtccgcggccagagctgtcagtcaaaaccacgcggggtgggggagcgctgacaaatgccgaggcttctgagcctcccgcttgcaaatagtgcttggaatggctgcttaattagctttgaatggcttttccttccagctcaaacaatctgtcactacc

SEQ ID NO: 1242478 - DNA, 4001 bp, Homo sapiens
agcgttcctctcatctcaacagaacgttatattatgtggtagtaaggggagctgggccttccctcccacaagcaccacatgtgccctatatcctgtttatacaaggttcaggttcaacagggaatcgtgtgtacactgggaccctcttgtcctctgagagttatttagcactgtgtcgaaggcctcttatgtggaaagcagtgcagggagccgtgccctctcacaaatgaagattaaaacttgctgggcaaaaggaagacagtctgcctactgccccagcgtggagaagatacccagctgggggatccctgaggaggggagtggaggcagagagagctttacaaggcctctccactcctcacaacaccctggggaaggagggcttctgtcctactctggctagatcccagctgcaaagcagaaaagtttccaaacactcccaggaggtcactaagagagatttttaccaaccctaatttcacatgggctggtccaatcctatcttactagccaagatagggcaatggcaatcagcccctgggaaactttcaaaacacaaattaaaggcacataaagatagtacagaagtctccggcctggaatcggggtttctctttctgcccctcccctcactcaccctcctccaagtggccccggcaatggaagctggggaaggggagggcaagaccagattatgccctctctcagggccgccctgcggctgggcggtggtggggacctggcgctcatctccccagatccacgccgcgcccccggccggggtcggcgccccaaccgccccccaggcccgcggccgcatctcaccatcacataatggcgctgcatctccgtcttctcgtttgccagcttgtcgtactccactttgaggctgcgagggcaggaggagccggctcaggcgtggcgcctggacagcctcctctgaggccccgacccaagggcctctagagccacttttccactttcctgacacccccccgggggcgcccccattatcccacagcctggggacgcggggggatttgggtccccgccgtggggagggggatgtgaaacaattcgaaacttcccgcgagccaaaggacttatcacggcagcaggggagtaggaccctgacgctggctcccgacacccagaacccggagtgaacccgctcgccgcgacctagaccctcattcggggaccccacgggcggcgctgggagccgggctgctgcgggcagtaaagggttaaggcggcgcgctcggaaaggggaaacaaaaggcggaggcccgggctgccccgccgcccctaggtcgggagccccctccgtccccgcgggggatggcaggagccgcgcaggggacccacccctccccgccagccccggggcggcccccaccggccttacctgtgatactgagcttgcaggaactggaattcgtctttgatcctgtcacaagactcagccaccgtgaatttaaatcccggctgcccgggttgatggggagcctggagcccgcgaagacaagacaggggagggggcgggggcatgagaccgcgctcagagcggccccggcccctccccaacggcgcccaaccaaaagaggccaccctcagcccagaaccttcccagcaagtttctcagctctccgacggggcggagggggggcgccccatctctccccgtcggcagcggggctcccatgcctttcaccaagggcctccctctccccagtaaggcgggggcgggagacaagccgggtgagttgggagacttcagagcggggccggggaccgcgtgaacagctccccctggaacacaagcagccccccgcgccactcgcgcggaattaacctcctctctcaacggcgccccccggccgcatccccctttgtgtgagagcacacacacaaacacacacaccataaaggtagcaacaagcaaaatggaggtgccagataaactgcctcgtttaccctgccatgatagatgcttaaataaaccgagttgcaattactcaccggatgtctgccctgcggatacatggcagggaggggtcgtgattccgagagcgtggaagcgccgagagcccgggccggggaggtgcgggggaggggggagccgagcccgagcggggggcggccgggaaaccgagagctcgcccccggcccccccagctcgttctcgcagcgaaatcccagagtcgggcgcccgccccaagtggagacaaagagccgcggagcaggcggcaaagtcgtcggcgggcgccggggccgggcggcgggcgcgggctttgtgcgcctagggctcggcgggcagcggccggccgccttccctgggctgcgtcgagcgcgtcaatgcctgggactgcgcggacatcgtcggctccccagcaggtccggcgcggggtcccgaggccgggggcccctcctggggcgagctcgggccccctccgggtcactcagcgggtcgcgcctgtaggggggcgcgccggggcagccccaagcatccggggcgcgcgggtccgatcctagaggcgtccgggcctggggctcgcggcgagaagaggaaggaggcgggctacgaggtggtggcttggggccgcaggagcgccggagggtgagggcgggagcccggcgcgggcgcttcgacgccccccctcggagaggagagcctgctgttccgtctgctactgccgctgccgccgccgccgccgccgctgcaagcccttcccagggccggggaggaactccgggctcagtaggtgcaaatcaaacgccctggcatcctaagtccagcgggcacgggaagcctccgcaaagggttctcgctgctcccagcttgagcaccgcgtccccaccgaggagcgctcagcgccaccgccgctgccgcgtcggagcgcacaggcaggagagcgctggaggggagacgcagcccgagaccggggagctctacggcttccttccttcccctcggcccggctctcctctccgcgccccggcaaacccccaaaacacacacacccaacacacacacacgcgcgcacgcacacacacacacaccaaaaaaaaaagtgccccggacctacggataccacacacagacaggcgaaggggacgagcacgaggtctgaactgccgcgagagcagttccaaatagggactgaaaagtaacaaaataatgtggcagcttcgtccggcgctggccaatgggagcgcggggcccccacgtggggctgcgggactcggcctacgactgggtgccgctgggcgcgacgtcacaatgccctcttgtgtctaaaactatgcatgaaaagtagcaatcaggccctacccgctggtgactttcgcatgggagtgaaaaacagcgctcctcagatcaggaattaaccgaaagacatataataaatagatatatattatagtcctgggctgctcgagtttttttcctccttttttttcccacggtctactagcaaataattatttagcgggaggaggaaagagggaagacagaggaataacaacaaaagaaaataagacaagctgtacaatcttcaaaacctgtggctggtagtaatgtatcagtttattctgcagcggcggcgaacgattcctccctctaatctcattaggtctgcaaagcagcccaattagatactataaaacaaacaatcactttgtcactttaatgttttcacttcaaaagatttaggactgataaaacggtggctcctaaagttgcctccgacctttaaaaatttgctcggaactcaggatgtccccttttcttcaccccttcttctgcccgcctcccccacattagcccccagctctcctttgttcactcgcccttcttttcagaaagccaaataaacagctcctttgatgtgcggcggctgcctgcgaggagaagtctgagggactctggctaggcgggcagcgcagatggaagggcccggctgcccgtggacaacaggctcagccacggctggccccat

SEQ ID NO: 1242479 - DNA, 4001 bp, Homo sapiens
gtgccaaagcaccattcattcacagacatgcggaacaccacccatgcagacctcaacatgcaacgagacattacaccttaattaccaagctcttccaataactgctgctataaattttaaacctgggtgcaattaccctctttaaacacacccaagatactatttgagaaaaaaaaaattaagacagggcagacaaagggaggaagtggcaccctgcatacaccccaaggtccttgaaacacctgggcccccagttccatttcaagcattcttccgggacctggccccttccagttgcagaacctgtctctattctatttttccaaggagaaatatctttacgtataaagccctgtctattatttctgtgtgtcaagaagtaaaaacatggtagccttcatgtgccttcctaagggactaactaatccctcaggaagccacaagctggcttcccacacattgctcaataaactcaggcccctttctggcttcccttcacccaacactgggggctccctccaggaggggaaaggaaactacagatcccaaaggctctataggaagccacccgagtgggtaggaatctgcccactttccagggtcacctgcccttctcacctgccctgggtcctgcctccttaaagagcaaaattgaaaccttgtaaacgactgttaatttagagcagaaaatccattcaagtcacggtcaccaaaggctagaatgagtcaacagccttctgagatttcatgaacaccaattgttaaaaagaacaaccggcctgcctgctccatttatacgtgccaagtcaactctaaacgttggccaagccaaattataggcagcctttcctcagaacacaaatacacaaacaggcctctcccacagcccagcctagcactgggactagttactgatatgcactgagataaagggtgtttgtatttgctcggtttgaggtatactgttattagaagagtgacaataccaggtagtttacatatccatcaaacgacaccacactagctaaactggtttgacttcaggatttcaaagctgagctcaacccccagccatctcgaaagtcctggctaggctgcccctgggcaagttacttcacccaggagcttcagcttccttctctgtaaaatgggaactcggctgccttcaaatcaagacagggatgagaaagccaccttgtcaatgcaaggcactgaagttgtatttcattctggcttcatatttttaagcagttagtggcttcgttcccttaaatttcgacagctcagcctggcttttaaggttcttgaagtttaatcttatcaaggcagaacatcacatttctgcaaaaagaaaaaaaaaaggagaaagaaaaaaaaaatcctcctgcatttcctcttgagaattttacattaaaacagataaaagcagccagccacctctgggctttcaggagtttgtaaagcagatcctggaggtacaactttccctttggtcctttatcctccaccgagatccaagaccaggactaatttcacaagctcaaatgctaaaagctcaacatgtctaaaaaaaaatcagcaaagcctcagaccttgcatttcaaggactggatccattcactcttcaaggagaagggggaggaatcgaagaagcaggctcactttcaaacaagagagaacataagaagtccacatatataagtttttaaaaaatgaaatatatttttaaaagagaaaagcacttacctgcttgtgcatttcaatgttcaagccataggacatctcatagtactaaaagtaaaaagaatggctattaacagacaacacagaaatctggtcatttttcaaaatcagttttttcttggaaaggttttggccaaatcatacttttacgatacatttgctaaagaagtttaaatcaaaccccaaagccagcttacagagcggtttaagagctgacaagggcgagcgttcctctcatctcaacagaacgttatattatgtggtagtaaggggagctgggccttccctcccacaagcaccacatgtgccctatatcctgtttatacaaggttcaggttcaacagggaatcgtgtgtacactgggaccctcttgtcctctgagagttatttagcactgtgtcgaaggcctcttatgtggaaagcagtgcagggagccgtgccctctcacaaatgaagattaaaacttgctgggcaaaaggaagacagtctgcctactgccccagcgtggagaagatacccagctgggggatccctgaggaggggagtggaggcagagagagctttacaaggcctctccactcctcacaacaccctggggaaggagggcttctgtcctactctggctagatcccagctgcaaagcagaaaagtttccaaacactcccaggaggtcactaagagagatttttaccaaccctaatttcacatgggctggtccaatcctatcttactagccaagatagggcaatggcaatcagcccctgggaaactttcaaaacacaaattaaaggcacataaagatagtacagaagtctccggcctggaatcggggtttctctttctgcccctcccctcactcaccctcctccaagtggccccggcaatggaagctggggaaggggagggcaagaccagattatgccctctctcagggccgccctgcggctgggcggtggtggggacctggcgctcatctccccagatccacgccgcgcccccggccggggtcggcgccccaaccgccccccaggcccgcggccgcatctcaccatcacataatggcgctgcatctccgtcttctcgtttgccagcttgtcgtactccactttgaggctgcgagggcaggaggagccggctcaggcgtggcgcctggacagcctcctctgaggccccgacccaagggcctctagagccacttttccactttcctgacacccccccgggggcgcccccattatcccacagcctggggacgcggggggatttgggtccccgccgtggggagggggatgtgaaacaattcgaaacttcccgcgagccaaaggacttatcacggcagcaggggagtaggaccctgacgctggctcccgacacccagaacccggagtgaacccgctcgccgcgacctagaccctcattcggggaccccacgggcggcgctgggagccgggctgctgcgggcagtaaagggttaaggcggcgcgctcggaaaggggaaacaaaaggcggaggcccgggctgccccgccgcccctaggtcgggagccccctccgtccccgcgggggatggcaggagccgcgcaggggacccacccctccccgccagccccggggcggcccccaccggccttacctgtgatactgagcttgcaggaactggaattcgtctttgatcctgtcacaagactcagccaccgtgaatttaaatcccggctgcccgggttgatggggagcctggagcccgcgaagacaagacaggggagggggcgggggcatgagaccgcgctcagagcggccccggcccctccccaacggcgcccaaccaaaagaggccaccctcagcccagaaccttcccagcaagtttctcagctctccgacggggcggagggggggcgccccatctctccccgtcggcagcggggctcccatgcctttcaccaagggcctccctctccccagtaaggcgggggcgggagacaagccgggtgagttgggagacttcagagcggggccggggaccgcgtgaacagctccccctggaacacaagcagccccccgcgccactcgcgcggaattaacctcctctctcaacggcgccccccggccgcatccccctttgtgtgagagcacacacacaaacacacacaccataaaggtagcaacaagcaaaatggaggtgccagataaactgcctcgtttaccctgccatgatagatgcttaaataaaccgagttgcaattactcaccggatgtctgcc

SEQ ID NO: 1242480 - DNA, 4001 bp, Homo sapiens
ccacccccaccaaaaaaaaaatccgacagaaaaacaacagaaaaagggaacagaaaagtaaaggcaccagaaatgactggacaaccaaatagtaaagttagggatgtagcaaaccttatttctgagtaatctagaaacactactaatagcataaataatgttttaatagccagggggcgcagttgctcacgcctgtaatcctagcactttgagaggtgggtggatcagttgggcacaggagtatgagaccagcctgggcaacatagcaagaccttgtatctacaaaaaatacaaaaattagccgggtgtggtggcgtgtgcacctgtagtcccatctattcaggaggctgaggcgagaggatcacttgagcctggaaggttgaggctgcagtgaagtgtgatggggccactgcactccagcctccagtgacagagcgagaccctgtctcaaaaaataataatcgtccaggcgtggtggctcacgtctgtaatcccagcactttaggaggccgaggcaggcagatcaccagaggtcaggagttcaagaccatcctggccaacatggtgaaaccccgtctctactaaaaatacaaaaaattagctgggtatggtggtgtgcacctgtaatcccagctacttgggaggctgaggcaggagaatcgcttaaactcggaaggtggaggttgcagtgagccaagatcacatcgttgccctccagcctgggcaacaagagtgagattccatctcaaaaaaaaaaaaaaaaaaatcgtcatcatcatcatcacgttttagaccaaaaacaattttatgagaagcagatcttttcaagaagatatttttgtatttataattacccttgtgatgtttgatttttattcttcctttttttttttttttttttttttttgagtcagggtctcgcttcatcgcccaggctggagtgcagtggctggatcatggcttgctgcagccataaactcctgggttgaaactactttcctgccctgagactacaggcacataccacgacactcagctaatttttcagactttactagagacagggtttcaacctgttgcctaggctggtctctaactcctgggttcaagcgatcttcccgccttggcctcccaaagtgcttggattacaggtgtgagccaccatgcttggcctattctttccatttttaagataagtttcatccgactttcacctaaagacttactgatttggaagggatccaatttctcaactgcctgtcaaatactaaataaaagaaagacaaattgagagaagacaaagggaaggggaaaataaaatggtacaagtggcttttgtttaaactcagattaacggggatgagtgatttagccaaacttcaaacaaaacatatatcacaaatgtctttttttttaaggtttgagataaaatttataaagtccctgtcaaaaaacttgaaatataagacctgccctgggttccaatggcagtggaaagcgttcatgcatgggaaacagggtttaggacacataccgccaatactgttagggcagcttcatttgcactttcttgggacaatgagatgatacatgagaatgtgatctgtaaaccgcagagcataatcctcatgcatgggagggtcaagttgctgggcacagtgacaatgatgactcagcagtgggcatggtcactgtaatcacaagtctcacagaggaagcaggtagtgtctgatctaagaaggtatttcatttgaaacatatgcactaataggcttgtgtaccacttggagcctctgtctctttagcaaaaaagtgaaaaacatgcaaacacgttttaagaagccagtaaataacccatgacctaccttgcccagtttgtgcctcaggcacccgttcccgaatgactcgacacgcatcgtacacagctgtagatggttcaaactgcatggtcttcaccacgttgcagtggcgcacacaaatctttaaggacagggccaccattttcctagatgatgtggacagtctcacttagaatgtctggaaaacacaaagagacaaaccctgatgttcacgataataatttgtcttggggaaaaaaaaacaaaaaaagtgctggactttaaaatcaactttaaacatggaaagagaataaaacagcaaataaagagtacactttaggtacaaaacaaattttacaaatcaattttgaaaaatttaaaggaggacaacaacagcatattggctaagagttattactacagggtgacaagtagaaccccttaggaggagggagctccagatgttcaccacacctccctctgagtagtccccctccttggggtttctgagagaaggtcctaggagtggaatttctagggttaatgtcctcaaggcaagaggcagagagccttgggcacctatgactgggtcctaaagacagcctcagttccctgggtcctctcagcacctggggacagagaagaatcagggaagccctctcaggtgctcctcttggcacaaaagctccaccacccttggattctgggcccagctccatcactaagagcctgtgtcaatctgagaaagtcactttggccactctgcctcaatttcttcacaaataaagtggctataatgatatcagccctgcacagtgcataaaatagaatcccaagaaaagatcaacatgaggccagagaggccaatcttaaacccaaagggtaccaagaagcttcacgtgattggggtctcaaagggaataaaatgcaactcaattctgatttgatttagacaaactatggagatattttgtttcttctccagttcaatagtttcagaaaatacacaggtggctgggtgcagtggctcatgcctgtaatcccagcactttgggaggctgaggggggcggatcacttgaactcaggagttcgagacagcctgtccaacatggtgaaacacggtctctattaaaaatatgaaaattagcctggcatggtggcatacacctgtaatcccagctactcgggaggctgagacaggagaatcgcttgaacccgggagacagaggttgcagtgagctgagatcatgccactgcactccagcctgggcaacagagcaagactctgtctcaaaaaaaaaaagaaagaaaagaaaagagatgagacgagatgagacgagacacaggtttaggttaagtttgaacttgctcataaatgctttcttttaaaaatgtaagttcaacaactcagtgtttttcctttgagttggtggctcacggtgtatttccagtgcctgctctatttcatggccagaaacttacctgtcccctactcacttaacccaagccagtctctatcaaatatactccttgggcacaagacagaaagaaacctgtatcacaaacgcttttttctttgtgcctgaagaaccagctgagtgtcatcctagcaagcaaaacaaggccctttatagttagtagctaatagaatcttagagcagcccaggtaacatcaatccacaggtatttcaagctcactctctttcttgtgttttatgagagaacctgcaggtagtaaacctggactccagcttcttcccacggaagaagggaggtgctaggaggcaacaagatggccacaaggcagaggggacaacaggctgcccaggcccaggcagtgcagcgagtgcctccagggtctcagcttctcagcatgcttgattgctggcgtcctaacgacaggtggctgggtcacatggatacaggagatgtttttcaacagatgctttggtgaatgcgggcatggtttacacggtctcacaaagcaacctttcaggccgtccaactgcaatgtcattctgacccctgcttgcattctgaatgaattttgccatgaaaattgtgaaactattccttagttgagaaaggtcaggatacacttctcaataaacaacagcagtgttcactgggaatctgcctgaaactgaattaagtaactaagg

SEQ ID NO: 1242481 - DNA, 4001 bp, Homo sapiens
ccacgtggccgtgaaaactaaaggtgctcatatacaaataatgtatagaaaattctgggtatacattaagggcttaaaaaaaagactatcattttgtaagttgaaaaaaaacttacagtagggttttgcaaaatcacagaggaagtctgtggcaaaactggaactagaacccaaatctctccatttccaatcccgtgttcttttcatctgaattcactaattcagaaatgaagccactgacatcctcagggcatcaactttaaaatgtcattatttcacactggtacttcgataagccacatttgctaatataatatttacagttttacgctaccaaagttcaaaacagttctctactttaataacatcttcagtaagctgcaacttatttccaaccaacctaatgagtgtgcaatgtatttttaccaactgaaaggatcaaaattgcaagtattcctgaaaagaagggctttcaaaagcctgcaagagttaagaactcttgtgctttctctaaaaagtaatctgagtttaaaattcaagtgcactgctgttttttacatccaaataagaatcagtaaaatatctctgccagtttcaattcactgaagtaatgtcactttaaagtgatgaaattatagtcagagcctccacctagcaaaacacactaatgcttgtttaaaactggtcctactttactcactgtattaaggaacaattctacaaaatactctttttgatcccgtgactatgtggctggaaggtggacacttagaatcacaaagcagaaatgactttaggtcgtcagaccaaccccaccgctttaaagatgaggaccaaggtccaaagaggataaataatttgttcaagatcccagtagcaaaaccagatctagatttcaagtctccatcagtcccgctgtaatccttccatttccacagtcctgagggagcctttaatattccaacatcaggaacagggttttagcagtagaggaaatttgctgaagggaaagaagcacggactgaaggttattttgatggatgaagtggaaaaataatagaaataaggtgacaaatgagcgtgggattggaaaaagagaggaggcagaaacgtcaaaaggtataaatacgaagactatctactgaaaatggctgtgtatctacccttaattcacataatctaaaatacaataaatattcaaaaatggaaagtgacttcgtatactaaagggaatttttataaaaacaaagagaaactactagagataactacatgtatttactagaatagaaaacgtctagtacctgctgccctgggaactactgtgaatgtgcgtgttgggcccggatcctttattgactgagccagcgcctgcgattgctctaaatttaaggatcgtacaattagagaaacacgttatcccgggacaagaaaaccttattttgtgtggttaacacggcgggtctacaccaggccaataagctgctcatgaaaacctcacggctggtcagccagaaaacacaaagcttagggacgaaacgtcaacagagtagacatcagttcaggtcagccggcaacgagggaccgaaggatgacatcgcgctccagttccgcctccccggcccagcccccaagcgctccatctccgtgccagggctccgcagccgcgatggcgggctcggtgtcgccggagcggaggggcggcctcgggccgggcggccagggcgccagactccagatgcagcgacaagcggcccggagcccggcactcggcctcctccccgcgtcagcgtccgcccgtgggcccggcctcctcgcagctcccggggccctgctgccactcagccccacccggcgctgaacccagcctttgactcaccaccgcccgacagaatgcagaactgcgagaggaagagcagcacgcgacacaaggcgcggaggcccctcagcgggagcacccctcccgccatcttgccagcgcctgcgcacttccgggccggggggcggggcgcgcctgggagccggagcgtgaactggacgcaggcgcgctgcgactcctggcggccggcgtttgcgctttcgctgtcctcgcgcgggtcgcgggttttcttccggttgagccttctgggaggtccccgaggaggatgcgagcctgggaggttgttccatttccacgcgcccctcacgcccttggacgaggccctcacccctggttccactgcaggagacctgttaaaggtcatccgtggaccgaaatgcgcgcccgaagcaaccaagagcagaggcgggcgaacgcgggaggctggccgccccagtgtgtggtcggatgttgtgtgctggatctcgtgcgaaggttccgaggacactatcgcgtggcgtttcatcctaaagacacttatttacagtcggggaagcggccccgggacgacgagggcccgagggacccctcccctggggccggcgctcaggcctgccgcggctttcacttctggccggcctcttgaagatacgcagcacttccagaaagttcctctcaggcctggagaagcaggatggcccgaggcgctgggaagtgaggggagggtccagagcccagccctgcctggggaaggtcgcggccgtctggggagccgcgctcaggccccagcttgcggagacccttgccggtttctgtcacagcacacctgggagaaagcgctggtgacaggtgctctcctcccacccacgtgcttcgggatcgttcattccgcggtcttctgactaccaccccctcacgtgcatgtttgctgaatgactttttaaaaaatacatggaaaagtgccggcacataagccctgaatgttagctttaaaaatcgtatcacggccgggggcggtgaatcacgtctgtaatcccagcactttgggaggcccaggcgggcggatcacgaggttaggaaatcgaaaccatcctggctaacaacacggtgaaaccctgtctctactaaaaatacaaaaaaattagccaggcgtggaggcacgcgcctgtggtcccagctactggggaagctgaggcaggagaatcgcctaaacccgggaagcggaggttgtagtgagccgagatcgcgccactgcactccagcctgggtgacagagcgagactccgtctcaaaaaataaataataaaaatcatatcacacaatctgcaccttatactactacacaagcctgatatatattgttttgtttgccaactgtttcactgttcacatccctcaggaagttaactaaatgatcagtatattgaaaagagattatttcttacatttcttttgaatttcacagcatatcgcaaaataaacaatacttcttgtttggtagctgaattctctattgacataatgccattttaattcagttctgagcacgtagagcattcctctctttaaaatctgaaatccatttcagtacataaatccatggaatgtcatcccatcaaaaaagtaacaactctaggtgagcggcttagtggtggtagaagcccacagctgaaacgctggaaacactgatgcaattcatttgggaatttatttttttctaaagcggaacaaaacctaattatgaataagaaacatttaaatggcaactcttaacctatagtgcaaacaccagattccacaaaactgaattcctttgtcagtaatccaatatttagcagtagctgctgcttttgtggttgttggttagttaaaattaagtaatgattccagtttagaagataaagtttcagtgtgaattttagtagaagtcataaaaatacctgagacatattagaaaataagattttccctcctatttaaaaaaaactctgcagacttttatttgaagcccatcttttgaaaatcactaacatttcataatcatttcctagtgttttgtttcactttctcgatgaataatatttccccatttaagtttctcaaggcattgattgctggaaaatttcccacgtgccctctaaac

SEQ ID NO: 1242482 - DNA, 4001 bp, Homo sapiens
agggagtggagaaagaagagaggaatcaaaggccacgggggttttaacctgcaagaggacaggaagaatggctgacactaattattcaaaatgctgtagtgcttgccagtgcgctccatcatgcacagcaatacatagttcagtctgtattcagtaaatgccatcaccatcttcccagtggctgaggccaaaacctagggctcatcctcaaatcctctgctgccatgcaaccctcttcagtaagccccatctgttcaccttccaaaatacctactacgcccatccaattccttcccctgcactgctccattttcctgcccgacaggctccattcccagatcttcccatagctcaagtgttacctcctcctagaagccttccctggccaccagccccctccccagtcaccctattttattatcttcatagcatgtcactatcgatgtattaatgtttgttgatgtctatctcattacctgcctccacagcctcttctggcttgttcatagctatgtcaccaacacttggaacagtgccaaacacacagtaggcactcagtatatcttcactgaactacccgtaatgccattttttggagcacagggtcccccatgcactatattgacaggcatgtaatattcggtggcccagagcagctgcctccaggggatgcctccagagactgggccagaccaagggtagacactgctggtgcctggtgagcactcagtgtgggtgctgcctgtatcaggcggccaggcagctggagaggaggaagttaccaccctatgtacagacactccacggcctgaccagctgaagggggtttgcagcctacagactgatgcaatttccttagcaccaacagctgagagacatagcaggttacttcctcctccctccagacagcaaccaacatcagcaggaacagaggctggcgcctgtcccaacacccggcgaccctcaggccttcagctgccggctgcaggttagtccgtgatccctgcagtggagtgggaggcagggcttcgaacccaagccctgtccccctccatcagccccacccatttccttcacattgaagtgttctgcctctgctgcctgtccccatcctaccccagcgcaggcactgggaagcacttctccattcacaacgccccttcacaaagaggtctcggtggaaccttacaataggacgcacacaaagtccacttgaccggaaaaccgaggccagaccacaccgtcagtgccaaacaccgtcaggccagacaccgtcagtgccaaagccaggcctagaacccacgtctctgcctgttggttccgggctatttctgctagtcattcacaacagtttctaaaattaataagaaatgataagtatgcgaaagtccatacatggaaacgttcccgtgagatgcaaaaagaacaaggcacaaacgagctgacacggccaggttcgtagtgtccgtgtttgttccgctccccaccggcccctgggcccctccagggcaggggcatggccgtattgacgcctgtgaccccgggcacctggcgcggtgctggcaccaacatcccgaaatgcgccagcctgggcacctcagggcccggctccaagacccggcccgtgcgacccctggggcgcccccctagtctggccaggcgcggggagcccctgcggccacgaacctctgtcccgcggcggacggtcccagccccctcggaaaagttgcgaggctcccgtcgcggcgagccaactcccgccgcccctcggcgcgacccccgccgcgccggctcactcactcatgctgggccgccaggtggttgaagacataggtgaccgggatggccgagagggacagcacgaagaccccggtggccgcagaggcactcatcgcagccgccgcgccgctcgcccttcaccgcatcccgctgggcgccccgccccagcttccggcggcgcccgcgcccccttggcgcttgcccttcgaggcgcctcagccgcgccccccgcgtggcgccctcagcggcgtcccctcagcggtgtctcctccgcgcgccctcccagcccgcagccgtcccccgcgcctggccccgtcgccccaagtgcgcagggccgcggtgcagtcccgggaggcgtccttgcagtgctcctgccaggggcgccacggctcagcggcaagcgcccggcggcgccgaggggcggcgacacccccgcgcagggacaggtgcccctggcggcgcgcgctccgagggagggcccggggcacggccgggaaccggtcatcgaagagctggagaggcgcggggctgagctgcggtccgggaaaggtggaaccagatccgagggtgtcagaggaggaagggcccgcgggatcgtctatgggggagcccacggcccagaagtgggaaaggacaaaatgcccctgaaacctcggaacctctccgctccagtagccatcggcgggctgctgcacggagccggcatccggtttttaaacctggctctccagtcaccagctgttgactttggtcaaattacttaacctctctgtcttttcccttatctgggaaatggggataacacacttcatagtgtgactgtggggttaactgagttcatacctacgaagcgcgttatcctgtgctgctcactacaccacctcctgcgattctttttttttttttttctttaattgaaatggacataaatgctgagactctaagagactagagcgccattcattgctattccaggaagcattcctggaggccaggtgcccaccagccagcctgcattgggccctgcagggtacaaagactggaagataagcctcttcctctgaatgatagatgcctacgggtatggaaaatattgtgtgtcaagtgttgtggctatctgaagggcagtgagttccaggagaacagctcaagcaactgagggaggtaccggcatgtacttactgtctttacaacttccagggaatttaagagaccatttatgtgtttttgctgttgccatttgaggggtttattttatttatttatttatttatttatttattatttttatttttttttttttttgagacagagtctcgctctgtcacccaggctggagtgcagtggtgcaatcttggctcactgcaagctccacctcccggggttcacgccattctgcctcagcctccagagtagctgggactacaggtgcccgccaccgcgccgggctaattttttgtatttttagtagagacggggtttcaccgtggtcttgatctcctgacctcgtgatccgcccgcctcggcctcccaaagtgctgggattacaggcgtgagccaccgcgcccagcctatttttatttttatttttttaagacagggtctcactctgcaaaccaggctagaggcagtggagagatgagggctcactgcagtccccactttcccacgccaagccatcctcccagcttagcctccttagctcctgggactacagtctcgcaccacttctttgtagaggcagggtctcactatgttgcccaagctggtctcaaactcctgggctcaagtgatcctccctcctcggcctcccaaagtgctgggattacaggtgtgagccaccgcacctagcctctaaaagaccatttggctcattttagacatgaggaaaatgagctacgaggaggtatggcctgctccagggccactccacttttcaaatgccagttctcctaatccttcatcctagttcttcttgaaggcttctccagctctgagtgcataacgtttaagccttggcccacactgtgacatatccaaagtttctccaagaggtgtcctcacctgtcacctgcacatcaccctcttccacccctaaccttcaccactctccttaaactcctacttcctccctgacaagagacacttcctcctatacctctgagctcccagccaggctcccaagccagcccatcccttccatcaacacccaaccttgttgc

SEQ ID NO: 1242483 - DNA, 4001 bp, Homo sapiens
agtatcataataatctggcttcctataaagtctttttttttttaattatttttttacccagagggtggtaatatccaagcagctaaaatgagtatctcttttcatattggcttactgctctgtttctagtgagcgagacgagcttggagagaatattaaaatctagtgtttagaaaggaggtagaagataaaagactctccaccaacacacacacccccaacacagacacacaactctttatactctctctttctctgtatctgtctctctgacacacacacacacacacacacacacacacacacacacacacacacacacacacacacagaggaactggcttctggaccagctagacctctcagatatctttgtgactttgctaattcaggtcaagagtgactgagccatctctctcacatgagtctttatcctcgttcccatgggcaaggcaaggtggtttatcggaaagcatgcttgtaatgatcaataatggccattgaggcccttacctcaatgccctcagcttctgtcccatagtccagggtctgcagcgaatgtttgccatgagatctttctggaactgtatattctggaagatttgttccggatcattgctgtcccctgtttcatcagcactaaagctgtcatccaagttgctgaatgatcagggcattaaggaggaaatctgattagaagaattgcttccagcaaagatcatcttgccctgggcacaagttcagcatctcactgccctagggtcatctgtatgaaatgtgtatgtgtttgtgcgtgtgtgtgtgtgtgtgtgtgtgtgtgtaaagtgagggacccacagaaacagataatttgccagtgtcagtagcctgttgaaacacatttattggattcaattacttccactgggtcattagaagataatgatttctcagggtgcatgatattatcagaaaacacaagatgagacaagagggtatttacgtactcttggattcctgagtagcagcaatttgggtaggcaaaataatttctttttcaggctcattgaaataatcagctaattttagaggcaggactccttatgttacttgaaggtaacataaatcaaaacttctgccactcagaaacccctcttcaccctttcacgtcaattcattttaagcctgagataaccgaggcagagccaggcaaagcaatttctacgagcgaaagattagctaagcaaatttacatgggtgagatatttcaggaaatagatactctcaagaggaacaattttccaacatgtagcaacatttactcccagttacacttaatatgcttatcctaatgcaacattttgagaggagttaagagtattcatctatgactattagaaataaaagatttcgtttgttattctctaattcatgttgtttttactcatttagaggagaatttttttcaatttcaccaaattaaatggcagctgtactagacctttataaatatttaacaaattcgaatagcactctcatccacttctaactagcctgaaggcttttccaataaacactttatttatcatgatagacatattatctgctctctcttgacattgctgattgagtgaacatagagaaaacagggaaacatatctgtgggtttggccagccataaagccaggttgggatgcaagcttttggattctgacctcctggtcaagaagcagccagaagaaccatttccccccatgcccgttgctgaggttgccatcctagttgtaccacaacctggagaagtgagtttctgagttcattctgaaggacaactgagcaggacagggactttgtccctcgctctggtgacccatgcattccttcctcacacacctgactcctctgcccagctgatgaatggggccagctcacctgagcagcagagattcctggtagaggtagcactggctggcatttctccggatgcctctatagcgctgggatgccttcgaggttttcatgggagctaacccactgctaacaatcagaagctggccagagagctaggaagttggcaggcaaaggtctgttccgaggtttctgaatggaagcagcggagtttgctctgcccgctagttctcaggaagaagactgtgtgcttgcagctggtgctctgagcagggaagaatccaggaggccagtcatgcatatgtaatgttaaggtggctgaggcacacagattggctggagtctagacagccaagggtttggcccggtgatctacacatcgcttggtgctgtacaaatgatcacatccgttaaccccttatgccctgacagtcctggatggtttgcaaaacactttacatctgtgaccatgactggtgttcacaaaacactgagggagtataaaaggcaaggcttaatttccccagttttttactctcaacgaagaggcttagagacagtaaggaccttgcttgtgttcatacagtggagttgaggagaggcacagccatcacattttattttttcttatttagttttttctcaacttagtttctattttgaaaaaagtcaaatccttagaaatgctgatggaacagtaccaggaatatctgtacactcttaacctagatttaccaattgccacattttgccacaattgctttatttctgtctgtatccttcccccaccacacaccatttgaaagtagattgcagaaataatgatacatcaaccccaagtacttcagcatgatattaataataatcaaattaacatcttattacattttacctttaccatacatggtcacattaatgagcactatgactctgagactgaggctaaaagaaataaagagacttcctatagcatttggtaagaaaggaagactttgatagagattagactctcacctcaatgttctgaaaataggttgcctgctgtaaaatgggatgagtagttcatcctagtccttcagcaaaggtcagcagcttctcctccccttccccagccatcagcagaatggagcccggttcctttgtcacctgcagactctcactgttagccatgcattgggattctgttccaagaacctcattcccaagtccaagacttgcctggtttcacagtgtaaacctctatttgctacttaacacaagaaatggtttgactgcagtgaggtaaattgcacctttgtagtaacagaatgggaaggtgcaggactggagtagacatgactctttctattgaacattacccactgcacactaaagactcaataaatgggtgaataaataactgaagtggacaccagacaacggagcagaaagaaaatccatcagcaagttcagatgtggggcttcggagagaaacttcattcatttgtccattcaatcctccactaattcattagcaaataattggaaagatcttaccacacactgaactggcaaatgtaagcaagagccctagcccaggggttcaggaccatcaggcaagtgttcagacctagcgctgaaagcatgggaacgaagtggaaggctgagtgccagagctggccttgggtcagagatggatccggagcctctgggaccaggtcatctgtctgccaatttgcttgaggccatttggcctgatgctctatctggtaacattagataaaatgtgtgcttatcaaatggacaaatggcttatacaatagaattactgctagccccactgggattttttgcattctttcagagatctttacttatctcaatcattcctgaacatttcaaagatttttttcgtcctactttttctaaagcccccctgccttattttgaaatatttactcaaaaatttaaaatattttatattaatctcactcaagtattttgagtgtttttgtttccttttgatgttacatatacatgtatattgtaaggggaggtaaggaaaggtagcaaattttgcagtacacagggatttattaaaaacaaattagagcaaaatcaatctttttaaaatt

SEQ ID NO: 1242484 - DNA, 4001 bp, Homo sapiens
tttcctgcagtaacttgaccttatttgcataatgtcatgtgtatattgaaatcaaaccacaggtgaaatacagggatatagatgcccatctgcagggcttcccaatgattaaacattgcccaagaagccagacacatccccttccacgcatggacaaattttatcatgacttttgagatggctactgttcatgtataaaaaggagagacaagcttatctgataattgatgaaggatggaatgaggaatgcaacctattaaatggctcttcccaacttcttgcttacaagtctggctgtttcttcctccagctcctgcaaggctctttccctttccatcgtggtgcggttctccttctcccactcttcatcttccaccaggccccgcgtctgaatgatctcactttccagcctggacaacacaagcacatgccatgaggacccatgcttggcagtttcagaactgataaaacacagatttcagatataagggaacttcagggacagtgtacatgaatctcaagctgaaaactcttccttactgaatccataaagcaggaagacctgcctgattcctaagccaaacaccccagtgttctctcaactccatcttttaggaatctatttgaaacttgctatgcttcagtgttcaagagaaatgtcaaagaatgaaaaattaactttttgccacacaaggtagaagtctctagaacaagcaggaaaattcagttttggttttggtcctccaccccttctttggattgggaacttccctcatgaaaccttaatactcacctctgaatcttatcttccctctcttggattttgagaagaagtttctgatttgcttcatctattctctgcgtatccctttcaaggtccatgttcaaactgataatgtttctttttgactgagccaatcttgagatttccattttctccgacctatagactcagcccccaaaatgaacaagggccagttatctcaagatcaataatcatcaggccaaaaagggtatttagaacacatctagtttattaaccttactctctctgggggcataccattttcattcttgaaaaattacatttcttgatcatgctctacaactgtttcgataattcgcagctcagtcagcaagggtctttcccaggctttctcctccaaagtgctcaatctaacagtgcaccttcactctggtttcttgagaagctttgcttccttaaataaccccttgcgctggggagaaatgtttctcttggcaatcttttcttagataaactattcacaaaacctgctcatacaatacacatttattgaacacttttatctaagcacctggcatatcacttctggttgggcctggctttctgcagagccacaaggggtttccaccagcatgatagggcttcaatctttcccttccttctcccacctcaacacctctccctcacttgcctgctacaaagtttgaaatttttaccatgagagtaattccattgagcacacccacataggctctaggcatagctttcaaaaatgcaaatatcttttttgaagtaaatttaaatgaaataatggtaactctagagtattttgggaagggtacatgggaggctcttgatatatttttctttttctactaatgtaaattaattcattggtttgtgtttcagttgattaaccactattagcacagtgaggcacagaggcttttgttttagataggaatgaaggataatattggaaagttaagtcctatcttggaagggcttgcttggatgggggatttacagtaatcacttcaggaaggtatggcatgcttggggtagggtgcggaggtggttgcataacaggagtagaaggggagaaggaggctggaagatgaggcaaggggtcaatagcgaacctgctttacaccttggtctctggatatggctttgcataatcatgactacttaatccagctgatctttcttgtgtccttccattgtagattccctaaaatgccaacagagatgtatctaatgaattggagaaatgggttcatttatgaatacagtaactagggaagagtcccaaaaagtagaaatcaaattaagttaactcattttctccctctaatccccacattttaaccatgacaaaactcagccttttgattcttctgcccgtgttctgattataccctattaaagatacagtcaggatacagagataatgctggaatatacgtcctattaatagatatagtcagagatggtttatcaacataaaaccctgtggaagtttatacaagacaatataaagaaatagagataatcaataagtctctttttgctctaggccagttgctttccataaagccccatgggcatggatgtaggtttacaatatccctgaaaagtaatctttgctctctatctttgcttatgccagaatttccagatattaagatctttagtattaaagagggctcagaaaaccaagtatatgtaaatcatttgtctctcccttccccttagtttctttttttcccctttatttcttctacaaactctacctcccctttttgatgtgtcttgtcttcctgatccttccctagtcaattagcttctgaggagtctaatctttctccactggaactatccaatagaatctcagaacattctgagaggtcatgacataggatgggcggggcaacatgtcatagtggggtgggtggcaatggtttctcatcatttgtgtagagtccagagcctagataagtgtgtggatttcatggccaagtcttccctggatagcagtaggttcaatggatttgatttctgggctgtttgaaggggcaacctctatcttttatttctctggcagataaagctctcttcctgcctcagtgtgactaaaatggaaagtctaggtcttttggccagcagtctaatttcatcatgtagccaactaactactcattcattcaacaaacagtgaaacactgaatgaacacgatgtgtatcttctaggctctgttctaagcactggagggaaagaatgaacaaagcagccaaaagcccttgacctcatgaagtttatattctaagatgtgtgtgtgtgtgtgtgtgtgtgtgtgtgtgtgcgcgcgcgcgcgtgtgtgtaggggggactggtaacacaatcaataaaataaataaaattatttttacttgatatgataaaagaggagactgctgaaattttaccccaaagagttaaagaaaccagtgactaacaaattcttgagcttgcagaatagcagataagaaaataaacaacttgctgaaatgctgaaactccctctatttgagagatttcaaaacaaaaaacctagctgaaattggttggaaccaataaggccaactggagtctgtgcagaacaagcttactgatgtcacagcttgaatttccactgcatgttttatactaatttcccctgaatttgcacatgggacccataaggaggcatgaagagataatcgtgcatgcctgaggactttccagacctccccttttcttctaccagtcatttgctaattccagaatccactccctaaaccttttctaataaaagtactgcctgagagccagcacagagagacagatttgagttggattcctgtgtccttgttagtagacctacagtaaaaagccttttttttctcacaaaccttgtgtcatagtattggcttccagcacattgggcagtgacactcttttgcttggtaacactgccatgaggaaacataaacaggtgaaggaggtaagagtgaggaggttgttgcaagtataattagggtggcgcagaagaagcgactgagcattctcagacccgttaagtggggtgtagatgtggtaagaagcttggtggacaagagaagccctccagttgtgctgagatggacacagagtccagcagatctaggagcatgaagggaaggcatgaaaacccaaagcttttcctgtgatgct

SEQ ID NO: 1242485 - DNA, 4001 bp, Homo sapiens
cacctaaagtgtttagcacggtgtccaacataaatttagcaagggccccaaaagtgccagccaattactggacaatcgtcagactgcaaactaaccccctggggttgcagtggagatgtgggatctgatttgggggccaccctagagcatgcatgctgcacctcctgcttctccgttccaataacagacaggtgttccccctccccccaccagcaagggtcattcttggcttgctgaatgggtcaagtagctattaacaatatattattaatgactgaatgcaaggagaagaaaaatattgatcgaagtattcatggaatttctgagtgtcagcggtggaagagtctttgggaatcatttagttcaaactctccttgtaacataagaaaaataagacccacataaagcaaaatctcacaggtaggcaatggctataaccaagatccatcaaaggacacggtcaatggcctccatctgcttccaaatttaaatggcctctttgtccggacaaaagttactagtcctgctcagcaagctttgcaaaaagcagtgagtatcctgttgctaagtgtgtttaaacccaggctggacacactttgacaagggatttccgccctggcagtgaccagatgacatctgaggtccctgcaaccacagaattatcattctttttgtcattgcacctaggttgcccatgttaacccagtcacaatttgcatgttgtccacaaagacctgaaagtggacaaatcagtgactgagactaccacatagaagttgtctccaagcgcaagcttccttcagtgcctctaaccacagaggaactggtcaaatagcttgcccccattcctgctgcccgtggcccctcatttctgaagtgcctatcagcatgcgtccacaagcagatagctgtctgagtatgatgcccacttggcccccaaccctagacctgctcactaaatatcggggcagactactcactcaagacctgctcctgtcacctgtgggccacgggatctctcaaaggagacaggaatacaggaactgagcttttctaagccatatggcaagagccaagtcttgcagccacaccgctccttgtaaacaccgccaggcctcaatggctgcactgatccctcctttccaaagtgcccattctcacttctgctgccctcacctcactccaactttaaacgctggagaggggaggaataaactaaaactatgagcccacttcctcttgctgccatttttcagtactcgaaggcacaaggtggtctaagagactggggttagagagcctgtgtccagccgatcagaactgccgttggttagtgtctcgggggcctgcggatatctctttggccagctccccaggctgcgggatccgccctggcgtccccatcccgggctcgcacctgcggcgctgactacctcctcgctggccaggctcgtctcgggtgggccctgatgacccaaaccttcctcctcacggggaagtcaactggtctccggggactcccaccccatgcagcctccctgtagcctgtggctaattcgagcgcctccagtcaggggctagccagtgtccaggtgagacctgggagtggagggagaagggagcgctgccgggcgcccggcctcacctggtaatccagggagaacttcacgccctgctccacctcctcgtggaagcactgcttggcgttgtccggcagctcgaaggtgagctcggccccgcagggctgctcggcccggcgcaggagcagcagcagaagcagcacggaggcggagcgcgggacagtgctgcccatgatgctctcggtcccgtctcgagggccgcggctcgggcgctgcgcccccggcgggctggggcgacgactaccgaccgggtcctaggaggatgtaaggggatagacgtggcaccagcggagctctgcgcttccgggagggccggcggctcagtgcgcagccgcgcgctcaaagtgggcccgggcaccttccgcccgctgcgcgtgcgcgctggccgcgctgcgccaggggacacgccccccccacccccccgcaacgcctctcccggctcggagggtgggtctccgcggaggggaggtggggctccacctagcgcgcccctacccagaagagggagaagccctccccgctgttctgcgcgctcccggacccgcagggctgagcatccccccaggtcgacccaggtccaccctccagctgctgcagcacgaagcacgtgggattttactccctctataaggctccgcttttgacaggctctgtaacttcagtctcacacttccctcgagaaccagtctccttgtcttgaaatgggtgtgcccaaacctaacatccacagtagttagggagctaggtgaaagataagggaacgctgggaacccgattaacactcctttcttcattcccatacccttcccaaggtgaaagagtgtgcgaagggggtggggagtggggagagtaagtaaagacccatcattacacctgctctgggaaaaacacgagcgtgctcacacacaaacgatctcatgaaaatccaagtaaagtctcgcagcgacttcaggtatattttggctgtcaggctcgttgaaaattctttttgcacaaaactgtcatttttgcactttgacttcttaaaagctctgaaagcagataaattggtttactgtcttacccatgaccactgacttaagattcttttgtataatcgtaactataggtatagttttatattcactgtgatccaataaacaaagagaaaagacgtagattgtgatgtcgatactcaataaataacttattcaggagagcattactagacgtggtatatcttgacttcaggaaagaatgttactgcccatatagatttccgctggccacattcactatggatgaacacgctaatgtgtgaaagcaatctgtaggcttggaaataacatgcatgcataacatagttaataatattgactggctcagtgacaggcatggaagaggtgtttagtagtgtcccttaagcttccttccctggcacggtcctatttcacgttttttttttttttaggaactgatagaaaacatggaagtaataatcatctgatctagatgaactaagtggagaaataaatgacagatataaaaccacaattggccgggagtggtggctcacgcctgtaatcccagcactttgggaggctgaggcgggtggatcacgaggtcaagagatcgagatcatcctggccaatgtggtgaaaccccttctcgactaaaaatacaaaaattagctgggggtggtggtgcgtgcctgtagtcccagctactcgggaggctgaggcagggaggcaggggtattgcttgaacctgggaggtggagtttgcaacctggcgacagagcaagactgcgtctcaaaaaaacaaaacaaacaaacaaaaaaaaaacacgattgccctggcacaggtggagtgctctgctaagactaacaaaaagaaatttcgggctgggcaccatagctcatgcctgtatcccagtatttggggaggctgaggcaggaggattgtttgaagccaggagttcgaatctagcctgggcaacatagtgaaacctcgtttctacaaaaacaaacaaacaaaaattaaccaggcatggtggtgtgggtctgtagtcccagctacttgggatgctgaggtgggaggattgcttgacaccaggtgtctgaggctacagtgaactgtgattgcactactgcactccagcatggatgacaaagggagaccccatctctaaaaatcaaaataaattcctccggattaaatgttaagtcttacatttaagttccaagaaaacacctgcataagttcaggggaggagctgacattgaagaagctctagtcagagcatgcaggctgttggctgggacacctcggttctcctccaagcatcctcttacatctaataggctagattacttccttata

SEQ ID NO: 1242486 - DNA, 4001 bp, Homo sapiens
gttgaaaagttacatcttgttattcatttgatttacctttctttaatgattgaggttaaattatttttcctatgtttattagatagttatagttcttcttttgtgcatgtctgttcaaaaagaacttatttatttgagtttgtgtctttgtaatactttgtgtatccttttactatattaaggccattaacctttatctttcataattgttgcaaatattttctctagttttcgttttatgcagttgaattgtctgtctgcctttgattttagtttcttctcaagatcatgcaggatactgtcccttaatatcaaatgtcacagcccatggccaaacaactgatgctgtacctcagagttgggcacaggtgctcccctcctgcttatgtgaggagaatagatgggacccctgcttatgtgatgagaatagatgctttactcacatatgttttctttcacaatacccacttctttgtgtaaatgtatatcttgcgggttatgggaaaactgtcagtgtaatgatatctttcctctaagtttttggtttgattgaaaaattcatgcatatgttatttttagccccaaaaacttattttaaaatattttgtgttgcactttcagatttatttaaattcacataaaatttgacataaataacattatcttcatagctggcatttgttataccacatatctaacgtacatttaagttctattccactgctaggagaagaacaagctgaccttgaaagttaaatctaatagaggttaagatatttgctttatcttccagctatgatcaatcacttctcttctaattctgcaagccacattagaataccaatcacattgcttagcagtaacaccttgtaaatgagttattcctagggcaggcatggtggcttacacctatagtcctggtactttgggaggatcacttgaggccaggactttgagaccagcctgggaaatataatgagaacttgtctctacaaaagaaaaaaaaatttaaaaaaattaaaaattagccaggagtgttggcacacatctgtagttccacctactcaggaggttgaacaggaagattgcttgagtcctggaggtggaggctgcagtgagcaatgatagtgcttttgcacttcggctaggcgttagagcaagagcctgtctcgaaaaaccaaccaacaaacaaaaacagttcttcccataaagagagtataacccattatttaggacaggaaacaacctggaataggagagagaaagggcacactgaggataccaaagaaagatccatcctgcacttggagaggtgaaggccaaaagatcttggaggaagaaacatgaagggccaatttgtgtgagcagaaagctctgcaattgtgtggggcctgtggcatttaattcggtggcactcacagggtggcttgggtgtgtggctccagcacagctcatggttgcataaggtccagagtcctgcgtagagctcaaggccattcttgatcaccagaaactgtacccagttcagtggggacatggcgatcagcattaggaggctaaaactacagaggctgccacagagcgttcggatgtagatgtgtgcctgatccataagctgctgctgcctttggcatgacatcgaggcacttggatgtttcttggcagggacggtaggctacaaggatgagggaaatattgcctacccgaaagaataacccctgatccccagggtcacccgctcttctctacctcaagcattcccatgtgtgtttgatttatagatatttttccctactcctaaaaaaaaaaaaccccacaattttcagggtgatcttttctgtctttaggatgctctgtgtagccctgcctttaagtaagttctcttcttcccatctgactttcaattagatacctcctcaccctttggtatttccggttcccctttattttgggaacctcaggactgtggaaagtcaaggttaaatgttcccttcgctccatcttggcagttagttctctaactgccacggaatttgtctctgcatctcctcacacatgctggcagaagcaaaaagggccaggacccatggcatagatcctgtttctgttttatatttttgatctggtcagatcaggaagaaatcaccacattttaagcatgtgcatgtatgtgtgatgctccccaccctccattctccacctactcccaactcttttattaaataaatccacaaacattttgttagcagtggctgtgtgtcaggctttgtgctagcttctgggacacaaaaataaataagacacagttccctcatagcaaataaaaaaaggggaactcatatgcttgttggccacatgtgtttcttcttttgaaaagtgttcatgccctttgcccactttttaatggggttatttgtctttttcttgtaaatttatttgagttccttacagatgctggatattagacctttgtcagatgcatagtttgcaaaaaaattttccctttctgtaggttttctgtgtacgctattgatagtttcttttgctatgcagaagctctttagtttaattagatcccatttgtcaatttttgcttttgttgcaattgctttttgcatcttcatcatgaaatctttgctggtttctatgttcagatcattagagaaattaatctttgtattttttttttaatttttttatttttttattgatcattcttgggtgtttctcgcagagggggatttggcagggtcataggacaatagtggagggaaggtcagcagataaacaagtgaacaaaggtctctggttttcctaggcagagtgtttgtgtccctgggtacttgagattagggagtggtgatgactcttaacgaacatgctgccttcaagcgtctgtttaacaaagcacatcttgcaccgcccttaatccatttaaccctgagtggacacagcacatgtttcagagagcacagggttgggggtaaggtcatagatcaacaggatcccaaggcagaagaatttttcttagtacagaacaaaatgaaaagtctcccatgtctacttctttctacacagacacagcaaccatccgatttctcattctttttctcacctttcccccttttctattccacaaaaccgccattgtcatcatggcccgttctcaatgagctgttgggtacacctcccagacggggtggtggccgggcagaggggctcctcacttcccagtaggggcggccaggcagaggcgcccctcacctcccggacggggcggctggccgggcggggggctgaccccccacctccctcccggacggggcggctggccggacagaggggctcctcacttcccagtaggggcggccgggcagaggcgcccctcacctcccggacggggcggctggccgggcagggggctgaccccccacctccctcccggacggggctgctggccgggcagaagggctcctcacttcccagtaggggcggccgggcagaggtgcccctcacctcccggacggggcggctggccgggtggggggctgaccccccacctccctcccggacggggcggctggcctggcgggggctgacccccacctccctcccggacagggtggctgctgggcggagacgctcctcacttcccagacggggtggcagcagggcggaggggctcctcacttctcagacggggcggttgccaggcggggggtctcctcacttctcagacagggcagctgggcagagacgctcctcacctcccagacagggtcgcggccaggccgaggcgctcctcacatcccagacggggcagcagggcagaggcgctccccacatctcagacgatgggcggccgggcagagacgctcctcacttcctagatgggatagcggccgggaagaggcgctcctcacttcctaggtgtgatggcggccgggcagagacactcctcactttccagactgggcagccaggcagaggggctcctcaca

SEQ ID NO: 1242487 - DNA, 4001 bp, Homo sapiens
tctgtcaggtctcctgtaggtttacacaagaattgaatcacaatgcaaaataaactactgggggttccattttttttagatatgtacactgaaggaacaaggatacttaaagcactcaacgtgtataagcataactgctcacgagaccaccaatgtccaaatcgagccatctaaactaacaagattttctcagcaaggactttgtttcttataggttagcaaatgcctgttcaatctcctgtgatattcgaaatgggttgttaaaaaaatctttaaagagaacagtacaaaatgcatcaatagactctgataaaatgaaaatgatttataagaaattccagtactctgagtggctgcctaatatctatggcaaccatattttccaaaccacaaaatcagaatatgtgatttgaccaagtattatttttacagcaagaagcaatgtggcaggtggaattggacaacaaaataccaaaatttatagagaactaaacagaaaactttttatggaggctcatccattaaatcagaactgataccctttcatgtcagcagagatgcttcaataaggtggatgagtgatgaattccccagtaagcaagatagatagatgctcctttagcttcttctccccattacagtttgaaagcaaataaagtgtttgaagagtctagaaaacttaagtcataaaactatcaaaggatgaagaaaaagtgccctgggtcaccggaagcctcaaacaactgaaaatataagattaataatgtaaagaaaatagaaaagttagcaaaagaagagaacttctgattcgtggttacaggcttttccctaattctcacaaccagaactgtaacaacaacaagaacaaaaaccagatacaaatatatcagacaacagactgacatgagaaccaggagccttgcttctactgctttgacaaaaccttgctacgtcaaatcattttgcctggatcttgactcattcagttatccataggcaaaggggttagaatgtccaatctcttccacctcacagagctcacctggggctgtggctatactgctcccaacgtccccaaaatgaaaagccacagccctggctagagttctaccatgcggaccacagaccaccaccacagcacggcaagcctccctacctgttgctaggacgagagctggttgaatgatgtcaatagtttcagaacagaatttctctaagtctaccgctctgcctggatctcgaaacctgctcaggtgaatgtcggatatctgccgaaaacaggtattgaacagagagatctgagccaggaagaggcagcatggggaggggcggctcagcggctctctcgggcagaaggaaaaggcaaagaggcaatgcataacgaaccccccaggtaaggacagggccagcactagacagagcctcgagttacaatctgactgaggtccccagcctggagcgtggggcccaacacccgcaagggtcccaccgcacggtgcccgatctgcacctgcctcccggcccggcttcccgccgcgtcacctgcaggccccagaagatgttgctgtctccgggccctggcgcagggtgcggcctcctggggggcgcggggcgcggcagcggcgagggctggcccgccaggccgtagtgctccaagagcatggccaccagcgctgcggccgccaaccccgcgaccaccctgagagccagcactgcagccatgccgcccgcccgccggggcgcggccctcgctgatcccgcgcaggaccgcgcggcgctcccgggagccgctttgcctgcacttccggactctattgtcgcagggccagagctggatgcggggccggcgccggatgcggggctggagccagacactgggcctagggtgctgcgcccgtcagccgccgcccagcacctgcccctctctggccgcgcaagtgactgggctcgttttgcataagtaatacgatcacagaaaagagaaccgaaactctgaacaccaatgacggtggccgagtggtggcggggaaggagaccgggaccagtggccgggaggcgggggctagagtcctggctccgccttggtcagtcactcctgacctcagtgggtcgatctccttacctgtaaaacggagttaataacaccttccgtgcgcactttgcagggttgttgtatcaaagtgagaatgtatgagaacgccttttaaattgtctcacaaatgtgtcaggtggcttcctctggccccttctgattattaacgtacctccataggttttcttttctttctcttccccttccctctaccattcccctttccttcacttctcagacagggtctctatcccccaggcaggaatgcagtggcgcgatcatggctcactgcagcctcgacctccctgaccttaagtagctggaattacaggctcgcaccaccacgcccagctaattttttaaatatagtttttgtagagactgggatctgtctgtgttgcccgggctggcctcggaactcctaggttcaagcgatcctcccgcctccgcctcccaaagtgctgggactacaggctgagccaccgcgcccggcagcataggttttctatagatgtaattcctatgttttgtgaaagttatttttcccttaaactgatttcacatgcacctgagtaaataatattgcaacacggtagtataccattcatttaataagtattaaatacttcctatgggccagacccaggagaattagattcagccctaccttaatttatctaacaactcccttattgttgattttttaattgtttattatatattgctgttctgagtaatttttttcacgtcttccctttattgaaaaaaattttagaaaatggcagttaataaaaggcacaaacaaatcaacagggatatactagtggaaaacacaatataaaactaacatgtcattggcttctttaattggttaagagcacaaaatgtaacaggcaaaaggtctgtttcaaacaaattaaaaagctatgtgttttttaaattctccccaaatcagatatatacacacccacaaaaatagtgtgtgaaggaaaactgtcatacacaagaagtcgtatcctgaattcttcaaggaaatacatgtggaaataggaattaacagagtcagcaacagattaattttttattaattgagtcttaaaatgctacatagcccaaagctatactatataaagtactactaggtacaaaggaaagtctgtacagcttttagcaaaactgctttcccagaaaagcaaattaaaataatgcaatcagcagacccaggagactacagctagacatcagagctacaacttctcatatctctctcagaaaatcctatttatccagaacagactaaaatttcaggacaaaacagggatttttaaactttttttactttatccattttaaattctttttatctcccccaccccacaaaccagtaattcagcaagatccaacagaaagagggctacttttagaattggctattttatttttctttttttttttttttttttttgagacggagtctcgctctgtcgcccaggctggagcgcagtggcacgatctcgactcactgcaagctccacctcccaggttcaggccattctcctgcctcagcctccccagtagctgggactataggcacgtgccaccatacctggataattttttgtattttttagtagagacggggtttcaccgtgttagccaggatggtcttgatctcctgaccttgtgatctgcccgcctcggcctcccaaagtgctgggattataggcgtgaactaccgcacccggccttatttttctttctacggcgagactgtcatggagcttggatatttcaggctcatgtgcatccatgaccagtgtcccactgtggtcaaaaaacttagcaatggacttggtgaattcggcttcccgctgctgctttgttctcccactgatgaaggtcagcttag

SEQ ID NO: 1242488 - DNA, 4001 bp, Homo sapiens
tacagtaacatgttatacaggtttatagcctaggagcaataggctgtaccatacaaactaggcgtgtagtgccatccagttttaagtatactctatgatgtttgcataatgacaaaatcacctaaggatgcttttctcagaaagtatcaactgtaaatgtaattcgactgagatgtgactgaatattcaatgtagtatatacagcatatatattaatatatacattatatatactaatatataatgtctacatagtgtatatatgcaatgtaaacaccagaaaaacaagagaagaaaataaagttcacacgagtactttgaagatgattcagtaaaaggaccttagtaatactaaaaatatttatacctagataatgccagactattagatttcagaacttataaaataggtaatttaaaacattacctataaatttttaaaattcaaattaaaacttcatgaaattcaaaaactcacacttcaggaagatagtggtatttctgaagaggatctttccaaaactaaaataatttttcccctgcaaacataaaggaaagataattagcctcagatggcttcaattaccaaagcatcatataactatctaagactgctagaaattccaacttaacttaaatctttatgggacgtaccccttaatcagttcattccctttactcaccaatcactgctcagaataaccaatcattttttctaatgaactattctgtgtgcaaataaccagagttttattttcaaatctaaaaagacttaactattaaccattttagtaacaagtaaaaacctaactgaacacctgaaaatcttcaccactgaacaaaaggtataacgtttaccataataaaagcccaaataagatttggacattacagtcagtgagcagagcagaatgaaacaaaaaggccaacgtaggtttaatggggctaatgcttttcagcatttcctccctgcatctggtttttgtctgctcacaggactatacctgttactgaaataaggtttaaaatgggtaaggggcagaaagggtcaacccatgtagttaattatccaaatgaaagactagccttaccacattaaattttaagtactatttcttcaattttaaccattcccatgttaaaacacatttcttaaatctctatgctttctagtcacacagtaaagcttagaatagccattccaaagttgaagcgaagtcgaaccatctcgtaagcagaattacccagggaccaagaagtgcagaggaagaaaaagaaagaaagaaatgaagactcctatttacatatctttcttatccaacccggggacactggattctgtgaaacatctgaaagataaacaactctccgtttgtacatcaagtttacatctcaagtcaggcactgaaagttctgtttttctgatgagaagccgctccaccactcctttctgttgctgaagtggcccttacattcccgctagcctaatcacagaagtgcgcggctttccactccagggaggtgggtcccagttggctagccacacagaccatcccagcaaccccaccccttttgaagagacttttgcggaaccttcatggaccccttgggccgccgtagccccaccccttgctcctctaggttcagacgttagtgaagtgaatactcaccgacggtatcggaatgtgccatttggaccggtcggcagcagctacggttgccggtcccgcactgaaaaacgacagtggtgacgggtgagctcccagaagcagaagaatgacaggcaacacctgaagccacgcagccgccgccatcttcacagccgtggagtgcctaccgaaagcatttcaccctcttccggttcgtcccgccttcttccggctctgctctaagggcgggattatccgggtcctggaaacgtcgcggagcttgtttgctgtgcggcgtagcggcccctctctcagacagtcgtctgtgcgccgtgagactttggacctactgcgcaggcgtcatcctgttggaacctggtcagctgggttagagagatcgctacatgccagcctggcctgagtcttttctgtctcccagccgttaaaggttttaggaccaggcaggcaccccgtgcaggatttggctctctacttccgctcgccccagcccttcatcccttctaagtcaatgtcagactttggggccagaaagtctggaaaagccctaagcctggctgcccaagtggcgtctagtagtgagttctccggtttgggtggtatttaagcaaaggctggaattcggcggtggtggagtacacgcgattcctagactgggtagtgtaacaaccttcaaaggccccttctagccctgaagagtacgatgctgcagtacaatctggctggagacctagcctccagcaaagacccggccggcacttcccacccttaaccgaaaacggagacagagagggtcagttttcaaaatctgtggcgtgaccccgccactgagatagatctgcagatgcttcgtcccagtcagggaggccgtctcggcatttccaggttcttaacgctcttgatttttaccctctaggactcattgcgtacacgccctcaccgccgcccagtttcggttcctaacaaaagcacgttcctcatcagccacccataatcaagacaaatttgccaaataaatcattgtagaaacgctagtttgggcctgaaaaattccaggagcaagagtcaagatttgtcactccatgagaatctggaggggactcccttcccagaaacttgacgatgaagtactggttgtaattttagaaagacacccaatcggcttttttaaaagatcgcccagggcccttgtcctgagagctgggagctggtcggagtgacagagaagccatggaagcagcagtgaaagaggaaataaggtaaaggccaagtgcttctgtagcgagtgaccccagggtccctagaaacagggaatagtgttttaattgcatttcttatttgcgtatttggtatttgctgacctttatcttttctctcaattcgcgggaagttagttgatattaatagcctctcataaaatactttcaggatggttaaataggccgggtgcagtggctcacgcaggtaatcccacagcactttgggaggctaaggtgggaggatcgcttgagttcaggagttcgagaccccctccccgccccctcggagtcccagctacttgggagaccactgggaggatggatttggaggctgcagtggagctgtgatcttgccactgcttgggcaacaaagtgagaccctgtctccaaaaaaaaaggatggttaaataacattaacagtggaaaagttgcaatcagaactcttaacacgtgaatttcaggcatgttgctttccaaattcatctataatcaccccttcctatatcatcccagagttaattcttcgaagctgtaaagaggaaacaaaagattctccaatctttgtacacttgattaaaataaactgggccggttcgctcatgcctgtaatcccagcactttgggaggcctataggtgggcagattgcttgaacccaggagttcagaccagcctgggcaacatgctgaatccctgtctctacaaaaattttaaagttagccagacgtggtgatgtgggcctgtagtcccagctactcaggaggctgaggcaggaagatagcctgagcccaggaggcggcagttgcagcaagccaagatcgtgccacttcactccaacgtaggaggcagagcgagatcctgtctcaaaaaaaatttttttaataaattaaaataaacggacaaagactgagttcagtgaaggacaaacagttttttagtatggccaagtatatctgcctgggcttgttttcataatatttcgacgtttgtgttcagtcatagctttctacataatcatggacatgctgactacagatgcattcggccacactagtgcatgaaagccggtgtaatttt

SEQ ID NO: 1242489 - DNA, 4001 bp, Homo sapiens
atagcttttttttttgcatctaggattcaaagttcacacatcccaattcactattgtatcacttgagtattttaacctacaatagttgctcccatttgctctgccccatcgccaagtctttttgcaggaacactacagaggtgaaattatgcctccttattgcttcacaacgggagactcgcagtagatgctgctaaacttggtcatttggttccagtggtgacctcctaatttctccattgtaaggacaaattttcccagagtaaactgtggtgagatactttgaaataatatgaaaatcctattccccaaccacctttcactcaaaggttttggaccagttggtaagtccttgccttattcaactgttatgttaggtttgcagagcgccgagttcctgattctctcattccttctattgcatatttctttttcaaacaatgatccatcagtacgcaacttctcttttctgtgtatacacattctggttacttcttgctggggcttcctccccgacctccatgctgaccacatttgaccactcgtgcccagccctagggagccactaatcctttatctgctgatcccatcacttcaccttcagcaaattaaagacaaaaacaaaccccatcattttgttgcccaccaatgtacagtaccttacaaaaattaaaatgattgcaatgcgtatttattgggttagactgaagagagtcgatcgagaaaatcagttttatctttaaaaaaaaatcagattgctgaagctctgaaaaatctttcctcctcactagggtagaggcgcttgttgtcacaattaggctttttgtagtgctgttaaacagaaacactctcatcttttcagttccctgagaggggagaatcttggaagaacagaggtttacaaatcatttagcccaaacgcccctttacatgcagaggcccagagaggtggagggacttgcccaggtccctcagctcctgaatggtcaagctaagaggagaacctggtttttaaaacacctcccccgatcttcttttcattcccgtcctaaatgcctcgtgattcagatatgtaatgggcacagacgaagctgcagtaagcacggcctccttcactgctaatttgcattgtgacggcatcaccttcctacctctgaatactctaaaaattcccattagaagccttttattactgttttaaaaatccaccttcatttccgcaggtcaacagggaacatttaggaagcctcaagggagcacatactacaattactttaaccagaaaagtaataacaataataataaggttctcgaggatccgcacgaggccgcttactgggaggctgaaacgccctgcgagtgacagctccagcgatctcaggaaagacgccggccagtccacccctccccatcgcctgctgaacgaggcagggagatgcataccgctccaggagctcaccaaacatgcacaggaaggggaaaagtgggggaacaaagcccggagtggaagaacacagccccgcagcccgggaggacaggagaccgcgccctccccgctgcggcccagcgggctgcagaggctgcggcaccgcagtgcggggcgcgggactcacaccccggcgggcgcctcccgcccgggcgcagcgcctggtctcccggcgcagccgaccgggccgggaggcgagaggcgagaggcggcccggctctgcacgcccgcccggccgaccgcccatgtcgcggagcatcctcccgcgggcagggagggcacggcggccaccgcgctgcgggcccgggggctgcagacaccggctgtccagaacaggccccacccgccccccggggcgctcacccgtccgtgcgctcatcccggagccggctgtgctggccgtcagtccgtcagccccggtggagcggggccgggagaacaggggcggcgccgtggccggggcgagcgcggcgatcaacaggcggctcccggccgggcgcggcgccggggcgcgcggctgcagcggagcaggctgggaagcgtagttcccggctgagcctcgccgcggccccgcagtcccccagccccgcccttccccgacaggtgtcctctcccggaatcggggtctgaaccccgccacagctctgcaggggaggaagcacctgggtcggggagaagcctgggcaggctctttggagacgctcggggctccggagagcgtggatggcaaaggctttcaagcctgtgatgagcattcctgtgagcgagcatcctgacacggaagccgcgttgagagcggtctcaggtacagaccccgcccgccccaggttttcctggctgggcgtgggcgtgggaggagagagtagttgggttggcagcctagggagggaaggaggtaagcgaggtggaagttagcaaggctctagggtgatggcgtgaggggctggagagcccaagcgcagtggcggcttcactgaggtgagaccggacaacttagcctgtctgagccttcgcgtcctcatctgtaaaacaggcttcaagcttgaaaaagtgttgtgaggattaagcgacccatagcacttaggatctggcacttagtgcatactcagtgaaagttccttccttggggtttccgagggagttcttgggccgggaaagtcctatatgtcgtgctaacctaaagatagttggacctcgttgggctgggtaaatgttaaaatccactgggtttgttagtcgttgagcccgttcacttcatccctgaatataccctgagatgttctgtctgccaggttcttgagagctccaaagatagagaaaataaagtcaagtttctgaagcatgacagcagagtggggtgacataggacaaagaccaacattatgaaaatacatggcatctagatttaacttccagaggccttttctaattagatgtgatatctctctccttcttgaacttttgcagcatattttgagcataacctttgcttatgggacttatcttggcagtctaaggttcgttgagttttgcaagttgctgctatgcagtgtttcacatgatggtgggatttgcattcacagatgtagtggaggaaaatgaaccaaagggatggatgcagcatggctggtgtaatctctatatgaaattttaggcaaaatgtgaaaagaggtgaaacagctttatagtctgtctggcacgaggtgtgcagtaatcgtgtggccaaaaaaacgtgctgcagaggaaattccacatctgaaaatgataacactggtttgcatttatgaaaatactttcctatttgtgttctcatttgatttttacaagaacccttgtgagacaggcagagtgaaggtatttttccccaatgatagttaataagaggcacagagaggtgatgtgacttattcaaggtcataggggtgttcagtaagcctgtcttctctccttccactgtgggcacccccagcactgtctcccttttgcacattgcaaaatagggccataccttccccagcagatgggttgaaccagaaagtaaagttaatcctctaaaactctgggaactagcatgatgaacactggcacgcagtggctgctgactgagagaccagtgttgtttctatgatcaattgtggtaatggactatatcttgggcctcctgtcagaatgacaaatctgagccagaaagagttaaatgaaatgggggtgtgaccaaattactttaagtcatgttcccaagttttcctgtacatttgttattccgaatgtcctgtgtaaccgacaggatgcctttgacttttttatgttgtacatttgttacagtcatagccttctgttaaataagaacagggctgcttacggatcgagccagcagttttcccagagaaagctgatagtaggcatatgctgaaaataataaagcaatttcattcatattggaagaaagagtagcaaaggtgctcagtagtgtacagtatttctctttggtttcccgtggttctgcacgaggaaa

SEQ ID NO: 1242490 - DNA, 4001 bp, Homo sapiens
ttgaaaaagccatcaattatgtatctaatatcagttatcagtaccagtatttaaattgctattaaaaacacctgaaaatacctctaaaattacctccccacacttgacattcaaagtatggtctctgacagcatcacccatcagacatacagactttggactctacttcaaacctagaatatcctgaatgaattatgcatgctaaagtgtttgaaaagactgccctccaccattcagggcctttctgttgtaccaaacctgttttgtttcaatgggccagtaattaagacacgaaaaatctttgaatgggatttgacctgtacctatttaatttcagatgaagttattaattacaatgtaggttggcatattggatataccacaaaatttaggaattaatcataaaaaatatgattaaataaaattgagcagtaggtctacagcattctcaagaactcatgtttgctctttctcatgtctatcataggacttggaatgcatatcgccagtgtttcctgaatgagcaaaataaatgaacttttaaaaacgagagatatttaggggcagaataatcttgggggtcatctggtccaacaacctaattttaaagatcagcaaactacaatttctgagagttgcaaaagcaaagaaagctcaaagaattaaaatatattgggacattttaattcgttttgttcctttcgtaggaatgtgtaagaaaggggactgtaactattatgattgctgactcttaaaggtgaaaaggtgcctaggaagaagaaactagcaagagtaaatgagacttggcaaagctatttttccaagcctaatatatttttgacgggccaattaatcaatttaatctgccaaaaaaattaatctgaaggtttctcagaaaaggagaggagacatgagctgcatgaaaatgttacaaaccaagggaggctgcacataactaacttaaatctccacaggcttatttcctgttgaagtatggcctcctggggtaagttttactgcagtgttcattgccagatgacttttggttttaacagaggccaagggcaagttggaaatgcgattcttaactaaacattaaaaagaaaaaaagaaactgtggctgtttcccatttctgtttgtaatcagaatgcaggcttgcggaggaaacacaccatcccccgcaagcaaaaatataacgacacagtcacgtcctcaaaacaaactaacacacaaacttcccagccggatccagctgtgctgcctgggagctaggaacttaattctaagagcagacagatcaaaccggtgaatgcaagggcagccacatttcaatcacaaaaagggtgtgccctaagttttggctcccccactccgccgccccactttcaacaagccgaagcctttgaaggaggctcggtgccatctcggtgtgatcgcgtcccggcgacgctgggtagggtgcagggagccagctcggccgcggctcagcgggaggggagggggccggtcccgaacccgggcgcccgggccgcgggtgattcactgggaacgccaggttcgcgcgcctagaccggcgggcgacgcccagcgcgccccacgtcccccgcccgggccgttcgcgcagaagcagcccccgcgcacccctgctccccgagacggacccgtcgggaaggagcctggagtcgggcggccggcgggcagcaacctctccctcctcagccaccatggccggtgcgactccctacccgcgcccgcagacggacttcctggaaagcaccgggctgggcttacctgactggcgcccgcaggggccgccgacctcttcacagacccacggaaactgccggccgcaagccgaggctcggttcccagcacccgccggtccgcccgcgtcggcctcccaaagagttgccagacccacccgccagcagctccctcactcgaccgccctgtaggtgcggtgggttcctccttcgcctccgacgcgcgtgcgcactcccgtgccgcggggcatcctgggagttgtagttctagcaagaagggcgaggctcaacgctgaccctggtctttacaatgggcagaacgtaggaaggggactgcgaataccaacccttatcccagtctaagataatgttctctacccgtggaagtacctactatggacttccccgaagctggaaatagtatctagaggctctttggtatagatttcctttttactttgaccttttgtaaagaagcgcacatggcagggcttgcattgtagccttggttgttaatgcgaggacatgacattggggcctttaaactggtcatgacagagttatagaaaagtaaaggaataaaatctaaagcccaagagaggcataaatcatgcgaatgtcacctccagggtgtggtgaccttagtggttttcttaggtatgcgtttcggggatgatgtagctattgcagggcagtttctgcccatcctatcttccctttccatcttcaagctctacaccaggcggtggggctggctgctgtagtgggagaaaaaacagaataggctgctcaagggggggattggggcagatgggtagtctagagggaagaggaagagtgtgggaatctctcagaggactgtttgacagtggcctatgtaatggctaccttttgtgcgaggctctgaggagagggaactgcgacatttttccatttattcatttagtcacttactgggaattttcctggcctgctcttcaggagtagaccatccccaggaataatgctaaactttgacacacctttcaaaaatgcagccaaagaagtggactgacgtgcctgcttgaggtacattccagctacacccagtgtgcgagccacttcatggtttaaacctctcctggcatctacttcttcccctcagaggagggaggaccctaggttagataaacatcctggaatttcatgcaactggcacccactaatttcagcaatggagatcactgatggtttaggtttttaagggaaaaaaacccttctttttttttttccaagacagagtcttgttctgccgcccaggctaaagtgcagtggtgtgatctcggctcactgcaacctctgcctcccaggtttaagtgattctcttgtctcagcctcccaagtagctgggattacaggcacgtgccaccacacccagctaatttttgtagtcctagtagagatgggttttcaccatgttggccattctggtcttgaactcttgacctcatgatctgcccaccttggcctcccaaagtgctgggattacaggcgtgagccaccgtgcttggccaggaaaaaacccttctcaattgcaaatacttagaggacagtcaacactcaatcttgtggccattgcattttattttctataccatctttgggtcaatctcttggagataacagctttctgagagcaatttcctacagaattcaggttcataagaatgtttatacttataatacataccaaccactgggccagcacttcatttgtaatatctcatctaatcctcaaaactaatctagtcctcaaaactctataaagaataaactggtatcctccatttctatagataagaaaatgaagactcagaaaagttaagtaatttgtataaggtcccagagccagtaattggagatccagagatgagacacagttctcttgagtcaaattctaatgtgatttccactgctgatcagactgatgtgtctcctaaatctcatcaatttttttttttttgagacaatctcattctgtcacccaggctgtagtgaagtggtgctatcatggctcgctgcagccgtgacctcctgggctcaagcaatcctccaacctcagcctcctgagtagcctgagcagctgggactacaagcatatgccaccacacccaactaatttttttaatttttttttttttgtagagacagggtctccctatgttgcccaggctggtcttgaactcctgggctcaagg

SEQ ID NO: 1242491 - DNA, 4001 bp, Homo sapiens
gtaagacacctgggcctctctccattacttctctggcctcttgactgtgcctgtgggcatcttaacacctcaaacattattgcagagaagggaattccttccatggccaaggatatcaactttatttcatttcaaatcattaacagacatcatcccatgagagtttccagtgttttaacaactttctcctttgactgtcactatcaatcttagctagtttttagatcttgccaaatttgtgttatctagacattcatgagtggttagatttattgaagctctttcaggataacattacagcataatgtttgagtcacagtgacctcattcaagtggactggttctcctctgaaacagacacattgacaccatatttccagttagttgtactgtgaactgtggtcttctatccttccaaactccgtgttactttcttctaatgtatattttgtctcagtcacatagttgtcgaaaacccaggaactcggttcatcctccacattcctgtaactcatactttaacttctcttgatgaaattcgtaagtccaaggatcaaatatttgggttctgtcctaggaaacaagcatgtgggacatgtgcctacttccttagtataggtgatattgctgcaagagttaagaggaatgagagttactggcaggaaagaggagagcctctgaaaccaggaatcacttcccaacgtgctctcctccgctagtgcagagtggagggtgaggtcagtgcaaccattctcacctcaatcacgtctttccaacaatcacatctccattgtactgaaggtgccagcagcctcccagttccccaggctcatagtctccaaattagtgcccttatttctgtcttccttgcttccatgctgccatccaaagtcctatcaacatctgatgctatttctaccatgagtctcttgattttaccctttcctttccatctccacgggctccctcctcccagctctttcctgtgtcttgattgctgcaacaggactctcttggctgtctccccttatccagccttgcccaaatccagctacacccaagccagagttcgagctttctcagccatcctaaagccggcctctttactatcctgctatgctccccactcacaggagagtcctgaatatacaccaaaacaaagaactacccagagtccacgcagcaaggagtttgtcatacccagccatgtcctgcatctgcgccatgtcagtctgtttctgctctctgccctgctcctgcgtgtctttcccctggctctctgtctgctgcagcctcgtccctgatgagtgcactcctggcccctccttcccccagcttaaggctgtctcctccctgccagtggatgctttgctgtgatggctggaggttttggctctctgacctggccttgggcccttctctctgaattatcctcatgggaccttctggccagcgtgcccttgtgttcctggaacccacatcctcttagctttgcctctaagtgaatcaatgttgagtaatttctgctgtgttggagtgaagacacctggatttttattctggctgttcatgaatttgatgtggggcactaaataagagatgggctgcctgtgctggccctcttcagatgccagctctgtgcatcctcagctcgccaccttgcatgctttgcacaagcctccccgcccctatacttccttctctgccagttcctgagccagtgctgaccaagtccctttcccctctgaagatgaaaagataaggggatgagtcttgtttgtaacgtggcatcccttgtgccttgggtccctgcatatccgttgacccacagtttcccctttggctctgcctcacagagtgtggaaaccagtgtgcttgggttttgccgtggtttccccatttggactcaggtgtccttcttgggacagtagccctaacttgcacactgactctttaggaggtctggtcgtttcccattacttgaggtaagactagcaagtcagttttcatctctagggagtttacctaacactacctgccatttagtggactcttactttgcttcaaaaattaattagattggactttctgaatgaccaaaaaaatttttttaactgccagttgaataatagcacctttaaaaaatatgatcaagaaccagggagaaatcagaaagtaaagacccctaagctatcagaaaaggtatcttttactcaggagagagtcctgcaggctctcactcatagtctagttttctttctttaccccaaaattctatcaggtatgggaataggagggcagggtagagaggtgctcctgtccacacccactttacctcttactcacctgatgacttcctactgcaaacagctgaaggcttttgacagttcctgggtgttaaggggagtggttcttagagaacgatgggcaagatttggagatgaaatctaggttcctgccccttgtgtgggacacttctgcatagtcttatagaagttccggcaggattgaagcccagctgtccacaggggttaaataaataacctctcaggaatgcacctggatgggcttcctggtacttcctgggatcgcctcccaaacaactagctctcaagtccttaactcagggtcagcttctgaagaaacttatcctaaggcatgctgcaagaacgaaaagccaagaaatgatggaaagagaaaatagcagaactctgaaaaaatacaaacaactaaagtattttggggtcctggagccctttaacaaggaccattgggacacaaggatatgtggcatagtttctctacacactgagggctggagtattgtgatctgggtggagtgtattctttttaagaggccccaggaataagtacgatatttgagaaaaggttctatatgaaaagtgaacataggttgtgatacttaaaggaatgatttgttggctatctagaatcttgagtttccgaatgcccctttccctgacgaccaggatttattggatttttagttgaaaaaaattctttgccgttaagcctcaaagctcccagttctagcagtttggtgctttaagattcattttctttacgtttttcagtctttgatgttgtcccttttcatctcctgttgcataatggagttagttttttttttttttttttttttttttttttttaatctgccttcccacagaagccccctttccttcttggtcatttcagtgtcctttcttgagcaccattatctcattcctggggtaaggggatcagctctgcattcagtattccaaaggctagtgcagtgcactgaaatttatacttctgctttgtttccaatccaaattgattatttttttttcagttttcatccagatgtttgatatcatgtaaacacagcttgaaagtgttcctgaactgcttacagatgtatgccagtgacaccctttccaaattatatataatgattctctgggtctatttatatccatgtcatagtctctggcttgaattttagctataagactaagttgacagaaagtgaaaaattcatgtgtatgggtaagttgtccacttgattaaagactccagatatttggaaatattcagggattgatgccattttccactgaatgctgacatgtctgtaaccatgatgttatgcctggatattcgtgtccattccaaactcacatgtagaggcctagcttctatgtgatagtatttgaagagcaggcctttgggaggtaattagggttagatgaagtcacgagggtgggacccttataatgggattaatgcccttataagaagagacacaagaactctctcactctctttgctcacaagaaaggtcagctgagtacacagccagaaggtgcccatctgctacccaaaggtaaagcctcaccagaaaccaatcatactggcaccctaatcttagactttccggctccagaatggtgagaaaattagtttttgttgtttaagccacctagcctgtggta

SEQ ID NO: 1242492 - DNA, 4001 bp, Homo sapiens
tgcaacctccgcctcccaggttcaagcaactctcctgcctcagcctcctgaatagctgggattacaggcacgcaccaccaggcccagctaatttttctgtttttagtagagatggggtttcaccatgttggccaggctggtctcaaactcctgacctcaagtgatccatccgcctcagcctctcaaagcgctgggattacaggcatgagccaccatgcctggcccctaaatactttttaataatttttttctactaggaggaatgcttattttgtttcacatgcacaagacagatcatgatttgaataatgtaggtataaaaattattaccttcacaaaacagtttccagctatcagtactattacaatactatctaatacaaccctcaagtcccatttcctaatccacaagaaagagattaatccttttatccttgggatgaggcaacaggtacagataaaagaacaaatctgataatacatttaaataaaccccttcaaacactgtatacctgcttgtcctgtttggctgaggtaactgctcaatgacctgactgatggaaccacatgtgtccaagttagaagaatccacagggtctgaaaaaaataactggatattagcatgaaagacatttaccaacaaaccttaatacaaaatcaggaatacagacaataccaatctaatcagtgacactagcacatcaacttttgagtgactactacgcagataccacagtaggcttccttacatacattcgacacaaccacataaagtttaaatccacccagcaccaacaagagcacccaaaaaatgcaaaggggacagatagctttaaacacctcacctgcaaccttgttttctttcaaatgttcattgaacccactattaccgtctcctcgttcttctccagctgtttgttcaggattggacacaacatcctagaaaatacacatacaaaatatccccattatatatgaaatagttcaaaatgaaacctactatttgtgaacaatttttccaatcaactttattgagaaggtaatgatcttctaaatacttatgtttgctggttttcggtttaaaaaaaaaaatctgctcaatcttcttcaaacaaggtatcactcaccaacacaggattttctttgtgcgtctggagattaggaaggtgtcgagatagcatactgaagtgagaaccagaatcatcctctagaacctggctttcaggctgagaatcttcaattatcaggcaaggagtatcttgctgagagaaatctgaatccaactgacttccagtagggtccatctgctcccctggaatggaataacaaaagatcagttccgtgtaacctactagccttgctcacgcagtctaaacctaaataatggggcggaagtacaagagctgggaaacgggaccacttcaggactcctccaattagaatattatatttataattgctgcaagcactttcctatcatgcctaccaagtcaccattcctcgttatttacaataagcctgactatccctccctatttttcatcaccttctcgtagacaccctttcccctccttcctaacctcttctctccccgcccctttttccatcccccccgccacgtccttctggcgcctctacctccccccaaaagaatgttttctaaaatctgttcgccagaggccccacagcctttcagctttcctcacgaccaccaagccttcttagctaacgtttccccaccccctccttagggccctccaaccccttccccgtcaccgccgccatgcttgccaccccgccccctccggtcagccatcccttcagacccgaaatccaggccttcagagcccactgcactcccatttctctccaaacagtaccaggcatcccggcgggaggtccctcgcgctcgagctagaggtctctgcacgctccccaagtccctccagatcgatccctaggtcgccgctgtcgccaccgccgccaccggccgcgaactccccctttcccgtcacgtcacacaatatcggatcgtccattcgctgccgccgcccgccactcaagaaatcccgtggatgataggtagctgcggcagagtgccctgccccacgtaagaaaaaggaacacggcggcgcgtttccatggcagcatggacgttgcaggccctcccctttagtagagccggagaatgacggtatccttgaaccgaagggaccttgagagggcgtgaaataccttcccctgcttccaggacgattgcatttaccactactcagacatttcagtacctctacctgctttttctcgttcacgccccttaatccccgtccctcaccctctttcctggaaaaggagagagtttcccagctttctcataacagggcaaagaagaagcggcttgaggatggctaggtacttcagagctggtgaacccaacagaagagactctttcttctttgacacagggttaacctgtgtcaatcaggatcccttttgtgggcctctaccctgaatccaagggcctgacattacatctctgccagggcgtttttagtatttgtttgtttttacattgtataagggctccagtaagccatatttcttcccattgcccttttccgcctaggacgtatttcaagcttcacacttgtttatcgttgccttatcttttatgggattgcctgcagagactacagccccagacatattttgcacctcccattgagagaattgagcactgtcattctcaaactccatggtaaagagaacagctgccaccccttctaactagatgacctcaaagatacttccaaacccagagattctattatcctaattatggtgccagggtcttaaagagggtgtggcagctgtgacgagtcttaatgaactaagccccatgtggcatatgtgtttgttttgttgttgttgttgttgaggggtgggggtatattatttaagtggcagttggatccaggatagaattctagccagagcagctgtcaatagggaaagcacctagcacagtgccaaacatatacatagtaggcattcaatatgaggcagttttctctttctaccccaggctcagatttatttcggcacagcccaaccatgattctccatttctgtaaatgcccaattcagcacgtgatataggcaaagctgaagtggagcttcctaccagtcttctcactgctgctataaattacagtgatcctattttccaaaccaaattcaaagcatgttgtctgaatacacgttacttatgggaacaaaaggactgactccttgaaactgtcctgaaaaatctagaatctattactgctataactggaatataattatggtcgccagtatgttttattagtggagctaaaatgaaatggaccacacagagatgcatctcacttcttaatcttaaaatcatttataattgactcttttcatactccactcctaaagctgcagaacaccagtgactaaacaaatctaatacttaaagaccaggttagagcaatactaactacactagctggacaaagtgagttcatctgctctatttgagagggcacaaccaaccaggtcctgttatgagtaaatcatgaccttgagtcccataaaaatcccccaaaagttaccatttttttgcttttcttctccagcctgcttctgcttcctccccaagtgaggcacaaataaacagatctgtttgattacttgacaagtgtgtttgtcgaaacataaaatggctgggcgcagtggcttacacctgtaatcccagcactttgggaggcagaggcaggtggattacttgagcccaggaatttgagaccagcctgggcaacatggcaaaagcccatctctaaaaaatatacgaaaaaaattagctgggtgtggtggcatgtgcctgtagtcccagctactcaggaggctgaggtgagagcatctcctgaactaggaggcacaggttgcaatgagccaagattgcaacactgtgc

SEQ ID NO: 1242493 - DNA, 4001 bp, Homo sapiens
ataatcctagctactccagaggctgaggtgcaaggatcacttgagcccagagtttgaggttacagtgagctacaatcatgccactatataccagccttgctgacacagcaagactctgtctctaaatatatatacgtatattttgacaatataatcatactggaatcatcacccagtggaatggctggaatactgttaaccaaggaaagaggaggataattaacagacacctatagccaatctttctgtgacattgtcagactttggcagtgagcctgcaaaatactcatccagcacacataagcaattttagtactatcataatctacatttgcactgtaattaataaaacccaattttagcagggcctgagatcacaaggctgagtttctgcccctaccatctaatcagtgtgtgatccttccctataccattcagatctattgtctagtctctttgtgagacttgatgaaagcagaatctttggttaactactgctgacctttatactgagaccctgtgctagttagcggcctcatctctgcagttgctatggaaactgtccctttctccccacaacctattctggctctctgcctccacatggtactcttactgattgcagaagaggaggcctgtaaatctctccaagctcttttccagattcagatccacaaacggggggggggggggcagaggtacagcggaacaccgtctcatgtgtcatagtcatgagactagagggtgaggcatccccagcatctgacattctgccagtactcttattttcccctttctgtgcaaaaaggattttcagggccatgtccaaattggttgcagagtggactggctgttttcctgtaacacatgctccatggtagggaccaggattgctgtaaagttttttgttttgttttgaaacagagtctcactctgtcactcaggctggagtgcagtggtgcaatcctggcttactgcaaccttcgcctcccgggttcaagtggttctcctgcctcagcctcccgagtagctgggattataggcgcccaacaccacgcccagctaatttttgtatttttaatagaggcagggtttctccatgttggccaggctggtcttgaactcctgacctcaagtgaaccacccactttggcctcccaaactgctgggattacaggcgtgggccactgtgcccggccgctgtgaagtatttaacatgcagacactgcccaatcagaacgtggctcacaggcagccttgctgaatctgatactgtgttcctttctttcctgtactatctccaaagcaaaggcaaacgggacaaaaaaaaacccaaaaacccaaaaaacaaaacaaaacaaaaaaacaaaaaaacaagtgctgctggagccctagggtgaaagataggcgctcccatacatacatgtacagaatgattcggtatcctgggtaaaagactactctggagtgtggagtaggtggagacacactgaggaatgggggaggctagactaacagcacttttttacaaagatgttccagtcagtcataaaacagtgcaaggcctcctcagtcctttcccaacctctggttttgatcttagaactgtcaaccccttctttggtgcaaacactgctccttctgttttaagaactcccggggggtgggagggggggaagtaatacaacagtctcctgagggagacccatctcactgtcacatcacttgaagatgggaaggtctttcctaggttttactcaaatcccccttgctgcagtctgagctcattgcactcgagtcctgcactcagcagagatggaaactagccagccaactgctatcttcagaataacaactcaccagggactcaaggccggaaggtcattctgtcccctccaatactgcgcagccttccagagcactcccagggcccggggcaaggacagggaaaccgaggatggagacctcgggcaggacccaggcaggcagtgacaaaaaacaaaaaaaaaaaaaaacacgccaaacaacgataatacagacacacagacacagatggaggcaacgatacaaactcggaggcagagagggacaagatggctcccctcagttcgggcgaggctgcggaattgccagacagtacttatcagggatacatcttaactagaagcttcttccggcgccgaggcaaccgcctcgccccaccaatgggtcccccagagaccccacccccgctcaagtctaagtggaagctcccgctggtactggggagggcgtggtgggaggaagggggcggccaccaccctctagcctggcgagaccgcagagcacgagcttccagctccggcccgcccctgcggcgcctgtgccacgccccctgacaggcagcagccaatgaactgcacctgccgccggcctttaagagccgcgcgcactctgcctgcagcggaagctgccggactaacactccgcgggtgtttccatggagaccgaggccgagcctgcgcggcctcacggcgttgccatggagacaactccggggctggggctccgaagtcccggcgcaccgctggctcagaaccccgcggagctgctgtgcgaggccggagccgcggtggcggctgcacgctgggacctgcagaagcactctttgctaattgtgatcggcgatatcggtacagagagtcagctgagggccgtgcgggcccaccttgaacaaggtgagccactgttctggctgtgcttcaggcatctctaccctgtgcttctccgccttctgcattcaactaccaatgcatacgtctgcatctccatccctagtgtgcacttcctgagatctgcgcccttgtcacctgcatcttccatgccatgtgtccgtatcctctcgctctactaacatctcgcttgcccatccttactgcacactccatggcgttccgcagtctccctgaggcagcggagctctatgcagcccctggggcccctctggtcacaccctccaccgcagtgttttggaccaggtgtcctgaaagtcctcaccatccctggagaatccacgtccctatcttgctgtatcttctttatggtccctgaaccagcacggggagctttctgaacgccccgtacaaatctcaaatctctgaatgccagtagccaaccactaagtgaccttcgtggctaccagctcctaagtcctcacctccttccccagtgctgtgcctgtggctgtggtgcagtgctgcggagccacctgcgggtggaagcaagctgtggagggctggggacaaggaagggaacacagaaggcgaacctagaatcctacttagctgtaaatgtggggaaggtagccctcagtatctgggaataggcccttaggtgtcacttccaccacaactggggaaccttacaagaaaattcctacctatagactcattaatgaccgagtttagtctaaactctgtccttctccctctggctcaggcaaagcctagaaaagctgtaaactgggagaaagacaccattactagccacctttctttgagacatcactgaggctgatcatggcaactatccatataccctccctctccttacctgttctgtgaacttgaaagtgttcctgcagtctcaccaccctacaacctgcaaccttatccagaaccttctttgtttttctcccacagggattctctcctggaacattgacctgtcatcctttgacttgaaccaacagttgagactcttcattacccggcacctagctcacttctcctcagaggtcaaaggttaggactaatgttttatttcagtcctttgggtaagagctggtcacagaggtccagtctccctgggagaagtggccttgcgggaggtttgagtggaggagaagggaggaactttatagaggaggaaaatcatggaattccatagctgtccccacataccaaatatactttgcagacatggtttgatactggagggagactggagaacataacttctcc

SEQ ID NO: 1242494 - DNA, 4001 bp, Homo sapiens
ctaagtaaaggtaccgctgtgtcatttctttcatttagaggccaggttctctgaaccctgactagacccaccaccaaacccagaacttcccacccactggaaacggcaaaaggaaagaaagtgaagaaaacctggcattctctacacaaaccttggtgatgacacctcaagggttttctgccaccagggaggtgaagttcacctccagagtccaatttcagctgctctattctcccagcctctcatccacccacctccacccccagggaggtaaaggaaaggagaagaagagaggagtggatgaaatataaatgaatgtgtgcagtagcagtcagaggcggcatccaatgctctgggccatggcagggctgtgtgcaggtgtccagcaggaaaaggtaaacttccttcattgctctccagccctgtggtgaccccggagtggccacgcaggcaagaggtgagggaagcagtgtgagcgtgcacttacatcggtggcctttttctctgccagctccagcttctcctgggcatctttgagagcctcagagtatttgtccagttcatcttcggtgcccttgagtttcttttgcagtgacaccagctcatcttccagctgggagttggccagggggtacagggagggaggggggtgcagcaggcagcgtgatcccgaaggggaggggtgtgggtgcacagaaccagaaggacagggacagcgggagagacagagggaaagacagggagggagagagagaaagagaaagagttagccattcgtgcgccacgccgtgccgcgcgccccgggtaccttggcggcggcctcttcggcggccaggaggctgtcctccgccttgtgcagctcctccagcacccggtcccgctcgtcctccgacacccgcagcaacttctccttggccgcgatgtcctcctcgagctgggggcagcggcgggcgggcgcgggcggccggcacggaccgggtgttagacacacacaacacacgggcgtcgggttggctggggcccctcgggctcggggcgccgccgagttggagtgcaaaggacccgaggtaacttcctctttacccgagctggaaccgctccgcggctcaccccgcacacccacctgccctgggacgagactcctgccgaggtctcagcgggctcaagtccactacttggggacacagaagaacgccactgctggcctggctttcgggctgtagcctccattccgccccatctttgttcttaggtaacaactccaggactcccttctcctccccaagtttaaggttcctttctccccagtcaaaagtcaacgaacttctaacacttgagttactcgaccccctttctccatccctcgcccttccttcaaacgtccccaggaaccgggtgtcctcctccctcccccaaactgattcccagtcctgagaataaagcgcctctaggacttgatttcgcgggccatgggaaccagagaagggaaataagcgtcctcagaccagactaagttagactaagcctggctcttgcgtttcccttccttctttccagacgcgcgccctggccgccctgggtggtggtgggggtagggtggtggctccccgagtcctcggggtggggatccagccgggggtgccaggctcgagtcccggcgctctgggcgcgggcgcagggccggggaggcgcagacctgcttgctcctgtcttccgccgccttcttgtcggcctccgcctgctcagctcgatccaaggcgttctccttgtcgagcttcagcatctgcatcttcttcttgatggcgtccatggtggcggcggcgaggggccctggggctgcagcaggagcggcggggcgagcgcgcggtcgggcggaggagcgggagtgcgagcgcggagccgcctgcttctcccagatatgtactttcccaagggggcgaccgcattcctcaagacagccaatacttttttggaaaagcttttttctcctgccccccttcctcctctcctccctccgccccgtgccccctccccgctcctcccgcgggggccgctcgcccattcgctgccggccgccggcctcccagttgacggtggatatgactatatatggggacccgagccgccgaggcggcggccggagaggccgccctgtttctaaacctgcgcgccagggagagggcgttggggccgagccggggccgaggcgcaaccctccgccctccgcgtgcccttctcccagggccggcacccagccattagggtccccaaccgagcccgccctgagctgccggaggccgggagagcgcggaccaggtggtggatgcgcgtcgcccccctgtgccgtcccccggcgcgcttagccaaaggcccgggggcttcccagccgtgctgcaccccgcgtcagggtcagtgcgctctcggcacccgccagcgcctccccggcagctctcagccagccaggtgtcatcctgcgcgctcacgctctggaaactcaactgcagcagagaaagggagaacgtgggagaaagcctggggcggctcttgagactttctctgcgggcgcgggtcagagaggcagggggcggcacagcgacagcacacggagtcttgttttctgcctgccctttcccccagcggagggacagtcaaatactttagggacacaggactcagtggcgtacttctgtgcttgctgtgcagtgcctccaaaaaggtgtgcatgtgtgcgtgtgtgtgcgggtggcagtctaaggggaaagaacattgagtttagactcaggcaatttggtctgtggtctctactctgccaccagcaactgtgagaccttgtttgctgcccgcggcttcctcaactttaaatccagcgggtagataatccccgaggtccctccagatataacttgttatcatttttcttgcactgattttagggagtcggccttccatgttagatgcttaggtgccaggtttcggaaaacatgggatcggcgttaacctggctaagtcattgcatccgcagccgcaactctgaggaggctctgccgtgtgagctgtgcttggaaggaggaggatttcccccaacacttcttatttttaactactcctcccatctcccaagggggaaaggctgctttttttcagagcttcagtgggaggggaggagagggggctgcccccaagccctgagatcagctgaggcagggttggtgagggtcttgttaatagtccccacagaataattcacagtctgtactgcatggttaccaaatattccccggacggtatctgagcagattaggcaggccaaacaacttgtaagtccttcagagaatgatcaaattcctctccaagattttatcgggtttcttccactaacctaactgcccaggagggaaaagatacactgacctaatggtcagaacattagatctgaccattagcataggggctgcgtggcacagaaattgaccagagccctttaatcacggtgtgtcaacccagccaccggaacagtgacaaagttccaggcatgtggacgatatccagatgcgtggactccagggagctgactccccaggttggagctcagcagaggaggcaagaatagggagttaggagtcagttccagggatccagacctggcctggtcacttccttgcagtgtgaccttagccatgttacaatctctctaagccttttttctcacttataaaaagaggcaactgaactagagaaactccttgcgggaccacatgttactgacttttcttttcttactgtgccatatgtagccgagggactcattaaagtttccttaaatgaaatcatgctacaagcaatttattaaacacacggttgttgagtacctgctatatactaggcaggtactaggctctggaatccaaagaatgagtagcacaggtctatgtcctccaggtgtttggcatgagaaaggtgttaagaattcacacgaggaagaaatagaaatgactaggtca

SEQ ID NO: 1242495 - DNA, 4001 bp, Homo sapiens
gctctcctgcatagggtcacacatactctttcttagcagggtgaggagacctcagacttctaccactgataccactttaacccatcaaacatgcctaccagcccgcccacttcctcttcattcaagccccccgccccaacaaatgttgattaaaagcagtaaatgaagtgttttatgatgtcatgaaatgagcaggccatctttaagacctcttgctgggtggggaactgaaggtgaaggagcactgggctgccagggctgtgcagttttaatgacagcgggcacacagcacttacccttttgcgccaagcatcagtgtactgtctttacatagtaactcctttaaccgacaggtagatgctgttactatccacactttacacacagggaactgaaacacagagattaagtaacttgcccactgctagtaagtagtggagacaggattcaagttctgacagtctgggtccaaagttcttgtttttatccatcatattctatatagttctaatggttcaaggacagctactagcgagtaagggagtcggaattagtttaccacccagccaagttcagggatatccacaggacttttgctgactcgtcctataaagcaaatactgagaattatcttttgcctattaatttccttattcctgcttgtattttatctgaaactttctctagttgagctttcctctgaagaggaccatttcaggtcttgaagtttctgtggccagccatacagccatttacaaacacttaactagaacgatttactcaactcagaacaaccccgtatattaagcacagcaggacatcatactatcaattgtcataaaactcccaaggtgtttgtttcagtatcttcattaaaaacacacacacacaaaatcgacaaatatccaatactagactacctctgaaatcctgttcgtgtttgctggatacatttgccttagaagaaaggaaggaagccaggtattacatttaacaagggggaggggaagcccgcaagagaatacacccaataactgttgacatttcgccaactttttccaagacttggtaacaaagcattatctatctgtatgagagaaaaggggaggaggactgctgaaaaaagggacgggttaagggttttgcactatagtttagctcttccagcagaacgcggcgctgtcaagctgtcaatgtctgtctaccgcctcggagacacaggccgccgggaaaccacagggtcgacgggaacggcggagtgtagcatccccgggccccaagtccacagtgcctctcccacttgacctgtcggcgccccttctcaaagtacggatctccaagaggaaggacctcctccctctccactctcagagtaaagcaagccagcagcgcaaagtgcacctcccggggacgcacagacacgactgaaagccaccaccccagaaacagacccttcctgggaaaatgctccttccagaaccttctcaacaccacccgtttcccctgggagcgtttactttggatcagcgagatggaaaacaaaggctcaggagaacaggccgggcccctccccagagcccgccgccagctggcccaggtgcgccaggtgcgccctggaggcgtggggacgagggaccggggcctgcggggggggaagcaggagggccctgcggggctgccccgggaggatgcgcctctgggggctgcggggtgatgggtgtatcccttacggtctccctcagcttcctctcgtggtccagctcgcgctgcagggtgcccgcgcgctcctcagcggcgtccgcctgctcctgcaggctccggatcttcctgcgcaccgcctccagcgagctactccccgccatcgcgccggacggtaggcgggcgggagggctgcagtgggagaggccggctgctgccctgcggacccggctgccgcggctgtcctggctgcccagcgccggtccgccccgcccaggcctctctgtgcgatggcggcgccccctgcggccaggagcagtccggaagtcgcagcctccagggctgcgcagacaaaccgcaggcgggcgcgcgcggctgggaggggcgcgcgccgtggatcccgggactggctgggggcactgcgcatgctcgcggcggcggggagaaaggcgctcccggcgcgctgcgggggtacctggtgagctgggcgctccgggaggccactgcactagggctctggcttccacttctagggcccctccgcggcgcggtggtgacccggggtaacggagctggctgctaagggcaatagcgactcctgctggccgcgggagcgctccgctcccgagtccagattcccatgcccgggagccagagaagctgagcggcgggtctggagccggaatatgccctaaagggcctgatcccaaccgcaagattataacccaagcactacccccattccccaaaacttcacgaagtgaaaaccacccgcgtgtagagcacagtggttagacctcctgttctaaatgcagttttcctaggttgactctggctcctagtttcctgctgcgtgacttcggacacattacctgtcttctctgggcgtcatctgtaaaagtgggaataataatagtactttccccatggggctgctatgagaattatgaaggactgtaaagcgcttagcacaataccttgtacatagttaaaaactcaaatgatagctacgattaagaaatacacaagcattgttttaagagtcaggctgaggcccataatcagctgtgtaatctcaggccagcctccctggggctcactttccatgaaaacagtcatccaaatggtctcttctctttacagccttctttggtgtcagaccagcctctgagatctcctggaatccagtcagtcctgggctggactgggatgcctttaaaaggcaccccaaggaaagccacagaaccctatgagagagcctctggctacaggtggagaaaaccaccgcagatacagtctccaccgatttcccccttgagctgtattcttaaatgccttctaagtctcagggctttttctcctcaggtttgtcacagaaagctcttaaagccagctcccttatgtgtgggaataataaagaaaacatgcttgacaaccctctcctcctccaagccctaacaaggaacttttgctttcctgcctcattttctgtggagttcctcacagcctctgctgagactctcacaaatcccagcttgggtccttgcatcctgtaggtgggagcttctcgctttgtttccccgcggttcatctggtcaggtggggaggttacagctggtcccctaagtgcagagactgtgggcctccaacattgagaatgggggaaccgggtgtctggcaacctccaggagcagccaggaaactgctggacactggcaagtgccataagcagccaactagtgacttaatgtcctgggaaggtcagtttcaggtgagttcattttcatgccgatgtcattatacaagagtttaggagagttttctcatccttgtctgtaggttggaatcacttgggtattttttaaatgctgccgcctgggttgcatccccagggattctgatttaactggctttgggtgcatcctaactttgggttttaaaagctccctaagtgattatgtttagagaaggttgagaatccctaagttaagaagtaaagacctacaaagggataaagactcatatgctataaatatcagatatatcacagttactggggaagagattgggggccagaaaaaaatggagtcttcgatccccttcagcctcacttttgacttaggtggaaagacaacacaaaattcgaaacaagaccatcagggatactactcctgaatgacaatcttctaagctaggtagagcccacttccagaataggatttgtaaagtagtagaaaaatgtttttagtaataatagtagaaaaatgtaaaagtgttttacactggtgaataatgacaatgaa

SEQ ID NO: 1242496 - DNA, 4001 bp, Homo sapiens
atggcccaggcctgtaatcttagcctcactttgggaggctgaggcaggaggatcacctgaggtcaggagttggagacaagcctgggtaacatggtgagacctcatctctactaaaaaaaaaaataataatacaaaaattagccaggcgtggtggtgcgtccctgcagtcccagctatttgggatgctgaggcatgagaatcacttgaaccctggaagcggaggttgcagtgagctgagatggtgccactgcactccagcctgagcaagagagtgagactctgtcctaaaaaaaaaaaaaaaaaaaaaagaaagaaagaaagtatgtatcttcctccttcagttcactgtgcacattctcaaagagcagagaaaaggcaaagagctatgaagtccatggaagcttgcataagaaatccttaatttttaccagagatttttttttcctgagaagttttgtgttgtaaatttttgaaatcatagttaagatatctaaggagagttcatttgttgcttttcaacctttattccttcaaagtaatttttaaactttgatgggcagtttttatgaagaattaactttgagagcagaaaaatacagttcatccacagagacaaactatatagcacagccagcttaaacctaagagcaagacacactcctgcttcacgagtcaagccatttgcacataagaaggcaagattctgaactttctgacttcttggagcttcccagagttgaaagaaattttaagccatttaattcactcctttccaacctctgcctgaacatctgaagtaatgggaaactcactatcacacaaacaatttttttactattatggaaaagtgtctattttcactgacttggccttaaagtaataagaatatagtaggtttaggcaatagtgtttatttttgccctagaaattataaacaaaatgcttatagccctgtttgcttcaatagctaagcacagagatgagtagcagcaaacctaaaggtcctatgatagaggaaattagaaactgatcttaatgattaatataatgaaattaaactttataagaagtggaaactagtggaaatggatgataactcaggattcaagggcccctgaaaaacccttagtgagtttttcaagctttcatgtagtaaataaccattttcttttgtttgacaatcaggaaaacactaagttcagaagaacataacttcctttattttagctctgaagaggtcttaaaggaagaattcaattaaaaatgtttactatctaagtatcaactctgccttaaatataaaataatcaaatgtgaaggtattgtaagcaaaccaagttatacataataatttttaaatctaaaataaaatgattacattgataatgaaagtaaattgtatatagtatatagtttattttttctcaaaatgttttggtggatttcattactttcctaccagcttctctagtataaattatcagttattccaaggcttggagagagtatagtagctaccagctgtcacaagttaaatacttcccttcatgaatttccttttgtgctcctaaatccatatcctcttctatgatcctgttttccacactattcctagaagccctgctaagttaaaaaaaaaaagggtcactcacctccatgaagcttcagcccaccaaggggcagaggcaggcacttgaatcagagctcagcaggcccaggatggctgcagactgggagtcagggaccttttagttttcaaggaatgggctcagagcatgatggaagaaagaaaagttcaggagctggagagaagcagcaaggccagagtgaggtctggcagattccgtgacagtttgtcagttaactttgatcatcatttgcttaagagaaagagaaaccctcattagaataccctacctgcccaacttttcttttgtaggagacaagggcagctcatttagattcgagttagtggtctaatcttaaggttcatagctccccatttctggactaaggatgctctatgaaagaggaaatacacgtcagcagcagcctatattaagcctaactcatgaaaaataaccacctcacccctgttcatgatcccatcacaccatcaagacaccagctgagtggctttaatagagagctagttcacctctcatattccaatgaagcagccctgattttatctctgagacagtaacacaggcctgggaaacaccaggccctaagaaagcaggatgaaaaaagcttcatttcatacagctttcttcagcagttttagctcgcagagagatgtaccaacactgtgctcctgagtgacttataaagagccaccacagagccaaacagtttttcttacagtagttcctctaactcaatatgatttcttgcacgtctagctcctgcctagctgtccagacttaatgaccacagctctttccccagtgtttgggatcgcccaaatatgtcacgcttctgcagctttgtatatgttgtcccttcggatgggagtttcccttcccccacacccccgtcattatctctttactaaactcttccctaaccaccccctcatccccaaaccaagctttacccacttccctgtctcttgtagaagatattttgctggctctataccagaggttaccaacctcagccctattgatattttgggcctgctaagtcttacgttagaggggctgtcctgtgaattttaggatatttagcagtgtccctggcgtttacacactagatgcctgtagccaccccccccccaccaaacccagtcataacaaaaatgtctccagtcattgccaaatgtctcctgggggcaggggttggaatcactccccagttgagaaacacagctttactcccttccttccttccttccttccttccttccttccttccttctttccttccttccttccttccttccttctttcctctttctttttttctttctctttctttctttctctctctttctgttttctttctccctttctttctctctctgtttctttctctttcttcctttctttttcctctttctttctctcttgctctctttctttctttctccctttctttctctttctctttctttccttcttttcttttcttttttcttttctttctgacagggtctcactatgttgcctaggctgatctcaaatttctgagctcaagctgtcctcccacctcagcctcacaaagtgctaggattacaggtgtgagcaacaccacgcctggcctagttttacacatttctatagcaccctagatctttgtacacgtggctttaacagagtgtattctaattgtttgattgcatgtctgcccctccactaagttgtgaacaaaccacaggataggtagtactgtatcttgctcaccttggcaatacatggcatttgttagatcaaaacctttgtcagataaatgtctatgaaatgctggtgatcacttagtcaaaaaagtaattttgtttcatcttgattgtttttgttgttggctaaaacatttgacaatgcttagtatagctgattttactaaagccagcgcctgcacatttttgaacctttagcctaggggtaagagtactggcctagaagatggaagccttgtctctcaccaccagagcactgaatagccttagctaagacatttaactcctatgggtgtcagttcctccttctttaaaatgtgaattcctaagacccccttctgtctctagaagcctgtgattccaaatcctatgtagcaagaagtctcaatcttcacaaagagtacttcaagtctttttttcactatttaaaaacagtgtccaggcatggtggctcatgcctgtaatctcagcactttggggggccaaggtgggaggatcacctgagcccaggagttcaagaccagcctgggcaagatggcgagaccctgtccctacaaaaaatttaaaaattagccaggcatgttggcacgtgcctgtggtg

SEQ ID NO: 1242497 - DNA, 4001 bp, Homo sapiens
tgaacgtgggaggcggaggttgcagcgagctgagatcgcaccactgcactccagcctgggcaacagaatctgtctcaaaaaaaaaaaaaaaaaaaagtgaaaattttgaacttatattcgtaaaaaacacttttctgttttatatattgcaaagtttcattatttcatttgatagcattccactgctttaaaaaatgtttgaaaactactaaatacttaatctgactgcgttcaagcaagggtaaagccaaaccataagatttcgctgttttgttttgttgtctattctagtgttaaaaaaaatcctttatcttgttgtttactttttttatttctgtagagacagggtctcactatgttgcccagggtggtctccaactcccagtctcaagcaatcctcccacctctacctcccaaagtgctgggaataagggcttgagccatctcctagggcctcaaaaaaatccattaaaataacctacttgaactgtctccttgccaaaagtctattttctccgaaactcagaaactcatcttacttcctacaaaagccctagaacagcaatttaggtttcaacatcagtgaccaaggaatcaaatgaaggaacactttcagttcttcgatcaagtcccatttttgtagttttctcccctgcctgaacactttggaccgccacctctgtctattccttagttctcgggtgaaagttatcctttccaataaaccttccgagtttttcaaatcttaatgagaatcctttattttgtgctccaacaagccccttcatttccccaacctcagcactcatcaacgaaggggaacccaactgtcttgtctttgttaccccagcacctggcgtgtaacagcagcgcaacaaatgttcttcaatcagttgaaagtagatattaagtcatgtacaccatctccatttcataggagtcataaagcatgataagctctactaatgattaatcttataaatgaagaaaccagggtacagagagaaaaattaagttgtcctgggttctaaaacaggtaaacgacaacagaatatagaacctgagactccagagtcagaagctatttgtactctaccacgctgcttccacttaaattctaggtcctattgacacagctgaccctgttggctctactgacacaactcagattgggccgactaaaatgttcagagtatatctgggtgcggtggctcatgcctgtaatcccagcactttgggaggtcgaggcgggcggatcacttgagatcaggagctggagactagcctggccaacatggtgaaacactgactctactaaaaatttttaaaaattagccgggtgtggtggtgcgtgcctgtaatcccagctacttgggaggctcaggcaggtgaatcacctgaacccggaaggcggaggttgcagtgagccaagatcgcgccaccgcacgccagcctgggcgacagagactccgtctcaataataacaacaataataataaataaataaaagagtaaggggttcaaagttaggaaatacagtttgacctgccccttctctctagaaaggaaactggctcctgggacagccttgcatttctaattattacagattgggcgtcttcccaggaaaaaagcccgaccggcagactgtggagccggacaccctattccagaaactaaactacaaaggtggaggccaaaattcgacgcctacagactacagactgcagcccctttatcacatttctctcttaacttttcagtcctccccgcttcccggttcgctcaggcagtgcacatcccagagctccttccccgcttggacccgaactgttctcactgaatgatctcctcgctgacatccaggccgaaagtcttccgcaactgctgggtgcaccagtgcaccagcggctccccggacaccgccccagccaccgccatcttccccagccggaaccagctgagctgcaaaagccccacgtcctgcaccggactagttcccttcgcaacaccaacctctctcacgcgggttccgccagcttgcaccgccccgcaaggtcgcaccgcctccagtgcagatcccgcccatctgtgcgcctcctgcttcttcctgctttgttgtctacttccttgtgccctccggagtcgagctctgtcagtgcatgattcttgccaatcgctaaacgtaggactcgaggaaggccattggcaattctgctaagaagacagtgcaagtgcctataaaaacgacagtttagggggaaaacaaaccaatacccggaaagctgagaggccagctttttaatcgtcatggttttatgtaaaataaaacagcacgtggaaggtattgtaagcgctgtaagtttttgctctggtggtggttttaattttttaattaattaattaatttatttatttattttgagacggagtctcgcactgtcgcccaggcttgagtgcagtggcatgatctcggctcactgcaagctccgcctcccgggttcatgccattctcctgcctcagcctcccaagtagctgggactacaggcacccgccaccacgcccggctaattttttttgtatttttagtagcgacgcggtttcacgtgttaaccgggatggagtgtttatttttaataccccctgtagtcgactactagattcacaccgctaaaacttctattttattttttgagccatgtattttccaggagagccaagacaactcagcaagctcgagggtaaaaaacagtaaaacaggagttggaatttggctttgaggactttccacatgagttctcaaccaaaaatgacagtatttaagggctgtctgcaattccctaccccgctaagacaatgggctggggaaaatttagccaaacttttctggagatcataatgtcttcccattcatttctggctttttgttgcatttgcaggttaaaagttcttcatttctactagcctgtttagactaagtggtcacattaaattggcagctgttttacctttttgctagtgttttcattggcataaatattataattaaaatcatgagtgtattggccgggcgcagtgtctcatgcctgtaatcccagcgctttgggaggccgaggcgggaggatcacccgagcgcacacggagacacacacacaaacacacacacacacacacacacacacactgggcgtggtggctcatgcctgtaatgccagcactttgggaatcagaggcaagaggatcacttgagcccaggagttccggaccagtctgggcagcataaggagaatcctcatctctacaaaaatgaaaaaaattagcctggcatggtggcacatgcctgtagtctcagctacttgaaaggctgaggtgggaggatcacttgggcctggaaggtcaagcttgaagtgagccctgattgcactactgcactccagcctgggcgacagagcaaggcctttttacaaaaacaaaacaaaacctcataagtgtattgatttacattccatttagattgtcgtagatatcattaatttggaaagcagatgattttccagggtttttttttttaagaaaaagtcaaaatactctgtgaatgtttattaattgtgggtacaagttttgtttctttgtaaaactccactacatttaataataattgtaaggtatcaaagtcatttacctgtttatttattcagtccctgtgttagggttctccagagacagaaccaataggatagataacagatagatatagatacagatctatgaggagatttattagggaattggctcaggaaattatggagactgaaaagacccatgacaggccatctgcaagcaggagaccctggaatgctggtagctggctcagtccaagttgtgaaatcttcaagtctcaaggtggagggcctggagttctgatgtctgggagcagaagtctgagaagagtgtctcagctccagaaggaagaaatattttttctcaccttttttgttct

SEQ ID NO: 1242498 - DNA, 4001 bp, Homo sapiens
caaggcaccaaacatacagcagtacactgggcacaggtgaacaggtgacatcaaattcaagaacaacaaaagcctgttccttttcagagcttatcagcaagaacagtgtgggccagctttgtgctggggaggaggaggtcacgtggagccacctggcccgggctgcacggccagtggcatgtctcttgtttctgccaaatgcagcagtgcatttgcgaatgtgaacttacacaagaacatgggtatgtgctgtctctaaaaataatgctgactctcacacatgcgcacaaaagcagatatatgcgcctgtcccccactgagccccaaggatggatctttcccattttggaatggaggcgagctttaactctttattgttattattttttaaagagccttttattttttctatttgcattttcaggttcatgagatgtcagagacttgcaaacacctggttcaacatctgcttctgccccattttatggacggggagactgcagcctggtgagctgggtatggatgggaagcagttcccgcctagggctctgtttttagcccagataaataacctctctgagtgtggtcacctggctcacactgcttcagcggctccgttcccagctctggggtactggtgggcatgtcgtgggtgctcagtaagtgccagctggggggctgtatcctccccagcccacacaagggctgcacctactgccgctctgccagctcccttgctgcctccccccacccttctgtgcacaatgggcagccccctggaagaagcagagatccccactgagccctcagggcatgcaagtggtgtccagaggcttccggtgtggtctgggcttgcctcccactgcatgcgaggggcagtcagggagttagggtgaggtggtggcctgcccagtctccttgggctcaagtggtcctttaaggcagccctgggtgctcagttcccaggctggctcagagtcacctaggaaaagcacacctaagattcaaatcagcatgtgctgtgggaggtcctgtctggggttcctgggagaggccgttccccacagctggtgcctagtcctgggagcctcttgccctcccaggttctcacttagggcccctctggccctccctcctgttagatgctgctgcctgctttcctctgccagaccccatcccctaagggcgaggcccaagcctgagtcatccctgggtccccatggcccacacaaacatctgatgcagaacagagggtgagcttgagtccagcagagagaactaaggggcaccaccctcgtggggaaagcaagagatgcaaaactccgcaactgctgactctggaatggtgaaaggatttgtgccactcagacgcctcccgggtttgccacagccactcgaaggtgggagcaactgagaccacaggcgttggacaccgtggcaggaaacatagggcaccttctgagaagggaccctgacgtgagagctctgaacaccccatgccccatgcccacccagcacagtttgggaggacaggacccgctgggccagcactctgagatgacagagctggagaccagtgtccctctgcccttccgcccagctgcccgcaggccactggcaaagctcactcaccttctgcgaccctgatgtggagctcttgagcgagccccgcttgaaggagctcatctctctcagtgagcctgtgagccaccctgctgactccctcgggtggccaggccagtggcacaggggctgccctccctgggtgggcaggagcggagccacacactcggcggcagccccacactcggcggcagccccacgcactgggcgagggggccgagatcctggggcgaggccggccggaggctggttcagcctaggaggagcatgtgctggcttttggtggcccctcctgcccgactcctgctaccacccccaacatctgtaatcaggcttaatccctccatccccaaaaggtttagagggaagagatttagcaaatggagattgaaagtaaatctactttgagaaagtggtggctgcaaagggtggtcaaatgggaaggatttgggcgtctggaaaggcgcattgcgagggcagacagccccttgctgctggcatctgaggccccttggagggtggcatccagatcccagaggcccggtgcccacctggccaaccgcctgagtctcagagaagaatttgcatccaggcccaggctgtgggtctcagctctctccttggagctgccagtgcgcattttcgccccgttaatctggcagcgacacagcaagccttcttctgaagatcctgtggccggtggcccgtctgttctgtgctgctctgtgtgtggggctctctgtgtcatttctgatttcaggggtgcctgtcttgcccctcttaaaggcagatggggtcatgggtctttgcagcacaagcctggcctgaagtgtaccacccttgctgccgaccctcctctgtctcttacaggcacatgcatgtcacctcccacatgcaagggaacagactggagctcagagagaacaggccatgtattcccatcgtcttagatagatttttatctaaggaccagcaagctgaaaataaaataatagaaggctgtggagccctcatagctgtgaggccaggacccaccacctcctctgggaggcctgtcggctgtggaagtttggagggtggaggcatgacctccacctcttggggtctggcttacaaccaacacatctcttatggtgcggggccggccctctgttcccctctatctctcacacccctgaagtgaattcaactgatatattttgagctggtactatgggccacatattgtatacatcaagtgctagggatacatctgggaacagcaggggagagtccctgccttcctggaactgaccttatcatggggaggcagatgcctcgagcaataaactatatagcatgccagagggtgtaagagccaggcagggaaagaaagcagagagaaaggccgggctgggggcggtggcaattttaaataggaaaggtctctgaggaccatcctggctaacacggtgaaaccccgtctgtactaaaaaacaaaaaattagccaggcgtggtggcgggcacctgtagtcccagctactcgggaagctgaggcaggagaatggcgtaaacccgggaggcggagcttgcagtgagccgagatcgtgccactgcactccagcctgggtgacagagtgagactccgtctcaaaaaaaaaaaaaaagaaaaaggaaaggtctctgagaagatggcttttgaacagagactgggagcaggtggctggtgaaggagcccactgggcagggatgtgggaggaggatttccaggcagaggcagcagccaaaggccttgactctggagcctggctgacatattcaaggaagaccaagaaggcacaggcggctgggagaggggatgcagggatgagggcagctgcagaggcaatagtgcaggacctgggagccattctaagcaccttggggttcgtttctgattatgatctgatgtgcagtttgaagggaccaccgtggttcttaaggtgcactagccagcgggtccagggctgcagtgggaaccttgacaacctggaacagggtggggccagaggagtgatgggtggaggtctgactcttgagagtgttggagggtggagtcaagaggatgtgcaggagggtcagatgtgggatgtgtgaggaggacagacatcaggaagctgcaaggctttgggccgggactgcccgaaagatggggtcacctgaggtgacatggagaaggctgtggatggggtgggcttgggggaggggccacgccttctgtgttgctaaacataatggctttttccagtcctaattttctgaggcctcgcagaggattggatgcagccgatgcctcatcctcaggccgtcccagtttgcctccttgtcctcaggcaaatcctcagcaccctgcgtggtc

SEQ ID NO: 1242499 - DNA, 4001 bp, Homo sapiens
tatttccaattacattttctgggggaggagggctaaaaaatacactgcagagaatagacaatttatgctataaatataattgcaaatgccatgaattaaaactgctgctggatagttcaaaacaatggtgttttgagaacctgaccaaaggcagtctttcccagaatcagtcccgtattcatcaagtgcactcatagagaggcagggctccgttcttaattcctccctaaatatctgattcagacagagaaaatgtgtctcatcttccttccccattctcagttcctatcccttgtcaacgcaaacacaatttatgcaaatattctttctttgtttctttcttctttctttctttccttctttttttttttttgatggagtctcactctgtcgcccaggctggagtgcagtggcgcagtctcggctcactgcaacctccacctcctgggttcaacctctcctgcctcagcctctcgagtagctgggactacaggcgcgcactaccatgcccagctaatttttgtatttttagtagagacagggtttcaccatgttggctaggatggtctctatctcttgacctcgtgatctgcctgcctcagcctcccgaagtgctgggattacagccatgagccatcgcgcctggccctgcaaatattttcattcctccctacctcccccactacttttgctaatttttgctaaggtttaaaaaaacatacacattgtatacatgcaccaaaaaatcacatgtacccccacaatatgcacaactatgatgtactaataaaaagtacaaaagatatattttctgggaaaaaaaggaaaattaatttgtgatagaaaatgattaaagaagacaaaaaatgtagaaatgtacaaaagaataaataaacaccacccataaggcctccatcctaaaacaactgatatttccttgtatttctaggctttttccgtgaatagattagacaggtgcatgtgtgtgtaatgaaaaacacaataattctgtacggttattatgcctttttctctgtcattttaaaagtgactgcgtgatgtttcatcctatggacagaccatgattgatgtgtccagccctctgcttctgggcgtttgggttgtttgctgtgcttcccggtagcacacaaagctgtgtcaatgttggcatcccttcaggattcgctcctcaggatgggttcctaggtgtggacttgcagggctttgctgcatgttgttgaactgccttccagaaaccagtttgcactgctcccagcagtgagagggagcagtaatctcccctcctgatcctgttccgtgtaaccaatctcttccccaaggctttcacaggtgaaatatcagctgataaaggcttacaagtataaaccctgtctctcctagaacttcagcattttctggggttctaaggaaggtgcaccttttccctgaagcaaagtaagatgctaaggaatgacaggcaagaggttgaggcctggagccggggctcctgagcagatccctggcacctggatttagaagctggccctgagggaagctcagagggtttcagcctctttgagaccagctgacagagtacttatcccctctgtgaatcaacctggtgggtcccttctgctgagacagcctcttggaacccaggctgaacacaggttcaccagctgctccatagggtcctgtccagccagcctcaagaggagatgagtaacaggccccagaaagcacacctgagcttgcctgcacctgctcttacttgcacctgagcctacctgcacctgaggttaccaacacctgagcttaactgcatctgtggttatctgcacctgagtttgtccacgcttgagtttacccacacctgaggatacctgcacctgacctcccttcacctgtgcttacccgcatctgagcttacctgccacagcagtggaatggagagggcacagctcaggctctttcagcctcctccttggccagggcagggagctgggtgaggagggcccaccctttaagaggagcagtccccatgaggagcatgtgagcacttgggcctgggccctcatgattgctgtgaagcgatggccccatgacctgactcccaggccagaaaaggaagccagggccccaagcttccaggctgttctgtgtggaatcccacaaaggcagccttaggatgtgagagaggtaggggagctagagcttttcctttgaagtggccccgccatggccccctcccacccagccgcccttccctggctggaaatgtcagcagggtttgcataattgagacaattggacataatggttctttcagaatcccctcatcagctgggcagtgttcgtgccccggggagctgggagaaggcggcacatggcactaattactgctaatccttcctcatctaagttgggcctgaggtcagggtgaacccagctgcaaatgcagtgtgagccccacatgactctcagccccttctgagtgcttctaatccctgctctccccccttcaccaggagcttgcctgcttggcatccacagtcacctgaaaaccaccacggtgggagctctgttggatttgctgtaacagtatgcgtggttattccagctttccatgagctttctcagcccaggaggaaagaaaaaacccaaaccctgaactatccctctctgcagaggggctgggtcttccccagcatctgaggctcttgggcattgtccgcctcccgcttctcacagaggagcagacagattggacgtaagggcaattaggggtgttcccattttacagatgaggactctgagtcatgtgagagggtggcttgcccagagagcaggtggggtggagtgggagtgcccaggttgtcaagttctgcccatatgtagagtcctgaagctggaggctgggctcactcccccacccaatgcctggcagacagcctggggctcagggaatctctgaacttctgacggaagcacatgtgccaggccattttctgggtctgtctttgctttcattcgtttctctcagggtctgtcaccgcagagtgggcgtgcaaagggtctggtgagtggctcccacgtgctttgctggagcgcgcacagcccctgggcgcacaatgaccgcagcagcctccctggcctggctcccgagtcttctttcttgaactggtgttggctcctgaggcctgagagagtcacggcttcagcgggaacccttccgggggctgagggagggtgctacgtggccggaattctgaaggcacagtcagggcaatccggggcatctgaaatcagtctgggagcagtggggaaagaccacatggggaagtgagctgatggccggcactgccatggctgggaggtgtggaggctctgtggtcagcaccaatggccagcccgaccggctgccagtcagtggctctccaggcagtgggcccttcactagacaaataagctctttttcaggttcagataagatggaaacaatgggagccccatccttccccaagagaacacccctcctccccagggtccatgcagtgtggcctgcaactgggagctgagatgtctcacacagtggccacaggccacgcgtggctatggagtgctggaaacagagccagtcagaattgagatatgctccgaatgtaaaatatacacgggattgccaagacttgtgataataatcgattgcacattgaaatatttagaacatgttgggttgaatagaatgttattaatttttttcacctgcttctatttacttttcaaaactgactactagaaaattttaaattggcccagctcacgcctgcaattccagcactttgggaggctgaggcaggtggatcacctgaggtcaggagttcgagaccagcctggccaacatggtgaaacctcatctctactaaaaatataaaaaataaccggccatggtggtgggtgcctgtaatcccagctactcgggaggctgaggcaggagaatc

SEQ ID NO: 1242500 - DNA, 4001 bp, Homo sapiens
agactgaaagagttaccgaccaaatgctatgtgcagaattctttgtaacctgattctaacaaatcaactgactaaaacatgagacaatcagggaaatatgctgaatatttaatgatactaagcaattattaatttttaggcatgataataatattgtggttatgttaaaaagtccttgtctttttagacataaacacaataaagtatccataaatgacatttgtctgggatttgctttaaaattatcccattgaggaatgatagaagaaataaaattcacatggttgaagctgttgaaactggccaatgggtatatggtagttcattctacaatgtatctttgcaagtttgaaatctcccatgttggcctggcgcggtggctcacgcctgtaatcccaggactttggggggctgaggcgggcggatcacctgaggtcaggaattaagagacgagcctgccaaacatggtgaaaccccgtctctactaaaaatgcaaaaattagccgggcatggtggctacagtcccagctactcgggagcctgaggcaggagaatcgcctgaatcccggaggcggatgttgcagtgagcggagatcgcgccacttcactccagcctgggcgacagagtgagaccctgtctcaaaacaaacaaacaaaaaagaataaggtggaaaatagtgaaagacacattatttattcaaagtattactacatttgtgttataagtaaaactcttattttagttttgtatggcacttgaattagcgtccagtgaaaagcaaacttgccagactccagcagagggagagttgtttgcataaagcctatcaaattcaagtactgaccaaaaatacctactttgctcttcatgtccctgatgtaaatgactttcttaagaaatcttcaaaattggttcctgatatccaaaaataaaaagctctatcggaagctgcaatgcaccgcctccctctctccattccgcacctttcggtttaaaacacgatcaactgttctctggggcaagggatgcggtagttcgacttaaatcctgactgacagtacattgtcttggtccccacagaagcctccccccacccaccaaaatccttaattcttgctaaagaaaaaagatctaccatcaatattgtcaaatccctcccttttggttccaaaaaggaaatgtacctgtagagtatccgctgcacagcaaacaaggcactgctccaaacccgtgtcctctaccccctttttgcacccttctagccctccctcccttttttccatgtaaaacttgagcagagcatttggttcccttatctgccagcaactggcgccaggaggaccgtgctcccaggagatgcggagcttgtaggctgagccctgcgtcgggcgcgctgaggccgctcagctgagcccagccaggtagtcccgggctcgcgcctctgccgcctggagaggccctcgctgggagccgagtctcggctcaggggattcccgcgaagaggtgtcgcctctaacttgctacctgctcccgcccctcaccccagaacgaactgcacacccgtcccgagaggacaaatccggaagcctcaaggcaattcgagggtccttcgccgcatggaacgcggctccccacacacttgcctgccaagtctctcctttaccgcccgcaaccccagaaccattccccgcccgggcctgcgtgggtccagtaccattctcctcacggggcggactccggaagggcagcaactccacctcctcctcctccgcggcctgtagccatctatcgggaagcgtctccggaggcggcagcagaggccgccggacaaggaacgcccagggaaaccttctcagaactaactcagctccggcgctagcagcagaagccgagtctttcataattgtgcgaccaactcctccgggtgactggccacagggacgcgcccgcgcccgcctccgccggcgacggggctggggacggaccacgtgagcggcgcggcgcggcgcgtgcgtcgccgcccgcgggtcgggtcacgtgaagggcgcgcgctccctcgattccaggccgcctccctgcgcgccgcgcgcacgcgctgggcaggttcgcgccgccacgccgaccgcctctgggttcccagaaagtggtggggtgttcacgccgtatctccgttgggtacctaggcgggacttagacaaacttcagcctcagctacgagagtggaacttggggaatcggaggttgagggttaaggttcaaggcttgcggatccagtctggagttgctgtgtgggctcattccgctaactaggcctggcctgtgccgactcgctccagcaaactcgagtgtcgcaacacactctgtgtgcttcagagcgagtagaggctttaaatgttactctctcctcgtccaaaatgcagaatcatctttttaccccaatcatgttctttctctagcctctcctgttgctgccggtaaatattcttctttgtttaactatgggactgtctttttccctccagagatactcacccacatacacgcatacaccacaccttctgcaccaaaaactgggttgttcccttgatgtaatatgtacctatccacctttccatttattttgctgtcacacatgccaaggtttggctattagcaatggtttactaaatgttattccttatctactgggaagaccacaatcagtttaattttcttaaaactgctttaacatctttctgctcctgaagtcttcgagagttcctcaatctgaccctcagggatctgactgtcttatctcttttttaaaaacgactttattttaaaataattgacatgacaaactgcacgtatttaaatgtccaatttgataagttttgacatacctgtgcacccatgaaatcaccataatcaaatgaacgtattcacctctaagtttcctccccccccttcataatcccttcatctcgtccctctccatcacgtcccttatcaactacagatctactttcagtacagataagtttgcacatgctaaagttttatatacgggaatcatacagcacgcaccttttttttccgtctaacttctttcattcagcataattattgcctctcaaacattatgacccacaattcactgaagtaggatcttctctcagaaaaaaaactaatccacccactggttcccccagcttgtgaacaatcttcaggtattgtgtatttcttccccatctggcaggtccagcagaaccaagacttaaaaatgttttaatatatgtgtcacactaaattgtcagccttggggaaggcatcttgactaatttatgcatgcagtcaataaatgtttatcttctggatttcagttgggcctacacatttcctgcctgtagggagtttataatctagaaggtagaggcagacaaactggaaaatcaaaataaaatgagattagagtgctttgtttcgttagaactttgtaactctggtctttttgtactcacgaatgcttcgctccttagttggatggtgtagaaatgaaacaagatgagctccttggcacttgccagaactctttggtaaattggaaaatttagagttagaaatggggaacaggattgggtgggcgcggtggctcatgcttgtaatcccagcactttgggaggccgaggcgggtggatcacctgaggtcaggagttctagaccagcctggccaacacggtgaaaccccgtctctactaaaaatacaaaaattagctgggcatggtggcaggcgcctgtaatcacagctactcggggggccgaggcagaagaatcgcttgaacccaggaggcagaggttgcagtgagccgagatcgcgccatctcactccagcctgggggacaagagcaggacttcgtctcaaaaaaaaaaaaaaaaaaagaaaaagaaaagaaatggggaacaggatttatccttaattgaactaatcaaaataaattccttaattttcaagtgatcaacc

SEQ ID NO: 1242501 - DNA, 4001 bp, Homo sapiens
ttgtagaatacatttctctttatggaataaaaaatgttatggatgcataagtagcagtaggtatatagatacgtattaaattagcaaaagatgcccttataatggtcagattcacaaatcatgccacatctacaaagagaagactgatacgacttttgctaatggaactggttctatatgtgcatttcattcttcacaataaactcaagaaactgaaaaaataaaataaaataaataaataagcctgtaactcaaattaaagtataagaaacactgctctaattggaaaagaagaaatcacggaaatgccaatgtcgcctgggtgtttgccaacagctactacctcccagttaggactcttcacacacaaacgccccgaaggactctggcaatacaagtgtgtagcaagtgctttttaacatataaccatccttttatgagacagctgtcaggatatgaagttttatcccttgttggggggtcgggggaggaggaaaggattctttccagaacaggtgtgcgtatgcgtgggagggaggagctgaatggggaggaggaagaggcacagtatggttaaccggaatgttcaaggagtgctctggcgactgtggacagagcaatctgtccagggcactcaagtgtttaaggaaatgacaagttcagagaggcaaggtgatttgggaccagactgaggacttctgctccaagaccaggggaaggagttgaaccttattctaccgctgaagcttctgttttccttattttcagatcaagtgatgtgatagaggaaacgttttaaaagatttatccgggtgcaaagtccagatgggctggagggtggagagacggataggaacaacttaggttactataaaagtccctgatgagataaggacccaaactaagatgacataaacattcctttcaaagagggtgtaccccttaaaaattcataagccaccttttattgaaagtgaactcatcactttcaaaatcttgtgacatctccatcatatatttaaccaagagttataatctcacagtttggtcacccccatgaccaaaacaaatagaccgatgttcttggtcaatggattatttggctcctcgagttgaaacccttcattttctgggctggtgacagtcagccggttctccacacacaaagggcgttaagtggaacccccgccccggctccgcagcgtccccgcggatctgcccgcctcgggacggccactcgtctgcgaggccccgacaaagagcgcggaacctgagcctctggcgaagatcctatttcgagcccgacgtcctgctacagtctgcaataagcgctctccgtccagccggcgactccgggggggggagactggggcgcctggcacggagccagcccgcgtgggccgagcgcggaggcgccggctggaggccgtggagtccctgaaggcctcccctcgctgtcctccgcgcccaggctcccggcttggtccggcagggacctcgcgaagcggcctcacacccggccctcccctcgcctcagccgcctgagggcccgcgcgcggcccccgcgcgcccgcccaggcccaagcccggcccccacgggcgcctccgccgcggcctcgcccggccccgccgccggcccctcgctctgcccggccccgctcacccagaagatgaggttgagaaagaccagcacggtcttggaggaggtgatgccgcactggcccatggcgccggtggcccgcgaaggcccggcccggagagcggggctgcgctcaccgagagagcggcaatggcggcggcgcctcctcgctaggaactgcacggcctgcgcggcgctccccgcagcccctgcgccgtcgcgcagccccgaccccagcaagtgcctcgctcctccgcgcagccgccgcagtcccctcagggctcccgcgccgctccctggcaaccgagtcccgccccacgcggccggtagcttcagccaatcgcctctgcggaggctgcagtgaggccacgcctcttaaaggagccaaggcctcagcgccttttcttggcctctggccgcccttggacgcagatggctccctagggaggttctggtggaccaaacccactctcctcctatgactatgccacccttatagatgattcagagccctctgagtgctatctttctacctagcccattctcccctaggaaggttggagacactaatctctgcctgaccagattctcctgaccaggttaaaatcttggcagcactgttggtgagaagtgcaaagaaaaacaacaaatacttatggagaaacttattgtaccaggcgctgggctagacctcagaagagtcagagaggagaaaaggctggtgatggcgttagcaaggcagagacatgtttgtgtgggtgagtggttgggaacaagttctattccagggtagtaagttttggaccaagattcgcaacgattacagaaacatctctttgcattgcaacatttcacattcttcccccaatcttgaatccgtcatagcaattaattattgggtgctcacccggtgccaggctccattagttcatttaacccccaccacaaccctggatggaaggcactatggttatcagcctcattttactgatcgggtaattgaggcttagaaaggttaagaagttcgcccagagccacacatagtaagtggtctagtgcaaaaaacacatcatcagtcacacaataaactgcctctgtttgctgtctttcctgccattataatcctgcactccctccttgaccgcgcccgtaaggatttccatttactggtctttatcagctcgctctcatgcaatctcccccactcatcacctttcccaggcactctcagaagtacctgttaatctcagcatcctgtgcatttacaccaagcagcagcaacagccatttattcactcatcaaacttgccgcgtgtcccctctgggcctcactgttgtcggtggtggatattccactgtgagcaagacgtatccttccttccatggcttacattcgttcgggcagaggaggcagaccataaacaaacgggcaagtgggtatatgacatgaggtagtgttaggaaacaattcagaggaaaggaatagagtgatgagaggagtcctctctgaggagagaacattggaggggacccaagggaggtgaggggaacagcccaaagatgagagcagcaaggacaaaggcccagagaccggaacatgatcactgtgctgtaggaaggggaacacagagagcctagtgtgctggaggtgagcgaggccggatcaccaacagcctactacgccaggcagaagcctttgagcagaccagtaacaccatctaagtgtttcaagtgccattcttgccataccatggaggtcctagttaaagaaagaaaaatgatgggctctcaaacatgattccctttgaacatctatcttcttgacgcctctgccctctgtaaatttctctgtctgctttgctctgagtgcttttcctccttttccaaaacatcccctttgcatttcttcatcctcatcgtgtcccttctcatttccctgtgaaggtctcatcaagtccttcttgtgccttctccttgagtgggtctcagaccccccccccccccacattacaatcatctgggccacacagacaaactccatcagattctctgggggcgagcctcagggaatcaggtgtttttcaaaaacacaccaggtgattcgaatatgctgttggggctgcaaaccacagttctgagtttacaagcatggtcatgcctctcctatcctaaaaagaaaagcctctcacttaaacaccatgttttactttttctttcttctcttagccaaagttcctaaaagagtcatctcatccagtgcttctcagactttgccttgcgcacagatcacctgaggatgcagactccaggtggtgggggtgcagctgggcccctctttgtagcaaggggctggacttctgcc

SEQ ID NO: 1242502 - DNA, 4001 bp, Homo sapiens
aagatacaacaatctaaagtcatatataatgcaatagagaatttactaaattatgtattaaccatagtacaagataatgagcaagatatattattctcagccccctaaccaatgtacaaatttgcatcaacttgatattatatattaaattaatgaagttatggactttaatttcttctgtgtctaaaactggaagagggaagaaagcatttcctaacattctatcataaaagaaaaatgttaagagaaactttcctttaaaaccatgcttcatatgtccccttcggtgtcttgataaaatgttatcatacaggaaaacataagcttctaaatcaaagatttccttcaatgttttcaatttgcatagatcacaatataacacacacattatttgaaacattttttgacttcagacaaatgcctcaagattaatcatattaagctatatttgtcatcattactgcttctttatttaaaaaaaaaaaggaaataaagcaagcaatacatagcattcaattcccttgataagttaaaatcatttcccccttctatccccaaatgaactttattctattccatttagccaaaggtacacagccaacacatctttgtgttatactgtggcaaatcagggtttagataccaatgcaactattatcaatggctcagaaccaaacattgttaacaaaacacactgagtggatcctccctctgcgtgtgtgtctacatgtgcccattcataacatgaccctcctacacacacagaaactcaatttctactgaattacaaaacatcttcacattattagaagtgtataataaaactgtcctctttaatgttcaaagaaagaataatttctaaagcgatgagagagaagagttaataccaggattgctgctacccatcaactttaattcaaagcaaagtacaactcaatgtcatttttacctctactgtagcctcgacggatacaaaattaacttcgctgtagaataaagtatcctggcatcccaatggattatttacttctccgatttgacagaacatatacgtgagtcttttgtccctcccacagcatcccagggtgtcaacatcatctctgccacagcaaatgacgagcaaatccctcagatcattacttcagcaccctaagtacaagaaagtcgcggccttcactgtcgttacaacacagcaaacagattcagtagtcccatgttcctttccatgatagttggggaggcggggtgggaaataagcgctcagatttcctaggaatccttcgtgttcggtgctggtaccagaagtggcatgggtacaagtgatatgtgggtcacccacagagagagacgcagaacgaagcttcgtgaccctccaagttcagtgaagacacccaaagcctggggcaaaacgaggcggcagccttcggggaaatcgggcagaaccagaacgatctccgagatggagagtgacggggtctggcacgagccccgggcttgcagcgaactgaaagtccccggtacccctcccctcctcagcaggctcggtcactcggcgaggggtgcggccggaggagggggtcgagactgggggagggcggcgccctggggggtcggggggtgtgtcctacctgggccgtggcggacgcaggggtttctggaggagggctctggtccagctcaggaccgggaccggcgggggttaaccctcggcaggcgggaccgccactgcctgcccatcccccaccgccgactgcggcgggacccgagcgcggcttccagggccggccggctgggtagtcccctggggtaccgtccgcgtttactggcggcggcggcggcggctgctgctgctgttactgctgctgccggctcccccaagccgctgctcttgtgccagcacctgctccccctcctgccgccgccgccgcctcgtccccaccgctcccatcgccgctgcggcgactactgcagagcccgctgacccgacccgacgttattctcccccctcgtaacccgacacagcctagcccacctgccctgccagcgcgcacgcccacctctccgctacaggtgctgattggagagtgcgttccgaactcgcagcgtcggttggctagtcccattgcctatcacgaagggggcggagagtcgggcagaaaccgtctccgccccccaccggagaattgccgctatcttcaggtttgcctgagagggcgagttaccgggaaaggagcatcacaatggcagcgcgcatgcgcctaggaattctgggcctcgtagttccagccatagccgcaactccccgcctgtcccgaggagagaagtagggcttccgagacaagtagtttgcgcacataggtgttctcctagcgtgacagttaaattggttatagagggatggttgggaccccatggttgggcttttcggaataaaatcggaaatgctttgtcacgatacgaaattacacactgaggcagtcgcgatgaagggcccaaatcgtgaggccctgcaagccttaaggatccatcctcttcctcagcatcagcgctgacagcatcccgcaaattggcgccgtccccagaaccgcctaacgtgaagctaatcatctttgggggactggggaagggccttaggtgtgacgaggaaaggagatgggcacttccataaacgaatgtcaacttggagaccggagtgtccttacggtttcacaacccaagaacaagatttcattccctttgtgaaacaccaccagctaaagactcaatggccagccccggtgcacaccagtatgcgatgctgagcaagtgtatgcgggaggtgctcaaagactttcaaagaaaagcgaggagggcggagcaaggacgctgtgcaggatgcgtttctatttagtgttgtgtcagtcgctttggcgaaggaaaaccttaagattaagcacctctcccatctttgcccaccagtgtacagtagagaaaacacatgaaaaacgctaaacagctttcctaaggctataaactaatcagtggcaaaaccaaaactcaggtctctcatacgccccacatctaatgtcctttctacttaagaatcacaatgatccccagggttctgccatgaatggaaagaatgtaatgaattatgaacttcatttttactttaaatccttttcttcactcaagtgacattgtcattaaagctgattaagaatatagaaaggtaaatgactaatcctatattcaatcttggaactgttcctatagaatctgtttcttcttgctcaggaagtgccacagcctcttgccattctttttaaaaacagcaggcatctctactctctgtcatgtccagatccttggattgaaagcaggacaaaatgtacattaaaggcaagtgatgatgcagctcatcttgttctatgcaaacataaagatgttgccaaattgttttttatttctactgattaaaaccacacgttactttttctattactatgtctaatagagtacttcattcatttcagagtattgaccaatcacataatttgaataagaaaacattagggtttctgtaaatatttttctttaaaattaaagaagtttataggggccaggcacagtggctaatgcctgcaatcccagcactttgagaggctgatgtgggaggatcacttcagtccaggagttcaagaccaaactgggcaatgtaaggagacataaggagactccttctgcacacacacacacacacacacaaaatgatcacggaagcatggatttaaaattttttttaattagccgggcatggtggcatgcccctgtagtctcagctattcgggaggctgaggcaggaggatcggttgagcccaggagttcaagaccagcctgggcaacataacaagaccttgtctctacacacaaaaaatttttagttagccagccctgtctctactaaaaatacaaaaattagccaggtgtggtggcatgcacctgtagtcccagccacttgg

SEQ ID NO: 1242503 - DNA, 4001 bp, Homo sapiens
gtgtaattccacttacatgcccagaaaaggtaaatttatagacagaaagttttttagtgattggggctggggataggaaaccaggacttgcctgcaaatgggcacaaagtatttttttaggatgatgaaaattttctaaattttctaggatgatgaaaattttctaaattttctaggatgatgaaaattttctaaattttctaggatgatgaaaattttctaaaattggaatgtggtgatggttgtgattttctaaaacaatcattgagttatatccttaagacaaatgaactttataatatataaattatacttcattaaagctgttaaaaatagctatgaaaccacaacgcagttttatgtgtaattctggtttttatacatattatgacaagacttttataaagacggggcaaccatgactccccaagacagtgtggcagcggtccccaaaaatcttaaagaagtaaactcaatgctttcgaagactacaaagaagtgcatcaaaatttatattattcaacaatgataaggtaaatgtattcgggtaagaagcatggttactaacctgtgtgccagtatttacacagcatggggccccttagcttctggtctctgctctggtctagccatcttaaattccactgtcagttttattgtcttcaaatattactttcataaggggtgcctcctgttccaaacacaggacccaaacccctgattttgggaattccggctctttatatttctcatgctgctttttaaaatttgtaaccaaagtttccaaatgaaccttctgccgcagtcagaaccaactcttcctcaggctgcatgtatttgctaacaactcactcactagtagggatgccacttcccttatttttctctctgaaattctgcccattgctcaggcccaaattgagtcttacccatactgtgaagccttctctgaataattcatctcacattgagctgagctcctgaagcacctgtgctctacaacagtcatccgggcattaagaactgttcagaagttttagtttaaatgttctgagcctcatttgtccctgctcttgaggggctggattttattactttatattcccctatatggattaacacaggcaacttaagaaatagtcatgttcatcaacgtttccttgataaattcttttgtatttgttttaattaaaaatgtcatttttgaaatatgattgctggatttttttgagaatttacccttacatgctgattctgcttcaggtatctgtagtatgttttgttcagccattagcagatctgtccctggaatccctaatccacaaatatacacaaaatttgggttcaagcaactctattttctcctatatcttttaatagatatattatctattatgccaggtatgacaatatataaacaaaaatatccatataaaaattacaatattactaaatgtccttctaaatccacacttaagcaacaataacgaagcacagtttcttaaagtagaaaatgatctatagttaatcttattatcttgcctcctttacctttcaaaaatccactgataatctgggcatgatgctttcaaacttcaccctaaagagaaaaatgctctctgaacactcttcttcctgctgtctttaaattgtgcctgtattttctctgcttttcctttgacactcaatcactcctttaaaacttgtaaaaaaccggaaaagtttctgtaactctccaatctccaactatgtcgtaaaatcccttgccagtttacccagtctgctggagaggctcaccgtttctttttcgagcgaattacacagttgtcttggcagcgtgatttgccctctggttcctgctttatcagtttggtgattctttgtacagattgataaccatgaaaaagtctaaagtagggcagttccggagcagccttttcccataaagcaagcgggtacctcacaaaactccaggcaaaagaatgaatgatagagcactcaccaatagcgagtggagaagagtattttgtcgaagtttgcaaaccaatctttgggagccagaggtgggaattttaaaatgaggtcttttccttggaattttcttaaagtggtatcgttgcctgttgatattgaagtttgtcaaagaacgtgaaatcaccagcttagaggatttttttcccctttaagagagacaaaacgtgcgaattgattctctacaaattgtgagaacttcaagagtggggtcataaagtattatcaaatataatcacttggtaacttttgtgtcaatgtggggaggaggtgaaggttattttaacatgattcatttttcatgatcaaatatcagatattaatcactgaaaaacagtattccccattaaaaaaaagaaatgaaaactaagaggctaacattgttttcaaaaaactgttctactgttaatcttttttcttttttggggggtgtaactcttcatatattagcagcaagtcttattatttgggctgaccattaaacaccgtatctttgtttttacacaaaatgtggatttcctcattttaagaccagcaaaaaatttctgagtgccacgaattcttaggtattccgaaactatcttagaaatacatgacatataccaaccatgctgtatacctgaatagctcttgaagaccagatttaatagataactgataatttttattataactcataccttgttttaaaaccaatgttttttatttaatataactctgctttctaggttattcgtctctatgaataattaagtcagcaactgtaaaaactacttcattataaagttaaagttccttgacaaggagcctcgcaaactcatagacaggctttccacagaacaaaaaatatcagcggttgtagtagaggattatactttaaaatcttcatttcagaaggaaatttgtcatattaatgagacactttaaaaagtgtcttttaaaaatgtttccgaactatgcttccaagtatttttaacagcataaagccctctttcatgctatttcgctgacataataattttcgtcttgaagaaatacatattgacggcctactcagtcaggctaggaagtgtcattgtatttaactctctaaattgttcctgacctttttagcaatctttactcaaaataaaccttgggtgtttgaagggcagagactaggttacgtcctcctcatctttgttatctaccagttcgtagtgaccccttaaatccggtgcttagactcactacttgctaaataacgttggcttcgttacataaacccactggcctgtttttcaacggtcagactggcgctgttagtccctgtgtcatgggattgctgtcaagggttcaacgagataatctataaacagctcttagaacgaacgctcaacgtgggatcattgttgtaatccctcaacgtgtgctctgaatgagaagccgagtgactgaatgaatgtatgaatgaaggaacaggtcagtaactggcggttcccgaagttggagccgactaaattaccccttcaagacgctaagcaaaagccactccgtcgacatcaaaccccacgccggagccggaagcaagagtagagccgcgggcggggccagcatagaggaagtagcgctctcggccaatacacagatcgcttggcaaacgagcattttcccgcgcctatcgtgaaagcgcgagaacacaggggattatcgcgaggttccgtgctcctctcccgctccctcttccccagctccctctggcgcgggttccgctccacccccggagccccgcccccgacgcccggcgctccgccccgccctcgcctggctccctgccccgccccgcccgccgtcccccgcttggcttccagcgccgcttgcgctccggagcgctggctctgctggcgctgaggtgagtagagctgtccgcctcgtcgggtgattcaagtggcgaggctctctgacccggccccccggcggggacgccccag

SEQ ID NO: 1242504 - DNA, 4001 bp, Homo sapiens
gaaaaatgctctctgaacactcttcttcctgctgtctttaaattgtgcctgtattttctctgcttttcctttgacactcaatcactcctttaaaacttgtaaaaaaccggaaaagtttctgtaactctccaatctccaactatgtcgtaaaatcccttgccagtttacccagtctgctggagaggctcaccgtttctttttcgagcgaattacacagttgtcttggcagcgtgatttgccctctggttcctgctttatcagtttggtgattctttgtacagattgataaccatgaaaaagtctaaagtagggcagttccggagcagccttttcccataaagcaagcgggtacctcacaaaactccaggcaaaagaatgaatgatagagcactcaccaatagcgagtggagaagagtattttgtcgaagtttgcaaaccaatctttgggagccagaggtgggaattttaaaatgaggtcttttccttggaattttcttaaagtggtatcgttgcctgttgatattgaagtttgtcaaagaacgtgaaatcaccagcttagaggatttttttcccctttaagagagacaaaacgtgcgaattgattctctacaaattgtgagaacttcaagagtggggtcataaagtattatcaaatataatcacttggtaacttttgtgtcaatgtggggaggaggtgaaggttattttaacatgattcatttttcatgatcaaatatcagatattaatcactgaaaaacagtattccccattaaaaaaaagaaatgaaaactaagaggctaacattgttttcaaaaaactgttctactgttaatcttttttcttttttggggggtgtaactcttcatatattagcagcaagtcttattatttgggctgaccattaaacaccgtatctttgtttttacacaaaatgtggatttcctcattttaagaccagcaaaaaatttctgagtgccacgaattcttaggtattccgaaactatcttagaaatacatgacatataccaaccatgctgtatacctgaatagctcttgaagaccagatttaatagataactgataatttttattataactcataccttgttttaaaaccaatgttttttatttaatataactctgctttctaggttattcgtctctatgaataattaagtcagcaactgtaaaaactacttcattataaagttaaagttccttgacaaggagcctcgcaaactcatagacaggctttccacagaacaaaaaatatcagcggttgtagtagaggattatactttaaaatcttcatttcagaaggaaatttgtcatattaatgagacactttaaaaagtgtcttttaaaaatgtttccgaactatgcttccaagtatttttaacagcataaagccctctttcatgctatttcgctgacataataattttcgtcttgaagaaatacatattgacggcctactcagtcaggctaggaagtgtcattgtatttaactctctaaattgttcctgacctttttagcaatctttactcaaaataaaccttgggtgtttgaagggcagagactaggttacgtcctcctcatctttgttatctaccagttcgtagtgaccccttaaatccggtgcttagactcactacttgctaaataacgttggcttcgttacataaacccactggcctgtttttcaacggtcagactggcgctgttagtccctgtgtcatgggattgctgtcaagggttcaacgagataatctataaacagctcttagaacgaacgctcaacgtgggatcattgttgtaatccctcaacgtgtgctctgaatgagaagccgagtgactgaatgaatgtatgaatgaaggaacaggtcagtaactggcggttcccgaagttggagccgactaaattaccccttcaagacgctaagcaaaagccactccgtcgacatcaaaccccacgccggagccggaagcaagagtagagccgcgggcggggccagcatagaggaagtagcgctctcggccaatacacagatcgcttggcaaacgagcattttcccgcgcctatcgtgaaagcgcgagaacacaggggattatcgcgaggttccgtgctcctctcccgctccctcttccccagctccctctggcgcgggttccgctccacccccggagccccgcccccgacgcccggcgctccgccccgccctcgcctggctccctgccccgccccgcccgccgtcccccgcttggcttccagcgccgcttgcgctccggagcgctggctctgctggcgctgaggtgagtagagctgtccgcctcgtcgggtgattcaagtggcgaggctctctgacccggccccccggcggggacgccccagacgtggtcctgccaaagcgtccgggtcgcggcgagtgggacagcggagccgtccgggcctcgggtggccacagctgccgggtcctcctcccactctgcggcccgcggcccctgggacccgagaaccctgataccgggtccgtgaaatccctgctgctgggctcgctgcttcccaactgtaacgatctcagtggctggctaactcgggcgaaacggcgtgtgttttgcctaagactctgccagtgtttgttaccacagctgagaaaatagccttttacaaatgcttttaatatgtagcttatagttctctaatctccagcgttaggaaattggaatgcgtattctactaaattgagtacggggaggtcagtataagggactccttcctttcaaaatactccttaatatgtgtggaattttgttgagaggtttttgatttttttgttttgtttttaataataagatagattggtgttcacctgtcagaaagctcgtgtgtaagtgcagctgtatacagctgatattaagtaatactatttgccttaactacataagaggtagtataactatacaagaggtagtttgcttaactaggtaagatgtagtcaagtgaaatggggtaagaaaattaccttgttaaaggctgtgtatggcccgtgaatgcatactgcaaaactgtgagcattgttgatgctttattgctattattggcagttttaggatttcatttgtttagattttatctcccaaacagcctttgtagcaattttaacagagtgtaatggtgtttttgaggcagccaatcccagccagaacattcagaaggaaagccgtcaggttacagggactgtcttattgaatcttccttcagtgagtgtggttttgcattatagggcggcggtgcacacgctttgtagtcagtccacctgcgatggaactatggcatgttaccctctgagaaactcagtttcctcctctacaaaacgggctacataatgtctattgcagtgcatggttgtaaagattagacatccttgtggcatgtagcaagcttataggctctatccgtggtcttgacatagttggatgaaaaatcaaccttgcaatgttcttccacatgtcatcagatattagaaggcctactttaaaattttaagtccctggatacatgtgcagaatatgccggtttgttacataggtaaacgtgtgccatggtgatttgctgcacctgtcaacccatcacctaggttttaggaagggttacttttagttactgtgctagatgcaggtatgcaagcgtgaagaaaacaacgcagtccctgccctcaggatttctaaataagtttcggaagggtttatttacaggctttttggctttattgacaatagacagatgcaacgataaatatttaagtgacaaattgtgaggagtcctacgaagaaaaaacaaacagccaagttcctctgaaagaacaccaggggaattactttgggatagggaagtgatttttttttttttaagactgagtctcgctctgtcgctcaggttggagtgcagtggtgcgatctcggtttactgcaagctccgcctcccggtttcaagagatt

SEQ ID NO: 1242505 - DNA, 4001 bp, Homo sapiens
tttactcaaatgtaaaagacactgctctgcagaaattatgtaatatttgccatctttgtcttcttttcttccatcaatacctaaacacctgctatgtggcagaaactgtgctaggtgctctgggtagatgaatgaagaagaccactggtcttcgctcccaggggcaatctatgcgggagaaaggctaaaaacaggtaacaacaatacattatgaattgtgacaaatcctacaagggaaataaacaagttgatggagaataatggcatcaggggaggatgcttaaagatgtgctcagagaaagtttttctgacaaagtgactttaaagctgagaccttgaggatgaaatggtagaaaatacatgattgagaatttttcataagaaagaaaggaagggaaaagatgaattacttgtggttgtctcccccaccccctccctagctatctttcctgtactgtgttatctcttcttattttggaccatcaggcacccacatacttcctaaatactgtcctcctatatgcctggcattgtactaagatctatggagaaaagtgaaacatcgaattagtcttcaaagacctacaggtgaaagataacaattcaaactccaccacacaaatcttcacctgtttttttcaaaaattcacctaaactcccaaactccaaatacatgttcataaataataacgaaaggaaactgtttgatttataggttttatagactaagaatgtactttttctgctcttccacagtctcctaagaatcggcatgtcttggtgatcagacggacctagatttcagtcttgccactactaggactggccagcataaagttttctgagcttcagtttgctcatttgttaactggtagaaacaatacctaagtggactaaattattgagagcattagataacattactggaagcagaagcaggtaaaagtagttcaaatactgaagccagacagacctggcttcaaaactaagctctgttaattactagctatgaccccgatagttatttaactattctaaacctagcttaatctgtaaaatggataaggtggttgtgaggattaaataagataatgcatacggaacatcatacattcctggttacacaaaggccccctaccaagtgctttacctagtgcagaaattttctggtaaaggagtaatgagggaaacaccacacgctctcgatttcatttatttccttcaacaaactttactgagcgcttaccatgtgtttgggagctgtgtatttggcccagtacttcaaaactcaaacaatgcacgtgtgaaaataaataggagaaagtgcctcccacacttctatatcattccccagcaactgtcagacacctggacctcaggccctttcctcgccccgccacaggtggggctcttcgaggtctgccctccgttttctagcctaggcccggcctctctaggtgtcgcatcagccttgaccctaaggggctgccctccagtcacctgtccagggatacgcccccagccctggaagccccgctcgctaggtccctcagcctactcccccaggcgctggctcaggtcccccctcctgcgctccctggttcccgcgctctgcgccggacagtacctgcaggccactccgcttgttccaggtgaaaatggacccagggtacccgctcagagccaagagcagttcgtggatcattcccacggcggacctcgagtccctggttatgtcaccccctcctccagcgcacctccaggcgaccacgaggggagtgcttccccttccacacgcgcaccggcccctgggtcgggcggtttgtgccgaatcaacccaccgagacaatcgctgcggcggagcggacgggaagctgggaaggggtcgcgggggagtcccggaagttcggcagctcaacggggtccaccagctactcccgcccgggctctgcggagactgagtcgcggtcgctgccctcgcgcatgcgccctcggtgccccgagccgcccgctcggacttccggtttgggagctgtacttgggaggctggagagccggggccggggccggggccggggccggggtcagggtcggaccccgagtgggtgaggctggcccggaggcaaggatgcgagggggttgaggggcagctcgagagggagacgctcccaggggtgggctggagggcgccctcagggcgccttagccgggtcagaggcctctggagggaccgcacgacggctccgggttacccggccggagggagcggagacaaaagaggccagaatcccgcagccgctgctccttgggctgagagctctgcgtccgcgaaccggcagcacctggagcctctggccgacacccgagcccgtcctcaggaagcccgttactactgctcctcggattccgtctctcctgcccaatgtgactctccccaagcccccatggtcctcgctttggagccaaaaccagcttctctccttgcgcgaggttttccgacaggtagctccctaatccttgctgagcggctactactacgcggggaaaacaaagacccgagattctggacgtgatttttgcctggggtgggctttgggagttgtgcagcccgagggggcggggcggacgcagaaggcctcgggaaggactgcggagatactgggggagatcagctgcgaccagctggacagaggctttttgttgccttcaagcaggatggtgacttgtctttagatcctctcgaactccagctctcctatatggttcggactcactgtgcaacattggccagggaagttaaatgggatcggatttggaggaggtgggagaggggcagacagtacttttattctctgctgcttcctggggctgccctggaagtcaaccagaaaagcagtttttgcaaagtctatttactgaagattgtgctaccttagaaggccactcggagcacatggaaaggcaggccagctctggcaagactttagacatatgaatgtattccttctgatagtgccatctttctctgccctaggaagaaacacctcttacagtcatctgcaggggattctccaaggacatgggaagatagatgtaagccctggaacccagactcctaagcgaagggaagctgcattctgctattaatgatggccaaatcagctctaagagagaatggcactaactctgagaccttccgacagcgtttcaggagattccattaccaggaggtggctgggccgcgggaggctttcagccaactctgggaactttgctgtcggtggctaaggccggaggtgcgcaccaaggagcagattgtagaactgttggtgctagagcagttcctgaccgtcttacctggggagatccagaattgggtacaggaacaatgtccagaaaatggagaggaggcagtgactctcgtggaagatttagaaagagagcctggaagacctagatcttcggtgagaagggagggggaattcaaattcaaaagtgtgatactgggtggagggctaaattaagatatagacaggcttaaagagggacacagtctcccttggtgaggcttatacttctggtctggtataggtaactttttcagatagtgcttgtctggagatgcttcctgggtgtaccttcacctaccctgtcataatgagtttttcctatagtttcttaatagggaagaaaggggatttttttttttcagcctgaaggtgggtttactattttgatcgtttccttctggagtttcaactgctttaagctaatggcaatggaataagacccttgttcgcgttaacctccctcacccctacaaccctggccatggctctgaaagatgatctcttttggggtattaaatactctcctctgggaatgcccctcattatgatcttgcagtgacaattaacgggggttgtttctaggtcacagtctctgtgaaggggcaggaagtgcgcttggagaagatgacacccccgaaatcatcacaagag

SEQ ID NO: 1242506 - DNA, 4001 bp, Homo sapiens
taacagtaaacaacatttacaaatatctacaactctgatgtgaaaacagtatgcgatttctactggtgataaagtcataggtaggctaatactgctatggtttgctgccttcattcataatagaaggagatgctacttttcagttagagaaaagtgagcttgctcagtgcaagctccgcctcctgggttcgcgccattctcctgcctcagcctcccaagtagctgggactacaggcgcctgccaccacgcccggctaattttttgtacttttagtagagaccgggtttcaccgtgttagccaggatagtctcgatctcctgacctcgtgatccacccacctcggcctcctaaagtgctgggattacaggcgtgagccaccgcgcccagtccacaattttcaagaatgtaaacatgaactattcatttttctgatggtttaaagcatcataaaattacagcacagcctatgcaactaatgtatatgtacatagcatagcctatgcaaaaaatgttttccattttttagtatcaaagcgagcaatctgtacttaaataaaattacactactgaaaaacacatgattctaggccagtaaatgggtgaatggaacaccactttacctattataatttagttcctgaaatctgtgaatgaaaatagtaacctccaacgtctctcccagctctaaaatgatgacaatctgcctactgtcatttagaaatattagtagaaaaataacttggatttcagcatttaagtttctgtattgtataacctatttcacacattgtttatttttataagttacacttaagaattcagtttattacttcagaaacttggcatggtttaaaagaatctgaaagccccgtattcctattataagccaactagacactttatggctatgatcattaaggtaactaagattacggattttgaaaaactgttcattattcaagaagatttttactgaaattaaacaggtagaatattaacattaacatttttttagtaataatttcattatgggtaatgactctaaaagtattaatttacatctcccataaagaaaaataggagatctcactttacgtaaatatctaaattctgtaagtctttaaaaattagttacaagagaaactgcattagaaattgtattaggtgactcagcgtgctacgtgccaggagctgtgcagagatgcagcattctagctggagtggaagtggaggagacagtaatgacaggttaaatcagtgtcatgacacgcgttttggaaaaaggagagcagggtgagagatcttacactgggctgaccagggagcaggagtcagtgagaatacaatctctttaatttaaaaaaaaaaaaaattataaacatggagttgctacgttgcccaagctggcctggagtcccgcctgggcctcccagagcgctggggttgcaggcgcgcgcgccggccggcaagaaacccagttcacgctttccccgtgacgatcaggacgcgtcccgggtaacacgccctgtggtgcgcagggcaccgcgccgagagcgctggccggcggggagcaggcggtggcagggcctgcgaaggctccctgaggccgcgcccgcctccgccccatgccctgccccagcgcgccccgaccccgggctgtgcgggacccacgcgcgggctccgggctgtggccgggaacccgcccgcgcgccgtgccccacacctgaagttggaccaggcgaagtttagggcgagctggaagttggggtctgcctcgtcctggaggccggcgacaccccggacgagctcccgcacgtcgcgctcctgctgcgcgtccaaccgactccacggtggcccgtgccgcgccatgttccgcgctcctgcagcgcgcgtctaacgaattggtgcctgtcgcgcgagagctcgggctcctgccgcagtcgcctccggagctggcggcattctcgcgagagttcgcgctcccgcgccgggcgacttccaagccgaccgctattctcgcgacagttcgagctccggctgtggagggtactgcctggcgctgtcccgtggtggggactggagtgcgcattttctggttgcccgacggtacgttttctactgtactcagagttagctggtgtcatcgtgaatcagatacataagggtctctggccggcctcggtgacagtcagtgattttgagagcagcccgttaggtgcccggtcagcaaatgcattgggacccgcctttccaggaaccctgaactgcttacctgctgaaccctcccggccctgcagcttctccctccagtgatggtctctgcggatttccgtgccccatccacacaacacagtcacgctacacacatccatgctacacaaccagcatcagcgaagcagctgtcccgacccgctagtagtgcctgctggcccttgcctcgcctgttcctcaggggcggcttgggggacttcatgaccccacctggccagaggtgctgagggggggaacttcataaatgtcacctggccagaggtggtgggggagatttcataaccccacctagccagaggtgctggggggacttcataaccacacctagccagaggtgccgggaggacttcataaccacacctggacagaggtgctggggggacatcataacctcacctgctcagaggtgctagggggtatcataatcccacctggccagaggtgctgtggggccatcataacccaacctggccagaggtgctggggggacatcttaacctcacctggccagaggtgctagggggatatcataatcccacctggccagagattctggggggacatcataaccccagctggccggaggtgccggggggcggggggaacttcataaccccacctggccagaggtgctggggggacatcataacctcacctggccagaggtgctagggggtatcataatcccacctggccagagatgctggggggccatcataaccccacctggccagaggtgctgtggggccatcataaccccacctggccggaggtgctggggggcggggggaacttcgtaaccccacctggccagaggtgctgggggtgacttcataaatgtcacctggccagaggtgctgggggggatttcataaccccacctgaccaggggtgctggggggacatcataacctcacctggccagaggtgctggggggtatcataatctgacctggccagagatgctggggggacatcataaccccacctggccagaggtgttgtggggccatcataaccccagctggccggaggtgctggggggcggggggaacttcttaaccccacctggccagaggtgctgggggtgacttcataaatgtcacctggccagaggtgctgggggggatttcataaccccacctggccagaggtgctggggggacatcataacctcacctggccagaggtgctggggggtatcataatcccacctggccagagatgctggggggacatcataaccccacttggccagaggtgctgtggggccatcataaccccagctggccggaggtgctggggagcggggggaacttcataaccccacccggccagaggtgctgggggtgacttcataaatgtcacctggccagaggtgctggggggatttcataacccaacctggccagaggtgctggggggacatcttaacctcacctggccagaggtgctagggggatatcataatcccacctggccagagatgctggggggacatcataaccccacctggccggaggtgctggggggcggggggaacttcataaccccacctggccagaggtgctggtggtgacttcataaatgtcacctggccagaggtgctgggggggatttcataaccacagctggccataggtgctgggggagatttcataaccccacctggccagaggtgctggggggacttcataaccacacctggccagaggtgccaggaggactt

SEQ ID NO: 1242507 - DNA, 4001 bp, Homo sapiens
ctttctcagccaaagtcaaggaagcagaggtaggacagtgtggaagggaaggtcgctggacctgggcgaagggaaggggcatggcaagctctccaagttccctccggctctaaggacctcttccccatgtcctccttctgagcccagacagcaaaaggaaggcaggctgggctgaaacgatgggagttaccctactggggcaggcactgctctaggaatgactgctgcacccaactagtgcaacaggctgccagctctccacccaaggtgtcagcccagaccctgaattgctgccagcaccctctgcacccaaccttaccaaatggagcagggctgaagaaggaaaggagggggtgctcccctgaagtggagaacatatggctgcaaaaccacgtcagatcaaacacatggcagccttcctggcagccatccactctattaatacctgaatgtgggcaggggcgagtgctaggaaggtgggaggcagaagggagggctggggccctgagcagggagcctaagacccctgagccactgccacattaacaggggccactctttggaacttgcgtgcgagcgcgcgcgcgcgcgcgcacacacacacacacacacacacacacacacacacatacacgcacctctcctggcctcctggcatgtttttaagcagagagaggggcaggtcaagtatccacataactgaaatccagccctgcttcttctcaccctttgctgtgtgactctaggcaaagtcgtgggctccctgagcatcaggtccgcacctttcggcttgtaaatactcgtcaccccgtttcccttcccttccctgagaggctgatatggcaaggaatgctgtctcaagagaagatgccagcgggtggccgctgtcctggcctgtggctcttccctgctcccttcaccctctcaggaccagtcacaggatgggggccagcctcccgctccctatatgcccatcagtccccgaggtgcggggtgggaacttggagagcaccgtgctgcatggaacgctcttgtcaccagcaaatgcctcagtggctatgtgggaacacaagactaacccctcccaaagaccagcaacctggcaccagcccatcctctccaaggttctgctttcaggaagctctgagggcacaggaactcgagtgtgcccatttgttttttgtgactgggcaccctcacagcccctgtgtacctaaatggtatcagggtggcctttgggtgcccagccccggcccgtgtggtttccgaggcggaccttcgcgtgcggggcaggcagaatggggtccccagtactgggaaggagggagctaacagctgggaacatcgaggcgggaaaatgcagtcccaaacactccccgctgaccacacagcccacaccccgctcccttctcttccaccccgccagaagagccccgagcgccagaaagttgggggtgggggcccggccggagatctggcggcgagcactccgcagcgtgccctgtcccggctccgagcctcggccttcggctccggacccccaccccgactccagcccgccaggcccgccccgggctccgacccccggccgcgcccctccgcagccccccgcttcccgccgcctcccgtgccagcccctacctgcggcggcggactccgggagcagcagagaagccagagccgccagcagcagcccgagccgcggtggcggcggcagcggcagcggcgggagccccggccgccccatgctccgcctcagcgccatcggcggcgacgccgcaccatgccgggcccggcccgcgagcgaggagggaggagggcggggaggaggcggcgggaagggagcgggagggaggagggctgcgggaggggctggggccgcccgtggggcggtgctgaggcgaccgcctccgagacccgcgcccgcctccggccgcggtcgccgccgtcagcagcgcggggtccccggggccgctcccgcgccaccgcgctccttccactgccgtcgccgccgtcgccgccgctgattcatgttcttctcggagccgccgcctcctcccggcccgcccgcagcccgagctcgcaccgcccccccgcggagccccggcgactggctcggagcgcgaatcccagccagcgccgcaaacccccgcggccccgccggcgccccgccggcacgccggccccagccgccccctggccaaacctgaggatccggcttggcctccaggatgggctccccggccacgcccctcctttccctaaacccgctccggcatcttttctaacccagccctccagagccttccctcaaaaccccgctgtcagcccccaccacaccccaactcttgttcggactctgatcccagaatccagcatccccctctcaggacttagagcacctcaacccctagacactcccatccatctggctccccgaaactgccgtgacccggggctcccccaacaggatcggctagcatcccttcgtgcctccctttcattgagccattcacccaaaatccccatattcatgtcctattgccatgcctttatctccaagtccctcccacctgaaaaatgcccattttctccagccccaattgccgtatgttttccaacttgggtcctgagtttcccaagatcttggtaatccccaggttttacctaatatatatccccaccactacactacacaggccaaagcctaattgcccgtatctttttgggctgtcatttttcctggttgcttcccctgcttctaccccttttcccaggacctggtgtgaaagttggctgtgtcgtcacactgtccagtcaaacattagctattattagtagaccaccttgcacacagtaggctttccataaataaataggcagatgcctgttaaatgaatgaataattgcttcagagcctgccccacaaccagtaatcacgagggtggccttgcccacagacatcctgttaggcacatgcagagctggttccaaaccaagcctaccaagtgtgctcctccccttgcccttccctccagggggaagcccaccccacaccccttccagaggtcctgggtagagaggagggaccagccactcagctccggttgccgcaggctcactggatcttttcagggattctcctgagcagcaggggcctgcctcttcttccacttggccccagcagtgcttgtttattaattaccctaatgataacaacagcagtgctggcagcagcctgagacccagctgggggcgcccccaggcggcagcaggaggagagactcatgaggcactgtcaagacatggatggcaggggccagatatctctgtctctgtttctttctttttttttttttaattggcatatttgtttatttctcagtttgtgaaaatgttcttaatttgttgatgtagcaaacaaatttcaactttgattgctatgaaaaaaacaagataatctgctttgcaatgaactttatatagttaaactgcatacaggcaacatgctatatatgaaaaagttactaactgatctacaggtattacatactgaaaagagttaacagtttattataatttattttatttaacaatctaggaagttcgcagccatcagcagttctagtacaatttcaggtgcaattgggaattcaggaatctcgatggagctgttagtgtagcgaaccttgtaggtaaaatacatgcatactttcgatagcacatgtgaaggtatctctctaaaattgacctcattggtttcgttctcagcaaactgacctcacagcataaacaaaaattaacttaagaccaaagacctaaatttaaaagccaaacccataaaacgcctgggccactcaacatggcttttatcgtgcctgatgttaatgcatgttctctttttacaataaattcatggccatcagatgatatcaatttgacatacgtggcatcagggccttcacagccaccataggttttctcctctccatccattttgt

SEQ ID NO: 1242508 - DNA, 4001 bp, Homo sapiens
atatttatggaggcaaattgtatatatatatatatatacacacacacacacacacacacattctatacagaaagcaattcattatgtttatatattagaataaaataaaacttttacatagaaaaaactaaaaatgacagactctaaagtattaactgcttaacatctaaaaatattaagattacaagttactttcattttctccctttttacattccacatgtattgtttttataaaaaatgttttttattttaataaaaattctgtgtatgtgtatttagattaaaggtgggggttttaagaaggatgtctcatataacatacattttaatcgtatcaaggttacctctaactttagagaaaatacattcaaggtattctgaagccaataacctagatcttttctcaataagcataaatgtcagaagatagaactaaaatacatgttacttaaacaggtgagattttagccttttaaaatattataccaatttactagtaaattctgtgctaaatccagtattatttctagaacaaaaaaagatctggatatttttcacttaacttacaaaatgaatcctatggccacaaataccctaacaaatctgagaaaaaaactgaatcacctgtatatcctctacatgtttgatcaatataattttatatctactattccctataaaccaaaaaagaaaagttaaaaaaaatcaccatcactaactttcttgttaaacaagtaatgtaaaattaaatacttgatgtagaaaatgaatatgaaaactgaatatgaaaaaaagacaaatacattaaaattttaactcacttctgaaatttaatattttaatggaacctggttcaagtacctacacagatttcagaattgtctctaaattacttaaatttggtgatgaacctacttcctcctaacttcaaaagtttaaactgccaactatgagtacagaataaccctacctatgggctccaagtctaagctacattttacgcatcacctttcttaagctttaaaacaaaaacaaaacagtttactgactctaatttggggagtggtcgtggacataagcttacaagacattgtgttttcaaatgcctaaaggattaaatcatgtttaacacacaaatgcttgttctagatttgattagtctatccttacaattaaaacaatctccagtttatttccaagtaaacttgctggtggaaaaaagagccatttaaatcaccacaaagttgtaaaaatccaaaaataaggctttctttaaagataattaaatgtgattaaagtctcacattatcatatgattttcagttctacaccaagcaccattttcagctctgattcactgtcagttaacagtaacactgtacaattattaagattttatcatgtgctttttaaacccagagaaagaaagaacttttgtttactattactaaccccaatctgctaatcaacttaatcaagaagaaaacaataaagcaaaccaaattaataaaacagtagtgcattttaaaagaacacagttcagaaagtctaaccaagaatcttttgttacactagactactgggatacctactctgttcttaggagtacaagaaaaccaacagttcatcatagacaggatttagtttcttgttgctaatggcaaactactttgcattaagttacaaatctctgtaagctcacaaagcaaactctcagacaaactcctgacaagtgactcagtccctcacatgctgtgctacacttagcttggatctctaacgatattttcttcgtcttcaggatccttctccgccttcataacgctcgaatattatcttccttgcaatgcagaacttgattaagagcagccccaagtcaggtacagtaactctatctatttcttattctttggaagctagctatctttcaaagttgtccctttgagggaccccactggaaaacttgaacagcactctgcatcctgctgcctcaacactgcaacacagacgctgcagtgcatgataaaactgtccacatccgaattgtccggtaaacagcgtggagcctgtctcccattggttgagttctactttagattccataggacttgacagctgaatgatagaaaggagcagctaagaatatattgtaaatgcatgcttttcctctgagtaataaatttcaggtctactggggaaaatgactcaaacatattgtaaaacatgcttattatataaaaaccaattgtgtgacataatgacaacattttaagagacaaatttggttattccacagaacaatatttaaaaccagtttcagtcttaggatcatctaacatgaagttataatagccctgacaaacagaatataaaattctattttaagcaaacgtgtcacattttaatttaaggaaacgcacacacagtaacactttcaaattttctccattttattttgtacccctatcagtctctctgcatacaaccaggtttcagcttacaactgctgccagtctgtctcctagcatgttaaatgagaagagccagaggcactgccaaaacattaaatagaatacatagtgatgcatacttttcaacaaattttaaatttaactctgtacttttagtttccaagtttagcaccctgcctaatataacaagtaaatattttatcagtgaaaagtcaaattacctggattcactggatgaaaaaaaaaactggttaaacactaaaggaggcaaatacacattagacaacgagctagactattaaaaaaatctccatttggggacaaagcagataacttctctgcattctctacgatagcatacttgtatcaacatttcttacattaccaaggccggtgcaaattcagggtggtttttttgtggtggctgttgttgttgttttttaaccatgttctcattaccacaatagcatgagaataatttacacttcctctaaaaagacacatttgtgaaaattgtttcatgggaatgcaaaacattccaacacaagtgtttacaggaaggaagtagctgctatattatagatcatgctgccagttaaaaattctgctatgtacttccacaagaaatctgtttcctactaaatttacaacattaggcccatattctaattataaaatatataagggtcatataccatatctcatttttgaaacaatgattgttttttcccccaaaccacgagatatcacaatggattcatttggctaaacccagagactccgcccagtctgtgtcaccattctttgaggaaatctttgttagaactcagaccttgtcctttgggtaacaaagcaagcacattctttctagaaataggacagcaaaggcgaaggaagagggaaaacagtaacaaataactaaagccatataaggagcggcccatgttcaggagataggattgtgtgtcctagtattatggatgtcctgagctgcctgccacctccccagcctctgtggcttaatcttctgtgcctgctttcacaccttccttcatagctatttcccaagagccctacgcaaattcccacctttgctgtcccctgtacctataaggttcttccctcccctactttcaggttcttctccaatgtcacttcctcagagagggcttctcagacctctacatctaaacggccccgtgtcccactctaccccaccactctttatccttgcaccgttttacttttctgcagggagctcatcagtatctgccattacatcagatgtttatctgtttattagcttactgcctgtctcctcagctcccctctaatttgactatatctaaggtttcttctgtgtctggtttgaaactataaaactaatttttcaataagtaacttggtagtcagtcactagattctcacccatcttaagaaccagaatccacatctgcttcatgaatcctctttcctcttggactaaattgttaaataggctagatctgtaacacacatttaccagca

SEQ ID NO: 1242509 - DNA, 4001 bp, Homo sapiens
atgtgttttattctatcaatgcttggtttggttttattcatcactacagttttattttaaaattttacagaattcattctaagttttattcctcattacgcttttatttttaaattgtacagaacttattctaatatttaaacagaaatgtttgctttttctacataaataggttaatatcatgtttatctttattatgtcattttgagaaaaatagaacgctcaattgagtgctaaagatttaagctcagagatatgcactttatgttccaaatgtataaaatgcaaactatcatgctgataatacctactaaatactctgcatttctagaaaactggataaaattaaggcatataaacctccaagtgggatttacatccttagtgcaaatcaaacacaaccagggaaaacaaagctaataaatctagaaacttgtatcttctataaggctaaaaacacaacttgcattacagaagtagaatcttaactgtaatgaactccaatatcactaaatgacatttctgccagttactttttttaaaaaaaaaagtgaaacaaagtaatctctgttttccatgagcttataaaacgacttcatgctttatcaaagaacatcaattacgtcatctgaatctactctctttttttgaaataggaatttaagtctaggtagttcctccacaatttcctttatgtccaagtaaaataatcctcgatataggtggagagaaaggcataactgaattaactcaaaaaagcagaagcagattaattagtattctgataaaaagaatataatcatttggtaaaatctgcgttgaattgtaaaggttcattttaattaccccaactaggtaactgtgcagttggagcataacaactcctttacgttcgactcttccaagactttgtaagtggcacttattttaatgatatagaattttgatgatatcgccattcttgtaacgtgacaaattatctaaatcacaacatctgcggtcaggctgtttctcaagatttctgttctcctgccaactaaagaggccccgactactccttggcgcgcacactgaggccgcgctgcaggtcagcaccgaaagagccccgcacggatcccgccccacaggtgcgatttacacaacccacatcaccaccacccctcccaacttcaccacctctagggtcaccaccctgtggggttttgtctttacgactaagccgattccctctgcctcgctggggaatcaaacttcccagtgacaacgacagcggccagcacgggacgtccaccagcccggcagggcttgacgctgtctcagacccggggaaggtccggagtccgggcacggtggcgcggggtgcgcagccctgcccacctgccctacctggtgcgagccccggccccggggactggggagccaacacggccgagcgggcgtgggcagcagggcgagcgccgggagaggagagcgacgagggggggtcaacggaaagagcggagtaggggtgccaatcgaggaactttggatttaggaggagggggccagaaccgccccactgaggtttcttccagaagttcggaggcttgggagaaaggggtggggaagagacccgtagaggctcgggtgcggcggcggggaggatccccggggtctctgggctgacggagtctccggcctcagggaggagtcgccagggccgccgaagccgaactggcagaggaaaagcagaggaaggcggcgcgcgaactcgccagcaaaggagggctgcgctgctcccggagcggagcgcctcgcagcccggaccgcgggactcaccgcgctggcggcggcggcgccagacgacgcggggccgggcacgtcctgcctcctcaggcgggacttgaggctcttcatggctaactcttgcctggcccccgcgcgaaccttaaaggctgcggagtgccagcgcgcaaggagtagacggcagcggctgcagcagaggcggcgcgggctgtaccagccccacctgcctgccacctgcgggccccgggcagcagacgtcgacaggcctgaggcggggctcccctcccgtagccaattgacccgctgccctggcgggggcgtggcaaaccgcgaccaatcggaatgcgggaatggggcgggacttcccttttaaactgagtaacacccttcctctcccagctggaggaaaagtttgggaactttagcccgggaaggggcggaggaggtgggcggccagaggcgtggagatgcgcgcaggccgggctccaggccaccggcgcccgcccacccggagcttaagatctagagagagcacggggtcccgcctttgccacctctcatcttcccggactcccctcctctttccacccacgcgctctttaccaagtaaagttccttcccttccgtctggtcttagaaatgactcttggttacctgcacacagaacagctttcaggagcaacttcttttcagtctcctgttttactaccaaatcctggtgcctggaaaccaccacacgcatcaaaaattccagaaataaacagtctctaagaaataaggtgctgattgtgcagaaaaacgtacagttaagaaagaccttgaaagacgttatagtaagttacagtacaagttacgtgctcgtttatttgttgagtgaagaatccgccgtattggaagcaaagggacggaatgggggcggggagggaggagaagaggtgccatcaattaaaaatgactcccacagccagtgatttaagttgtcaaaaaaagttacgcccttttttcttcaaaaaggttttttgttttctgtagaaacacattacatgtaaacgtatacgatgaagttaaatcatcttacctagaaatctgggttagtaaaaattatttaagaggatgaagaaacaggaaggtgctcagcacccaataatttgctgttcgggtgacatcttcaaaagtcttctttggagtcatttttccccccagcaaaacgtttatcgtagcatgcatccatttgaaaagacaaacggtccacattttctgactaacaaaggactcttttttgtctgaaaggtcagttgctctctttagagtttctttatagtaacgcaaggttttcttcaaatactgtaagaaagttttcagaatttcttggagaggcagcattcaaagactgtgttaaccctatacaacaagtaaataacaactaactacccaaaaatattattaaatttcatcttgattagatctttggaagaaaattttctttgattcctcccccttcctctagatctccagtcatttagttcttgttggctctttaaagtgtctgtgtatggtcagttactctgttctcactgccactgcagagccaaaattacctcatacccggactattattacagaagcttcccagccagtctcccaaccttcagtctcttaattgtcccatcaccaataaattatcagccatcatcaataagtcttacaaaaatactcctcttgctcaaaagccttcagcagctaacgaataaaatctaattctttgcatttaaagctgtataacgtggacgcgaccctgttctctagccaacaccccaagcgaattactcttcagcccattctccaaacatgggtcatggctttcaacttccacatctttatgcatactgatccctcccccaataatcttctgtctgtctacattcatctcagaaaatcctactcccccaagagtgattggtaggggatgtcgggggcttctggaatactgtactattctctgtgggtgctggttacatatctagtgttttcagattgtgaaaattcaatgagcctgtactgtatgcaatatattctcttttatgtgtgtgttatgctttaacaaaaagtttgtttttaagtgtatgtcccttccaagtgccctcctctctatagaaccttccctgatcaagtaactggaagtgatctctccatcctccaaatagttacagcaatta

SEQ ID NO: 1242510 - DNA, 4001 bp, Homo sapiens
gaaaaagaaaagccagaaactctggagacaaaaacataaataaggagaactggccctaccatctattaaaatatagaagttcaataattaaaactatggtactggcacagacagattaaaggtacataatagaaaatccagaaataggccttaatatattatagggatttagtaactaatacgggtggcatctcaagcaataggagaacgataaagttctggtcaataaatagtgttaggctgggcacagtggctcatctgtaatgccagcactgggaggccgaggccggaggattgcttgagcccaggaattcaagtccacctgggcaacatagtgagactgtctctacaaaaaattttgaaaatggccaggtgcggtggctcacgcctgtaatcccagcattttgggaggctgaggcgggtggatcacgaggtcatgagatcaagaccatcctggccaacatagtgaaaccccatctctactaaaaatacaaaaaattagctggctttggtggtgcatgcctgtaatcccagctactcgggagaccatggcacgagaatcacttgaaccgaggagtcggaggttgcagtgagccgagattgcgccactgcactccagcctggtgacagagcgagactctgtctcaaatgaaaaaaaaaaaaaaaaaagaaaattagtcatggtggcacttttctgcagtctgagctacttgggatgctgaggtgggagggctccttgagcccaggaggttgaggctgcagtgagccatgttcatgccgctgcactccagcctgggcgacagagtgaggccctgtctcaaaaaacaaaagcaggtcgagcacagtggctcatgcttgtaattgcagcacttagggtggccaaggtgggaggatcactagagcccaggagttcaagaccagcccgggcaacatggtgtgaaatctcatctctacaaagaaatataaaaaattagccaagcatagtggcatgtgcctatagtcctagctacttgggaggctgaggtgggaggatcgcttgagccctagaagaggaggttgcaatgagctgacattgtaccactgcactccatctagtctgggtgacagagcgagactctgtctgaaaaaaacaaaaacagctctttccctaagtggcctgaggtaatctgtgaaaatggttcaccattcatttgacctggagaaccccataaaatcatgcaaatcaagaggttcaaattttcgtgttcactttaagaacactcgtgaaactgtccaggccatcaagggtatgcatatatgaaaagccattaagtatctgaaagatgtcactttacagaaatagtgtgtaccattctgacgttacaatggtggagttggtaggtgtgcccaggtcaagtagtggggctggatagaaggtcggtggcccaaaaagagtgctgaatttgtttttgagacgaagtctcactctgtcgccaggctgaaatgcagtggcacaatcttggttcactgcaacctccacctcctggattcaaacaattctcatgcctccaccttccgagtagctgggattacaggcacgcgtcaccacacccagctaattttttgtattgttagtagatacggggtttcaccatgttggccagggctagctgtcctttaaattcaaggaacaaggccccatggactcagccccagacccacagacccagaagacagaaacacagagacacacttaccatagaacccagcagaacttccccgcaggccgggacgctgagttctggcccagggagaggctctgtgcctatcacaaagcccttgggcaacttgaaaggaacaccatcgagggcattcattctgtcaggagtgtggagatggctggcagggctggggcaggctgcttgatggcagggagagagagtcgagtcctgaggaccaggctcaggcctcaaatggcctcactgctctcctgtgtggtcacttagctgagccccaaacagctggaaaggaaaaggtgagggggccagtgctgcataaaggaaggaaatgaataaaaacaagagcattcacacggacagaaattcactatttcatatttcagtcatgctctagaccactgttttccaaaacatggtccacaaaactagttctcatgcatttcatcaaaataattgtcacccaaatgtttaagaaacaaacagcattaatttacataaactcttccagggaagaagaaaataagaaatactttctaactcattttgattttagcataacctttttttttttttttttttctgggacgaagtctcgctctgtcacccaggctggagtgcagtagcctgatcttgcctcactgcaacctccagctcctgggttcaagtgattctcctacctcagcctcccaagtagctggaattacaggcttgtgccaccacacccagctaatttttgtatttttagtagagacggggtttcaccacgttggccaggctggtctcaaactcccggccttaggtgatccggccacctcagcctcccaaaatgctgggattacaggcgtgagccactgcacccagctgatttttagcataaccttgataccaaacttgataagaaaattagaaaccaatctctcatgaacacagatgcaaaaaaaatcttaaaaataattatgggtagaataatataacactgtcaagttaagtttatttcaggaaagacagattgacttaacatccccaaatcaataaatgggaataaagataaatatcaataaagatgaaaaattatataattatatagcttcatagatgcagaaaaaaacatgacaaaatcaatacccataccctttcagcaacttaggaagagaagggaattttcttaactaataaagagtatctctaacacatcacacagtggccgagatcatgctgctgcactccagcctgacaacggagcaagatgctgtctcaaaaaaaaaaagaagaaagaaaaaggaaaaaaaaaaggaattacatctctctatataaatagtaaatcatgtaaatggactcttctaaaaattttattagaaatggaacattttaggccaggtgcagtggctcacacctgtaatcccaaatcccagcacttggggaagtcgaggtgggaggattatcttgaggtcaggagttggagaccagtctggccaacatggtgaaaccccgtctctactaaaaatacaaaaattagctgggcatggtggtgggtgcctgaaatcccagctacttgggagactgaggcaggagaatcgcttgaatctgggaggcagaggttgcagtgagccaagatcacacaattgcactccagcctgggcaacaagaaggaaacgctgtctcaaaaaaaaaaaaaaaaaaaaaggaaaatttaaaaagttaccatttatattagtatagttctctaggactaaatctaacacaagatgtatgagaccgctacacggaaaactataaaacatttggttaaatggaggaacataccacgttcaaggattgtaaaactgaatcttgtaaagatagcagttctcctccaattaatttattcatcccatgtatcaaaattccatcacttttttttttggtagaaattggcaagctaattctaaaattaaatgaaatgcaaaggaccaggaaaagccaagagactcttggagaagcaacacagtggaagactttcactatcagatagcaagaccttcaagttatgagaatgaagagagtgacttaaagacttacaaagagaccaacaggacaaaaaagaaagtccagaaacatatccacacatgaatctttgacttatgacaaaattggctctgtagagtagctggaaagggaaagtcttttaaataaattgttctggattaatttgatatccatctggggaaaaaaaaaaacaaaaacaatattgacctctacctcatgtcatacctaaaaatcaattccaggtggactgtagattta

SEQ ID NO: 1242511 - DNA, 4001 bp, Homo sapiens
agcagacatttgtactgagcagctgccatgataattatctcctgatagtctgtcatatttcactagcaagtcaattttaatagtttctacctagcggtgggtgccattacactagtcctcactaaatcctccttgtactgaaagtgtctcattcacttcttgctccatttctgttgccactgcctaatccaggtcatcactccttatttttatctgcagcagactcttaccagccttcaatatggttctcgatggggcaccagtggcactttaggtgggataattctttgctgtggcagactgcctgaacgttgcaaaacatttggtatccctgtactcctagcactaaatgccggcacagcaataagaccaccccacccccactgggataaccacatttcctaatgccacccactgtagagaaccatttctaatcctggatgaaagatacattctcccaacttacctgagtaaacttagtagctccccacagcctacaaattcagtctcctatcattcaaaccagccctaccttttcgtggccatgccccaacttctaccagagtaatcaccctcgaagccattcaggcccgtctccttaaaacacctgcttcatgacaactactacactttctgttttccactcttggaaaatcctccccttctccagcctgtatcgtgggcttctcaagtcttagcataaattttctacttctaaggaaaccacactttctcaaatctccgtgtcttctttgggtggagtttcctcagtctaaaatgcccttccgccagccttccaaaattgtagtcacctgtggaagctcatctctaactgtctcagcctctcatcaaagccttccctgaagcgcacctcccccaagtcaaaattagttgctttggctttcctgatgataccacaggagctgtcaccttattgaactcttcccccaagaagactgagttctgagagcgaggacgacttcactcaattctgcaacactagtgcccagaacactcagacgtattcattcaataaatgaattatctcctcagtacagcacttgtctttttttttttgaaattaacacaccttctgcccagatagtctggtaaccattttaaggtcaattataacatcaaggtttttgcaaacgccagccaccctgcaggcacttgagtacccactgactcaaccaaagggagttaaaaacaagacttggttttagccatgtttgaaaaggagcccgaagccaccaccttgacgcctattataaccaagagaatattctgcagtttggaccaatatcctacatcaatttcacgacgaatagcttcacgatacacttttatggagaaacttaatacttcaattcctttaccaagccttgggtttctaatgagatttccgcttaatgagtgagtttttaaaagtgtcttttcggctttgtgacatacgtgatctttccggggagcagccctggcgcgtatctcctttcacctatccattttcgaggcttacacacaagggaggggccacacgaatacacactcaacaccacctgccgcaacgacggtactatgctcctttccagaacacagcagcgcgcagccaggcccgggggagaggggtcgctcaaacagcaccagagtctgcattccaacttttcctccgtcaacgagtccattctcattgtcagtttctccttaaacgcaaacttaaaaacaattggctgaacaagcgggaagaaggaaaatccgactgaaaaatgaggcgttaaaacttaagggccgttccccttgccggcctgggctcaaacaacagccggagctgcgccgccccgccccgccccgccccggtcccgggagcaggccggctgagggcggccatggaccccacaagggcttgggccgccgcggactcccccctcggggctaggagacggggaccgagatgggccagaagcccccaagccagcccctggcgagaagccggaaagacgcgccctccgcctcctcccacccaagcctcgcgcagtcccagcccggcctgggatgggcaagtcgcgggggaaaggggcgggcctgccccgcccggggagccggagcctctccggggcaggctcccctttgtcccgggactcgaagcgccccctctccgtcctcgccctgccccgcggggccgcggccgggcgcctcaccgtgatgttgcagtggagcgtgagtggcggcggcagcgagtgcgggctgccctgctgcggcaccaggaactggcagtgcagctcgtccagcttccaactgacgatgcggaatcgctcgtggttcttgtcgaagatggacgccaggaacttcagctcggccttgagccctgacacggacatcttcccctcatctccggcgggaggggcgcggaaggggagccgggcgcggaaggggagccgggcccggagccgccgtcacggccgcgaccgccccgcggggccggcctgggccgcgctctcgcggctccgcctcgtcgagcgctgctggaaaatggcgaggggcgcggaagcctcggcgtgtggcggcctgggtggcgcttcctttgtaaccgactccagcggcaggaggcggcggccccgcggcttaaaagggcaacagcgacgccgcccccgctaccgcctgggaaagggctgcccccaccccgcccccgtccccctcaccctggcgcgccctgcgcgctccggtttcagcgcgtgcacgaggccagagcgcgcgcgcccggccgccccctcctcgccttgacccagctcccttgttcccgacccatctgctccgttcttcgcacccgcggactggaggctcggggccagctggcgcccgggccccagaagtcggggaggagccggagacccccgcgcgcccccgcccccggcctggagccggacacgtgcgtggcggatcgcgccggccacgtcggcgccgctgcagactagcgccagcccctgggggcggctcctcagcttggcgctcggcgcggcacccgctaacctcactggggggacctcgtgggagacgcgggtgcggctcacccagcgttacctccgctactttcaccctagtccgagccaccgcttcgctagcctgggttcctgtgaggaccttctcaccagcctgggttcctgtgaggaccttctcaccggactcgctgctcccgcctttgctctcaaaccatccatttacccaagacgatggtttagcccctggaggctgttgcctggaggtgtcccatgatttcatcccttcccttagctaccacctgtgttcactctgccgtatatagtctctctctcccccctttccttattttgccttgtttcccaagcttaagataaccctccccacccacacccccatggagctagggctgcccactattttcactaaactcatagctcaaatatcatctccggcaccccccaccacaacccatttcaaatagtcaccctgtgtcacatcgtcctgtgctaagtttttgttgggcacctgtcactatctgatctttaacccatttattccttgtctctgccccgtgttaatgtgttcagagctgtatccccaggacctagaacaagacctgttatatagtagaaacccgatatgattgaattgaatgctcgctcttatctggaatccccaccactagcacaattcctggcacattgtaggtgctcaaaaaatgaataaaggtctggatagcagtccaaaggaatacatcccaatttggcagacaatagtgtgtgcaatcgtaagtgcaagaggcaggaccagctgcatatgcgtccaacctatgtagttgcacagtgctcccagcttagaagggcttcgagcttggtttaatattctggtgtcgccattttgaaattcgtaatttttcagaaaggggctccgcattttccttttccagtcttacctagagttacccaaccctgacacctgtctctttcttcctaatctacaagaga

SEQ ID NO: 1242512 - DNA, 4001 bp, Homo sapiens
ggagtttcctcagtctaaaatgcccttccgccagccttccaaaattgtagtcacctgtggaagctcatctctaactgtctcagcctctcatcaaagccttccctgaagcgcacctcccccaagtcaaaattagttgctttggctttcctgatgataccacaggagctgtcaccttattgaactcttcccccaagaagactgagttctgagagcgaggacgacttcactcaattctgcaacactagtgcccagaacactcagacgtattcattcaataaatgaattatctcctcagtacagcacttgtctttttttttttgaaattaacacaccttctgcccagatagtctggtaaccattttaaggtcaattataacatcaaggtttttgcaaacgccagccaccctgcaggcacttgagtacccactgactcaaccaaagggagttaaaaacaagacttggttttagccatgtttgaaaaggagcccgaagccaccaccttgacgcctattataaccaagagaatattctgcagtttggaccaatatcctacatcaatttcacgacgaatagcttcacgatacacttttatggagaaacttaatacttcaattcctttaccaagccttgggtttctaatgagatttccgcttaatgagtgagtttttaaaagtgtcttttcggctttgtgacatacgtgatctttccggggagcagccctggcgcgtatctcctttcacctatccattttcgaggcttacacacaagggaggggccacacgaatacacactcaacaccacctgccgcaacgacggtactatgctcctttccagaacacagcagcgcgcagccaggcccgggggagaggggtcgctcaaacagcaccagagtctgcattccaacttttcctccgtcaacgagtccattctcattgtcagtttctccttaaacgcaaacttaaaaacaattggctgaacaagcgggaagaaggaaaatccgactgaaaaatgaggcgttaaaacttaagggccgttccccttgccggcctgggctcaaacaacagccggagctgcgccgccccgccccgccccgccccggtcccgggagcaggccggctgagggcggccatggaccccacaagggcttgggccgccgcggactcccccctcggggctaggagacggggaccgagatgggccagaagcccccaagccagcccctggcgagaagccggaaagacgcgccctccgcctcctcccacccaagcctcgcgcagtcccagcccggcctgggatgggcaagtcgcgggggaaaggggcgggcctgccccgcccggggagccggagcctctccggggcaggctcccctttgtcccgggactcgaagcgccccctctccgtcctcgccctgccccgcggggccgcggccgggcgcctcaccgtgatgttgcagtggagcgtgagtggcggcggcagcgagtgcgggctgccctgctgcggcaccaggaactggcagtgcagctcgtccagcttccaactgacgatgcggaatcgctcgtggttcttgtcgaagatggacgccaggaacttcagctcggccttgagccctgacacggacatcttcccctcatctccggcgggaggggcgcggaaggggagccgggcgcggaaggggagccgggcccggagccgccgtcacggccgcgaccgccccgcggggccggcctgggccgcgctctcgcggctccgcctcgtcgagcgctgctggaaaatggcgaggggcgcggaagcctcggcgtgtggcggcctgggtggcgcttcctttgtaaccgactccagcggcaggaggcggcggccccgcggcttaaaagggcaacagcgacgccgcccccgctaccgcctgggaaagggctgcccccaccccgcccccgtccccctcaccctggcgcgccctgcgcgctccggtttcagcgcgtgcacgaggccagagcgcgcgcgcccggccgccccctcctcgccttgacccagctcccttgttcccgacccatctgctccgttcttcgcacccgcggactggaggctcggggccagctggcgcccgggccccagaagtcggggaggagccggagacccccgcgcgcccccgcccccggcctggagccggacacgtgcgtggcggatcgcgccggccacgtcggcgccgctgcagactagcgccagcccctgggggcggctcctcagcttggcgctcggcgcggcacccgctaacctcactggggggacctcgtgggagacgcgggtgcggctcacccagcgttacctccgctactttcaccctagtccgagccaccgcttcgctagcctgggttcctgtgaggaccttctcaccagcctgggttcctgtgaggaccttctcaccggactcgctgctcccgcctttgctctcaaaccatccatttacccaagacgatggtttagcccctggaggctgttgcctggaggtgtcccatgatttcatcccttcccttagctaccacctgtgttcactctgccgtatatagtctctctctcccccctttccttattttgccttgtttcccaagcttaagataaccctccccacccacacccccatggagctagggctgcccactattttcactaaactcatagctcaaatatcatctccggcaccccccaccacaacccatttcaaatagtcaccctgtgtcacatcgtcctgtgctaagtttttgttgggcacctgtcactatctgatctttaacccatttattccttgtctctgccccgtgttaatgtgttcagagctgtatccccaggacctagaacaagacctgttatatagtagaaacccgatatgattgaattgaatgctcgctcttatctggaatccccaccactagcacaattcctggcacattgtaggtgctcaaaaaatgaataaaggtctggatagcagtccaaaggaatacatcccaatttggcagacaatagtgtgtgcaatcgtaagtgcaagaggcaggaccagctgcatatgcgtccaacctatgtagttgcacagtgctcccagcttagaagggcttcgagcttggtttaatattctggtgtcgccattttgaaattcgtaatttttcagaaaggggctccgcattttccttttccagtcttacctagagttacccaaccctgacacctgtctctttcttcctaatctacaagagatccctgggctactggtccccttagatgacaaaatacagaacaacacagggacacattaagtctactgaaagtttttatttccatctacttctgagattttgtatcatgttatagtccttagcctttaagaagacaaataaacttttccaatttacctcagtaagttagtagctccccacagcctacaaattcagtctcttatcattcaaaccagccctaacttttcctggccatgccccaacttctaccatcttctaccccaacttctatctagcctttaagaagactaagattctcacagacccctttgagaatctaataaaagctatgatccatcttcccaggaaaatacttctgcatctaaaattttgtacttatggggattcatgaccccagcactagagctaccacactatacactgggactgggagaagaaggggttccaggcctgggttctgagccagaaacaactaggctactgtattagcattattgctgggttaagcacagaagtggcttgccactttatttttccttcagtccccagtttcttgggaccctaacaggcatggcattcccagataaggatttgagacaaagagcaacaaactcttgagaagttggtatgacttcgagaaacaaaattccctaaacaagctatttaatctgtctaagctttattttgttacctctagattgctgtgagaaaatagagctttttaaattgcaagtgtttttactagttgtatcccagaaa

SEQ ID NO: 1242513 - DNA, 4001 bp, Homo sapiens
aaatatttaccaagcatttattgagtggaagataaaaagcacaaagcataattataaaacattctcccctgccaccataaaaattttttttaaagccttacagaatacagcataacataaccaaagcaaaaatagtgaggactaaagaggggaggaaggggaaatatcagcatgaattaaatatgacccagaagagccttgatggtcagacacgtaaagacaaattgggtagggttagggggtggctgtcaggggcacattctacaggggaaaaacagctgatacagaagcctgaaagaaaaagcgggcagagcacctggacaggactcttacctgctgcatccagggtacaatgcgcctttccagaacacagcagcgacccgggatagagggatcgctcaaacagcaccagaggctgcattccaacttttcctccatcaacgagtccgttttcattgttagtttctccttaaacacgattggctgaacatgcgggaacaaggaaaacctgactgaagaacgaggcatttaagcttaagggccttggatctgggcgcggtggctcaggcctgtaatcccagaactctgggaggcagagatgggtcatttgaggtcaggagttcgagaccagcctggccaacatgatgaaaccccgtctctactaaacaacacaaaagttagccaggcgtggtggcgggctcccgtaatcccagctactcgggaggctgaggcaggagaatcgcttgaacccacagactgtcaagagatggaggctgcagtatgccgagatcgctccactgcactccagcctgggcgacagagtgagactccatctcaagaagcgcctgccaccatgcccggctaatttttgtatttttagtagagacagggttttaccatgttggccaggctggtctagaactcctgacctcaggagatccagctgcctcagtctcccatagtgctgggattacaggaatgagcactgcgcccggccaaaaaaccgaaaatcttaaaggcctttccccttccctcactgggctcaaacaacagcgggagccgccctgccactccccgtcgcggtccaggggagcaggctagctgactgagggcgatcatgggccccaaaaggtctgcgggcgacgcgggctcccacctcagggcgcagcgactggggcgagaggtgccggcagcccccaagccagccccgcggcaaggagccagagagacgcgccctccccctcctcccacgcaagcctcacacagcggggcgggccagacgcgggagaaaggggcgcgctcgccccgcctggggaaccggggcctctcccgggcaggctcgcctttgtcccgggactctgggcgcctcctctccgccctcgccctgccccgtgaggccgccactgggcgcctcaccgtgatgttgcagtggagcgtgagctgcggcggcggctcctggttcttgtggaagatagaggccaacaacttcagcttggccttgaaccctcacacggacattttactctcacctctggcgggaggggcgcggaaggtgagcccgtcgggagccgctgtcacggccgcaaccacccgcgggacctctcggcggcgctctcccagctccgcctctccctgatgcctcaactctagtcggagtagggctggaaaatggcaaggggcaccgaggcctctgcggggagctgtgtggcggcctgggcggctgctccccttgtaacagactccaccgacaggaggcgctgctcctgtcaagccgcagcttaaaagggcaacagcaccacagcccccgctatcgcctgggaaagggctgcccctaccccgctcccgtccctctcgcccctcacacccgtcgcccctcacccctcaacccgcgcgccccctgcgcacccgtttcggcggctgcaggagtccagagcatgcgcgcgcttccggctgcccctcctggccttgacccagcactgctggacccatctggtccgttcttcacactcgcggactggaggctccgggcagcacaaccaccaactcgtgtgtgtgttggggtgggggtggggggcagaaaaccaccaactcgtgtgtgtgtgtgtgtgtgtgtgtgtgtgtgtgtgtgtgtgtgtgtgtgtgtgtgtctcccaagggaacagcactgctgagttcaggctatcagctcatggactgtcagcaaaatacagtcacaagaaggctatgtgctgttttgtctcttgcagtgacgtcatgttgctcatgttttatgtttttcagagttcattagtttctgtttgctctcagttaatatccagctcaatagattgtgtaagtagaatacccccaaactgaaagtcacctacataaaatatagtgaaaaatatgtcacccacttaaactatagttgaaaatatgtactcattagttttgtgtagccaacactggataatgggtaaggggaaaggatcccagggctagactgcctgggttcaagttccgatttcctgctggctgtgaaatacttgacagcgttcagcctctgtttcttttcttttttttttttttagcttaatcccaaatatgatagtaagtctcagtttcttgatctgaaaaacagaaattattcaatgacagtctatgtgaaaactttaaagttttcaaagccactatctagcttaggaaagtcctcagctttaggggttaaagtttttaaaaccactgcctggttcaggaaagccctcagctgtagccattattagctatgattattattgtggtggctacacatacattaatgaggcaggaaaatgctcaaggataacaagcaagtatccagattatctcatcagaccaagacagatgcatatgcatgcatgatcatgttttagctcagagccatttgtctaaaaggctcttgaactcagaggcccaggagtatcaactttgctttgcagtggagccatcgcttttgttaatcaatgaaattgacataatgctcttcttttttttttcctttttagcaccaaccatgtgcctagagctaactgtgttaagaagagcatgcttcaagtggctggagtgagcaattcaacttgtggaggaatgagaagtgacagtgttgagacaagcaacataaaaccccagggtaaggtagaaatcactgaaagtcaggcaaaggaactggcgtccagtaatgagtcaggctttgccagcctctggccctacagatggctctttgcagaggaaaaaattaagccaggcccgagggcacagatcctaagggaatgctggcagctctaggctgtctatgagagtccagagatgctgcttcaccctggggctttaggcaagtccctttccctcccagagcctcagcatcccttctagcaaatgacgttctgcctttctcctaggatggctgtggggatcaagggagacagtggccatagggatactatgttaactgcagatgcggctgtaggagcactttgctaacttccaacgtgagttcagactcttcaggctatttggcacccagatctatggtgaggtgtgacatatgggatgtaaagtttgatgcctgctccgactccagtcttgctaacacacacgaaacctttggtaaatcatgaccctgccttggggaaaagggcagtctgggagagcttcttcaaggcagcctggcttcaatgcagtctggggcatgactgagataggcatacgtggtgaggaactggagggcaactgggtaaagagctgcagtgtgggcagaggtgtagtgtgggtcacatcgcggatagccactggccaaagcagggaacagagacagaatgaggaagagctctgtggggagggtggggcacagggtggagaaccttcaaagtccaaagagtatgacttgttgggattcaacgctgtaggcagtagggagccatggaaggctcttaggtggagaaatgacagccggacattagtgagcaagccctgtctccctgagc

SEQ ID NO: 1242514 - DNA, 4001 bp, Homo sapiens
atattataaatacacaaagattgaaaattatttcttgaagctatttccttttttattttttggtcaactgtattagtgtttcttaaaagggcttctggtcatccttagggcttatcagtagcatcattaataatgtattcatttcactaaaaatgtggtaagtagcttggatttaaaaacaggatctaatttcaaagctatttccactatacacaccaagttacaactttcttatctctcctaaattctaaattttacatgatttaccaaatcacttcttaagtaagagtacttattgatcagaagtgtgagacaaacaccttatcccacttgtccaatttattcaacaagattgattgggtacctttgtgtctctgacaggtaactttcaacagttgtatttcttaaactttaggtcgtctcccaaaaaaaactgtaataatttgctgcttctctcaatattgcaggcagtaaaatgatccaaaattacgggtcatatccacatttcttcatgattgaggttaactgtgcactgtaaaccccatatgctattagtttacattttcaacagcaccctcgccacttaataatctcaaacagattttggactgttactaatttagcatatccataaaaagtcatttaaaaaatgtagacgctaaattctctttcaaggttgccaagcttcaccagtgtctgtattaaaattatttctaaaattttacggactaaggcatttggtacattcaattctacctttaccaacaaaagcctttaccaccaagatgaggaaagcatccttttcattttctacactgaaaaggggggggaaaaaaggccaactgcttgcatacaggtctgcatataacacagcagtctctggcaaagccaataactcacgttcaacttcagaaatcctggtggccggtaacacagagtaacctgtgcgcacaacccttgggcttgacataccacttcatccgccctcccttcccatcaatccacccccaaaaccccaacccaccaagcacacggctaaatatgtcttccccaagagagccaaaaaccttgaaaacgccgagaaagggctcccctttgaaggaaagggcctgcccttccctgtctggggccccggctggctcgaagagcctggctcctaggaggcccaaatctcgacgcctcgcacgtcccgccccgccccgggcccgctcgcgtcccctcgggcgacaaaaccctcccgccgtcgctcagccaggactgacagttacggctgcagcagccgcggccaccaggggcctacttctggcaccagccccttcggaccacgcgcccccaaacactcgcctcggcggcggggggcggggaaggggggtgtcgacctcgccacagcgggccccgaaggccggccgagtgacggaggggagccagcgccgcctggcgcaggccgcggcaacactgacctgtcgtcgcccccgcgcctgggctgcggcggccgcctcactggtcgtagtcgccctcgcccgccgcctccgcccgccaccgcctcgttctctttcgctgccgccaccgccggggctcatgcgggacccgcgcttccttatccggaaaacgaggccgggaaagggagcgccggggccgccgaaatcccggcgttcgtcgccagccgccgctgcctgtccacaccggggggctgaggggccctcctgccaggggctacaggccgcgagctattccgaggaggagccgaaggaggcgccgccgcccgcagccgagcgcgccgggtcggcagaggtgaagcgtaagtaggcggcggatggcgggcgcccgcgctggcggatggctacgcggcggaggggtgcgcgagcgagcgaagcctggtgtgtcgggtcctggcgaagggaaaaggccccgtcgtctcctgtagtcaccccgagcccagcgccaccatcttgggagacacacggatctcgcggccgcggcgcaagacgggaggactggctgggcgggccgagtatcccggcaggcagcgcgcgccgcccggccgggcgagggctccaggccgggacgcggggacgtggggcggggccaagacgcgcgggagggcgccgcgctccgcccctccttccttcgccggccccgcctccctcccgcttgccgtcgccgccggcgcacgggccattgggaagaggaggtggcctgcggcccctcggagtcccaccaggctcggtcgccatcttgcgactggacagaaagggtaatccctctttttagtttctgctgtctgtgacccgaaagaataaacctgggacttccggaagccctctgggcacccccccccccaggagggttgcagagccccttggtgtacccagcagaggaacgcctcagactttgttgggaaacgaatggctctgaaagttagctgaagccgctggaatagccccccagccccgaggcggggcaggtgcctgccgttattggcttttcgaccccaacccttttctatctggagctgcctttgtagatgttgcaggggtgccccgagagtgcaggccagattttagaggaccaaggtcatctacttaggcctcttgccaacacaggatgtgtcaactagtttaccagagacgaaggtaaagtcccgtctcctgcagttgttgacgttcagtaggtcgtcggttaagaaaagtggctccctggttgaccccagctggatagaggctaattttgatccatatgacagctgaacgtagttaaagccattaaaattaaatccatttaaagtcatatttggtaccagggtcaccattttaaaaggtgtgtgtgtgtatgtgtgtgtgtgtgtgtgtgtgtgtgtatagctttacaacacttgctagcaaagccaaaagagtatcactaacaattcatagtgttacaacttgcaactttgttgataagcccttgaagtactagatgagtacccatgtctagtattcagattttttatatcaacagtcgtacatagcagtgtatcttttttaaatttatttttatttttaaacttagaaatggtgtcttgctatgttaggcccaggctggtctcgagctcctggcctcaagtgatcctcccacctcggcctcccaaagttttgggactacaggcatgagccacagtgctcggccagcagtgtaatttttaactgtcagtctcggaacatcttttttgtatagccaagtgtgtgggtgtgtgtgtgtatccgcctcacaactataaccaaccattgaaaaaccaacaataagctagaagaatttaagttattccaggacaactgatgataatgatagtattaagccatattcgattttaagatgttttaactcagctctttactcacttttcatttcctctcattacacatccacatttggaaactatttgctgttatatttcatggaaaggactagtaagaattataatctttaaaaaaatttatcttcgcaagttttcaaaataggcaacaaagaatgtaaatctttaaggactttattgttggactaattaaagcataccatttctactatatctagcatatggagatacttataggtattcttccttttaagtagaaattgacaataaattaagtgtaattttataatggcctggtgtatcaaagtgtggcggaaatccctgagttccaaaaagattaaagaccgaagggaaataagtctgcttttagctagatgtcagaatgactattcattgctttactgagatcaaggaggatcttaattcctcctggagaaattacgtatatccgttttagttcattaattttaaatctgtattcttatgtgtgacattagtattagaattctttcaagatttcactgtgctttttgttttatccattttcaaatttagaaatgtttgctcatcaaacttaccaacataaatactttcaggaatccttaagatactagcagtgttccacttccctatacacctgtttatatga

SEQ ID NO: 1242515 - DNA, 4001 bp, Homo sapiens
gtggtagaaacgcaaataggtacagttgctctggaagagtatggcagtttctcaaaattttaaaaataaaattaccatatgatccaacaattccacttctgggaaaacaattcaaagcagggtctcaaaaagatatttgtacactcctgttcatagcaacattatctgtaatagctacaacatggaagcaacctgagcgctcatcaacaggtaaatggataagcaaaatgtggtatatacatacaataaaacattattcagcctgaaaaaggatgcaaattttgaaacatgctaaagatggatgaaacttgatgacactgcgaagtaaaataagccaatcataaaagggcaaaaactgtatgattgcacttatagggggtacttagagcagtcaaaattagacacaaagtagaataatggttgtcagaggctgtgaagataaggaaatgaggaattattgtttaatgggtacagagtttcagttctgcaaaacagagagttctgatcgtgactgtgcaacaatattaatatacttaataccattgagccaaatacttaaaaatggtgaaatggaaaattttacattatgtgtattttactacaattttttaaagcttaaaagacaagtcacatggttgggtcacataaatttgagaaatacattttatagtcgtttcttgcagattcacaatatataccggcatttaaataaggttccaatattttcagtaaaaaaatcttgatttttccaccctcacccacaattacaattaatatcacacatccatctttacttccttgttctaatttcattagatgggcatctttcctcttattcaaggtcaatcactatatctgcatttttctttttttatattacctgtatgagagatacacctgtatttttcattccaacccttaatacctcgaaaaactttgctttgataattactacctctattatctgaaacatctttagtcttcacaataaatcactaaagtcttacttacttcatgtcctaaatatttgtcttaaatccagaaaaatttattttgaattcctattataccactgtcattgtcaaggctctcactgactgaactaccttaccaccacacgtttctcttcaatcctttctctcttgcaaggttattaaaaatacacgtttgacaaacttactatctacctactgagcaaattctttgctgactccctaataccttctatcacatcttatcttcttcattttcctacctctcagctagtttatgatctaaaagtcctcaactgcctattgtcccctactccctatgctgcttctaactttggctcatacttctgcctggaataagccgctcatgcttctagctgcctgattcccagtcacatttcaagactgaacttagcatttcctggccactcttacttccctgccatctacactagattcctattgcatacctgggtactccagtactccttcatgttactattgtattttggataccattctacctcagtgactgaaattatttgcttctgcatctttcactcttgagtataatataaatttctgtagggtgaaaactaattattacgcatctctgtatctataacatagtacttgatgccttaaatatggtaggcgttgagactgttaaactcaactctttcctcaacctccctatttccctacaactgctaccagggaagcaaaaagactaagaatttaggcgtgtgcatttatctatctagtagtagaaacctagtaaactgttaccgaggtttagagttatctgataggaaaaaaagtaggtatgttcctatctcccatttactgctaaatgattcctttcttttaaccagaaattatttccaaataatgtgacgtaatttaaagcagtctagggcaactcaaaataagaaccacagtctcaaccaagttacacttacattcggctagcttcaatgtcgtcagactgaggttctcctgatctgtaaaatgcaattgagaaacagttagcaaaatattccatattccaaaaaaaaaggtagacatattacttaggaagacaattttgtaaacaagatttaagcactaaataaaacagttttaaaattaaagatgtcaacatgaaagaaagtggtcagatcaggtggccatacaacacatttattttaagggttggactattaaaaaactcaatgcatgttttttaaaggaaactgtaaacgctatacatagataccaacagacaagccattataagccataattattcacaaagtcaaatacgtgtaataaaacacacaactaaaaaacttcctatagccaagtattggttatccacattaacaaaggtactcactggtattcactcacagtattaaactttagattagtggctcagtaaactactccctaggcagacagactaaagcttaggccagccatgtagttttgtaaatgaagttttattgggatgcagccatactcattcatttaggtatcatctatggctgctttcacactaaaagaacagagctgaggacttgtggcagaaaccacatggcccataaagcctaaaatatttattttctggccctttaagaacaaatgtgccaaccgctaccgctactccagacaattcaaactaaaatctaataccttggtaagtttaaagacacttaaatcagatacaacattctaatgatgattatcttggttcaacaatgaaactgtttccctaaaaatacacttactgtatgtattacctgtcaaaagtgtatcacctgaggtgaagttttgcactggatagctgtgaattaacttcagttttaaacagttgccagttactttgttatttctaaatatactactgctctctcatgtagaaatatttaaaattctaagtcactaaaaagcctttcattttcatttcacgagatatgaatcagtatttccctatctattcacttttataaacagcatcagcaacaatgaatgagtcaatataatattgatttctaacacttagaaattcccaaactagataaaaaatgttttttgaggtcaaaagctaaattttcaaattggcattacaaagtcctgatttgtgaacttctcactgactttaggcttccaactttaagcaactctaacaagaatcttaaaatcagtcacacacacacacacacacacacacacgcacacacacaaacctgttttctaaatttcttagctaaaaacaaaaacaaaaacaaaaaacaacccctcacttctttatcagactctcaaaattaccctcactgcaattcattcagattccaaggacaagaatggaaaaggaaaaaaaaaaaaaaaaaagactccagcagctcaaatatttattttagatcttctttgcaatgtatttaaattttcaattttgcacaaaattacataacaactaaaaactggggcatgctggaggtggcagtgacttggctgtgacacaaatgcaaaaatttcactccaccctctcccccagggagcaagcaaatcacctatgtgacacacctggtctccaccagccttgtgggtaagtaccccaagattgcttccaaacttgtatctcccagacagaagagctaaaaattgatgataaccccatgtaccagctgactcatttttgaaagtgcgaccctccagcatcagatgtcatactgtaaggaggcagagctggcttgcaaaacaaaaaataaacctgctggcactgagggaagagaggcagattagaagttttcaaacacgtaggcagcaaaactttcaaaattaacagggaaagagaagagagggaaaaaatgaggacatgatgataggaaaataaaaatattactgcaaaaaggtaagacacaagaagaaaaacaaatctaagtcttagaagtacaatatgtaactgttacaaagttttgagatcctgaaatgggatagagtttaaatacattatcaaatgataac

SEQ ID NO: 1242516 - DNA, 4001 bp, Homo sapiens
tttccaattttcttcaactgttgcttgaaccagtagaacagctttataacaagttccctgcctcttgcctctccctatcaaatatctatgctgccacctaacaacacccatcatttttttttttttttttgagacggagtctcgctctgttgcccaggctggagtgcagcggcgcgatctcggctcactgcaagctccacctcccaggttcacgccattctcctgccttcctgcctcagcctcccaggtagcagggactacaggcacccgccacgacgccaggctaatttttttttttttttgtacttttagtagagacggggtttcactgtgttagccaggatggtctcgatctcctgacctcgtgatccacctgcctcggcctcccaaagtgctgggattacaggcatgagcgactgcgcctggccacaacccatcattctaaaacacagatctgaccaagtcacttctctgcttagaactcttccaatgtcgggctgggcgcggtggctcatgcctgtaaccctagcactttgagaggcctaggcgggcggattgcctaagctcaagagttcaagaccagcctggccaacatggtgaaacccgtcactactaaaaatacaaaaattagctgggcgtggtagtgcgcacctgtagtgccacctactcggaaggctgaggttgcagtgagccaagatcacgtcactgcactccagcctgggtgacagagagagactctgtcgcaaaaaaaaaaaaaaaaaaaaaaaaaaaagccagacgcggtggctcacacctgtaatcctgtcactttgggaggccgcggaggacggatcacttaagatcaggtgtttgaaaccagcctggccaacatggtgaaactacatctctactataatagaaaaaatttgcagggcgtggtggcaggcgcttgtaatcccagctacttgagaggctgaggcaggagaattgcttgaacccgggaggtggaggttgcagtgagccgagatagcgccactgcactccagcttgggcgacagagactccgtccctccctgccccaccccggccccccagaaaaagacctcttccaatacctctaaaccatctatataaattaagtctaaacttcatcgcctggcttacaaaactccctgccagcctcattccccaacagagccctacccctgcaaaggacctccacaacatgtaagtacacactcataacaaagctctcccctattttacacctctgctcatctaactctgcatgtaatttctcttccctttttggccttttagcaaactcctaccgaaaccaacacagattcaataacctcagtcccctctctttcctctgttgttcccacatcccctcagaacaaaagggctacaaatatctgcttgccccctcctccaccccaattcttgaatgcccttgaaaacaaaagactaaagttttcttcatccttgtccccatacctggcatacatggaaccccagaaaataaatcagaaactctgacggcggaagaatcttgcaaagcaagataagttcttgttatagtcatcattattgcttccaaagagacctctgatagagaagaggaaagaaaaggctgtgaagctgcctagcagaccttcaagcatcctcaaggtatcttccacctcaagtttatgccagaaggaggtcgttttatataccatgtctcacttaatcctcacaacggttccctaaggcaggcattagccacattttaaagatgagggaagcaagactcagtaaaatcactggcccaaggtcacagatcgctagtaatggggcaggaacactatccggtggcgacctcaccgctccagtgggaccagctacttggctgacacacatcgagcccgcgctgcccagggccccagcgccctcacccgtcccgcggaaggaacccggccgcactgccgccggtgtaaacactcactctggccctctcgccggaaaccggaaattccgcgctgcattctgggagttgcagttcccgctgtggccccccgcccccttataaacagccagtctacaagaggcgctagttgcaaagcttccggttctgggggaaggcgtggcttccgcgctctttgaaatgtccggcgccggaatgtctgggtgctttggttggagagggtcccatttccagtcattcttcagcctggtgattcccgcgctcccctgaggagcatatgaagtacgtcggttctgccaggttggaacgcgctgctggacactcggccgtaaggcggatcccggatcccctcccactccgacccttccctccagaagggccggttcccaaacggcccctttagacacatccaagcggttgccgacggccctcacgatgaaaactgctgtccgttggtgaaggcagcctcttctgtgctcctcgccgctgacttcctgaggcggacctacctgtggaggcataccaggaaccagacgatgaccccctccaaaagttgggtctttgaggagagctactaacttgggttcctggtacaccctctacatgcagtggtgaagcttatctaacagtcattcatagaatcagtttgggaaggggaattttcactgaactctcatagagaaactgtgttttagataacagaaagttctgcacggttaaaatggaacagaaatttttttgcacagaaattaggattaccgaaaatactgaagaaagactacctctgattggactcttctcaaggaattaataattcaagaactaaggaaagaaaaaagtgattatatgaaaatactgaagttgatcgtagcagctgaaggctgatcctgtgtgggtaaatgtaaacgctgaattcccacattccaatgtgcgacctgggattaaggcagcaattgagcagggtaatgttactgaggagagcgaacagatcgcaggatctcagaaggcctaacattaaaggcagatcacccctctgttctcataagttatatggggagttttgaaatggctttcactgtcttcagggagtttatcttcaggataactcccatgtatgttgtgggcgcattaggaacccatggctgttcccaaagtctccctttcccatcctacccatttttagatataccccctctttcagtaatccttcctaactagacttctttagactccttcctctcctgcctactaagttacttgcacctgagctccataatttatcaaaattatatattgtgaatactttcccagttcatgattttttttttactcttaatggtattagataatttaatttcattttaaaacttttttttttttttgagacggagtcttgctctgtcgcccagattggagtgcagtagtggccgatctcggctcactgcaccctccgcctcccgggttcaagagattctcatgcctcagcctcttgaggagctggggctacaggtacctgccaccacgcccggctaatttttgtatttttagtagagacggggtttcaccacgttggccaggctgctcgaactcctgacctcaggtgatcccaaagtgctgggattacaagcggtagccaccacgcccggcctgaaattttgttgtgatggttagtgccttttgtgtcctatgtaagaaatctttgcctgccctcgttatgaagatactatcctaggttttcttctgtgttattttatctttcacatttaggtctatgattaatttcacattaatctttgtatatgataggagttagacatcaagattcatctcttccatatgggtgtacaattgatccagcactatttaaaaattttgttcccactgaatttcagtggcagctttgtcataaatccggtgactatgtatgtctgggtcaatttttgactcttattctgtgccatgggtgtatttttctgtcattgtgccaatgtcacacgtcttgatttctctaactttagagtaggtcttgatatctgctagccttttggcttta

SEQ ID NO: 1242517 - DNA, 4001 bp, Homo sapiens
accagactgtgagttccttgaggctatattacacaatctacctactactttgcaaaacccaaagccctgcccaacaaaatctaataatatttcctgaggtaaagagttgccacataaattctagctcaattcctgtatcattatctccaattccaaattagtgacgtccagaatgatggggttttattgtattatctggaaaaaattaatgtatcaaagctttaaataaatattagtcttcagatacaaaactataacaattcttctgaccacagcagtttccccactccttctaacaagcaaaactcacaaactaccattaaaatgtttcagttgcttttaaatttgtcctacctcctcattccttatcatctcaaataagatgcttcctccttcaggaacagtagtgaagtgaatttgaactgctatttggggtggaggaaaacggcaagcactgacatagtcagtggccaaatcctttttccaactccctccctaccttgttcctacctcctagacagtctcttcagtccctggagttgactcatgccgtagctccctctgtagttccctctgttctcgcataaaacaatgttcaattgtatgcagggttaaaaaaaaaaacaaaaaaccttcaagaatgcttttaatctgtaatcccagcactttgggatgccgaggcaggtggatcacctgaggtcaggagttcgagatcagcctggccaacatggtgaaaccccgtctctaataaaaataaaaataaaaaaaattaggcaagcatggtggcaggcacctgtaatcccagctactcaagaggctgaggcaggagaattcctgaactcgggaatttgcagttcaattcctgaactcggaaggttgcagtgagccgagattacaccactgcacttcagcctgggcaacaagagcaaaactctgcctcaaaaaataaataaaataaaataatgtttttattaaactacaagccaaagaaacttcagaaaaaatgtgtatatcccaaatctctaaatgctgctatttagaaagacaaactaataaaacatcatgcggtgacagatatttgaatattttctacatatctccacactagatgccctgggcatccagaacattccctaacattgccccctactcttatcttcctcggcagctttctccctgtagctagtgactcaaatttgttcactatctgtgccttcccattctttcaaaatgcaagagcaaagtatagattccgacatcaattaatggtattgctctggcttgaaatgtttgggagtcctttcttcacctttaaaaagtagcgacagatgatgggtttctccactgagggttaggcctggggttcccaagatgctatacgcaaggacaattactacacctcacatctagacatgacttgacagtagcagcactacctaccaatatcaggtcccggccagcaggctatgcaataaaataccaggtgctgcgttcccatcatcaagagtaaagggttagtactgcttctatacgaaaatggctcttgctccaaccccgcctcggcccccacatcaaaccgtctaataacatcactggttctttctacttcagaatagagacatgcacacttgagatcatcaagaataatacataacaaagtcattatattccgtagacttggctggcagaaatgtgggttgcgactaactttttattcggtggcttccttccagatcaatccagataactccccctccccagagccgccataaggggtgaagccccacatcctcctaagcgcagtagggagggaccggggggaggacaaaagagacttgcctatagggacttacagatgccagacgctgaggggtctggggtaactccgcgctgatttccatcctctcagtacctccagcctcctcgtccgccatcttgagggaaactgacgcctgcagttgccgacccccggccagaggcaagcggaaacctgtggccggtcggagagacagggacgacacttttacgacggcccctgaagtcgggtttgacgcagactcgaggagtggcttccggcccgcttcccggaagcaagcgtcacgacgtgaagggactggagattttttttttcccctctaatttatcaggcgtagctcttggtagctgaatggttgtatatctgggtttggtgctgggaactgttgcatctacgaggtaaaaaaaacaaagtcagcgtccattatgaaaggaagaaaacttgtcgggggctaaagcaagaacctgtcctagctggccggttgttggcctggggatgttttgtatcccaacctccctgcagtagttccccagagcctacaaaatgaaaaagaaagtactcacacatcttctatttttaggattctaccccgtgggcacttgcacatgtgtacaaaaaaagctcgggatccagctttattgggggacacggggggaaataacaaaaaattggaaacctagtcattcatcgatagaggaaagacaagatatactatggtacattcgcattttgaaatactgtgcagctcttgagcaagataaatctgcgtgaaaagatcaagataaattgagagaaaaaaaagccaagttgctgcaaactatatatttgcacacataggcatttaaatgtgaaggagtaagtctgaaaggggaaagggcaaagtagtaactctgagggccaggattcggattggaggaagaaggtggtcaagagctactttaccttcatttgtattttaaattttttacaaaacaaataattttaaagtatatttttaacaaagggaagaaaataaagctccaaacaatgtgaaaagtagaggaggctttccaaatgctgtggtccaccttgatttatagaactttcctgcctaaacaatgtttctgctcaaatgaactacttcctgggtgctaaaatactgtttttccagccttttttgcccaacaaccacaataaatacattttacatcttatcacggtacacctatacaaaattaaatgggtatatatagaatatgtatatatatactgaaacttaaattttctgaaacaatacttccaatatgtcatattttctattcaattgcaatatgtttatgcatttaagccaaaatactggttgtagttattaaagtgatactataacccacaataggtattgtcccacattttgataaaaattgccctaaaagttaccttgtcccttcctgtctctatgcttttacttctgtagttctcttatgctaccccacgctcttctctttttcttctttcattcctagataaatgaaatagactagaacgttcagaaataggtcggggcagtggctcacgcctgtaatcccagcactttgggaggccaaggtgagtggatcacctgaggtcaggagttcgagaccagcctggacaacacagtgaaaccccatgtctattaaagatacaaaaattagctgggtgtggtggcaggtgcctgtaatcccagctactcaggaggctgaggcaggaaaattgcttgaacccaggaggtagagtttgcagtgagccaagatcatgccactggcactccagcctgggctacaagagcaaaactctgtctcaaaaaaaaaaaaaaagaaaaagaaaaaacagaaaataaaaagaaataatagccacttatcaacatcttaatgtaatcaaagcactagtatattaataacactagctatatattaataacaatcctttaggtagatgttactacttctattttactgtcatgagaaactgagaaaactgaagtttagagaagttacataatttggttagggacatgcagcttccaagtgacacagcagatattcagccagcacaatggctcacccctgtaatgttagcactttgggaggccaaggcgggaggattacttgagcccaggagtttgagatgggcaacatagcaagactcccacctctaccaaaaaataata

SEQ ID NO: 1242518 - DNA, 4001 bp, Homo sapiens
gctggacttgagcatgggtagcctgagaaagcttccaccttttgatgacagggcccaaccccagacttcacggcctgtcactctttgaggactctatagagggctccataagaaccagggctgctgagtgagcccaggcagagggaggcctctgcactctccaaacctcatccctgctgtttcagacacagacctgccagttttaggtggggcttctccaaggagctcagtagaatgttctgtggcttcagatccaggtgagagatattccgttcatgcaggaattgcagggcgctagctgaggagcaggacccacgaagagagacagttcagagcccattcccgcctgcctctcgcctccccggctcacatctgcctcctcaagcctgcacaaccccagttcctgcctggctggtctaatgttttccatataagcaccaagatcacaccacttctaggagtttgccaccccacccgagtgcccaccctccttccctctgccccttcacaagtctccccacctctcagaagcttctctggatgccccagcccttgagatcctgctcttttccttggcacagcacttgagtcctacctacaggactctggaatgttctacaaggtccttatattatgttctatgtatggaagcctgaacaccccacagaggggttaccccctcatctctcccacagcgtccttgagcaagggttgagtgtatgagataaacaggaccataaaatttcaggctgtgcaggaggcagctgcaatgcgtgccaaggctctaagcctgggggaggggtgggatggtggggggcagagaacaagggacagagtgtcaggctggtgtcacaggcctttacctaattgctgcatgaagacacgcgccaccttctcaggcagaatcctgcgggtatggatgaagcgagacaggtcgccccctgcgcaaaactccatgatgaggtagatattgtcactgtcccactgtgtttagaggcagagaggcggcctgaagagagtgtcccttctccagctccctttggcagcggccccgccccaggctcacacctgaaagtctttcagctgcacaatgtggggatgtcgaatgcccttgaggatctcaatctccgtgaggaggttctccaccgatgccttgttcagacttttcttggctacacactttatggctaccacttcacgagtgtccttctgcgagacaggagatttggggactctgccttgagggggccaggacccttgtctgactggaaaggctctatctggttccctctgttcccccaccccgcccctccccgggtctacctactgcacaccagcaccgggcttcccagctttcccttgtgaggccagtgaggaatgctgattctggaatcctggcttcccgacacagcctcagcctggtcttctccaaccctcggctagctgatccatttctttgcattctggagtgctcccggcagaggcatgtcactcagggttctagaaccgcccactctgcctcccaactggctccagtcccagactcctcccagcccaccaggtaacctgttttgagcctgttcttcagccactgaccctgcaggtgggtgcaggtgcgctctttaagacctaagcgtggcagtcggctccaacctccgccgagggtcagctggggcgaggccggcctcccgcccctaactattcccacactgtcgctaacctctcagagtctccccggccggcaccagccgagctagctcgggcgggcacggggccatcggccggcacccaccttggcgtaggccttgtacaccgtggcgtacgtgccgctgcccaggcgctcggtgaggatgaagccgtccaggcgcgggggaccccagccgggccccgccattccggccgcctgcgcccgcgcgggcgcttcctcgctgcgggcggcggttccggcgggttgcggggcgggccgagcactgggtggctccacgctgcccccagcgccgcccgccggaaatgcagcgcgcatcggggacgcggatccgcccggctcccggcgcccctcccctgtctctgggcctcgccgggtcacgcgccccgccagttcctgcagggcccacgtggggatacggaggccccgcgagcctagaagttaacaacggaggacggccggcgtggtctccggggactcctagcgggcgcagaggcgtctagagatcgcccacgtgagggcgcgggcggcggagcgggcgtgtgtgggggcgacggcgtccgggaggctcccagggcccctccccaggacccgcagctctgaaaggagagctactggcacgagaaggcgcctttggaagaggccgcgttggcttcccaggcctcccagctgcttttcacttttctgaggaagggccttgacctatttattgcatcttaactgtccccgctctccaatcttagcagcggcgcccagcccctaatcctgtgggctgccccgtcctcccaagtccaccagacatgtggacccgtgttgtctgaaaatgtttttatttttacttaagcacaaaaattgagacgtaacatatacatttgtacatagaggggaaaaaataccagaaaggagttcataaaaccccagccgctgccagtatcattcagtggctggggcctgcggctgtctcgggcccagagccggaggctagttttgtgggaaggcaccccagtccacacacccactcggcagcctcgagggacagggtgctggttttaagggtggactcctacgtgtcccatcacagtgacacaccccccagggtgtgaaccagactccactgggtattagggggccctccgagagatggcttatcagtccctgctgagggatgcggttctggactggctggccctgcccttcctgaaagtctggatgctgctgatggggagcatgggcggggcaggtggcatctgaggcagagacaaaggcagccgtccctcggttcggggaggggggggggtagtcacagcaaacagggccaaaccaaccacaccaggacaggcagaccccaccctcctagaagacgctggacgctaggcaggacagcttggggtcagtgtccttggtcccttccagtccccaaatcccaaccaacggcattgtacattcagaaagtctgaagagagtaaggctcagcaaggggagggctccagagggctcaaagtgccatcccctgcaggagggtgcagggggataaagggctattaatccgtttctcaggaacacgaggcagggaagagcttaaggcaaccagccttctctggatccgtttatgaggcagagaagagcttgaggcaaccagccttctctggaagcctggagaccactggagtgacctggggaacagatctgtccaccagaacctgtgagaggcttattcccagcccaggcaggaaggactgggctgtgtctaagaagccagattcaggccaggcctgcagggtgggggagtcaaggcccaggaccctggcagaaagctccagctgggatgggcccaggtcagcctgtgatcccaactgtgtgggggtgtctgtgtgtgcacaggacgaagagaacttcagtcccactgcttccagagacaaaagaatcctaccaaaccatcaccagagaaggaaagagagctttgtttttttttgtacatagagggggaaaaaattccctgtccctcccgttccagggagagctggtcgctgagggaggaggaagagccacggcaagaaccctgccaggtctgtgctgggcacaaccaccaccacataaggcacccacggaaagtgcagctcagaaggcaggcgagagaaaggctgagggggagagaagagaggaggactaattcccctggaaggctccttgggcagcagatgaagcagctctgtggaaggttctgctgctgaagatgccctgggaaaactcctcctgggcctgctggaagctggcccctgtccgtcggtagagggag

SEQ ID NO: 1242519 - DNA, 4001 bp, Homo sapiens
gcctaaatcagctccttgattccattccttccatggagaaagatcctcatgtaaagagagctgagaatcactgtaatgactccggtctccagatgcacacaccatgccattactcattccactatccacagtttctgtgttttcagtttcagtctgcccttggataccctgaacacctccattcaaatgctggtccttgggactgtcatacagggtcgctgttccttcctgtttcctctgccatagctcccggtccgaagatgacaggagagagcttccattagttctagtgaaaaactgattttctgaaaaatcttctgagtaagactgacacaatttggaaaaatctgattcagaacgactaagtttagcagtgaaaaaatcactctgtgagtgccagagaggtgttgcatctgcataatgggttgtggtttgcttttccaagatatctgattctggcaactgtgaggagattttatcataatctgatttatttgaaattctgctgctattagcagttttattcttggatctagcactgtgtgattttgagcttggcttggaagtacttccctttgttagaagctctgacttggaaagcacagcgtaactgtttctattgaggtcagattcaagatcttcatcactgtcatcaggtgactgccaattgttcttcttgatttttggctctggagtagacaactttatagccatgctctcatatgtctgggaggatggtatccctttctcttttctttctctgatgtcatgagttagaatatctgttgagattccaatgcctgttcctttgagtttatatgacttttttaagacagaatccctttgttgaggggtttcaaagtacacaagtatgggtcgaggctttgcatttgggcagtctctctggtgtcctatcctctgagcaaattcaattttaatagcatttggtgcatctgaaaaacccattttatctattagaatttggtacaccacgctttcaacatattcaaatctttcttcagtcacatttaaaaatctcaggcttgccttgctacccatatgacctaagtgcttaatataatcatggatgtctctagtttccctccgagactggacaaaccctgtgcgcaactgctcaatttcactttgtacaacctccacactgctggagatctcatcgatggagtgcttgagagcattgacgtgccctcgtagttcagaaagttctgtttcaatctgacttattccctgaagttccttaaagatcatttccatgacatcatgtgtttggctaatgcagccagaggaactgaaccctggctccagggcatttgtctttgggtttcggacagttctgtccaaagacttacttcttattccccaggattttttcatggtgcttaactctgagtctgaggagacacattcttgactctttttccattttctcagttttcgtaaagctcccagttttaagccatgtagagtacgctccccgtcagagctgccctcagagggtgcaaggctgcttgaactctttctgttgcgtctaactggcattgtgtgtgttgattgtgcctggttttctgtgctactccttagttcatttaatgattctgagtaggaactctcgattgaagagagctcttgaagcagatcctcattatcactgttggttactttagcattcttttgtaggccattggcaatagctactcggtaactgaatgttggtgagagggaaaactctttactggcctcgtcttcctcagtggataagttgtgagtggatgaacactttgcaatcttctttacagtgcttttaaaagtgtaagaaaatttgggggatttggtctggccagcagtggggaagtcttgatcctttttctgctgacgatactctttgtttttgtttgtatttcccaatttctttgtaaacattcctttgcaaagcttatgaatgtaaggtaaaatcaagctcttgaaaaaattagccaccatggagagcaattagtgcaagcttttctgccccagaaaagtaaacaagtatcaggatgaaaacctgaaaatccaaggcaagcatcactgttcagaagttctgtgaatcactggaaagagcaggaagggcaggcatggctctgccacattgtcgctgtcctgtgcaaaccagaagcaaagctccatctgtgaaagacattctttcctggaggaggggtttcatgaatctctctcatttccacataactccatgtagtgtctaaaaagaaatgaatgttaaaataaatatcagaattcaattctagatttcttccatttccaacacgtttcaaaagtattcataatacacaatgtgtgaaaaattgcagaggaagtaggagaatatatgaatttcaatgtaaatttacttttaaaataactactgaaagcaaatcactaccaataactatgtttataatgttttttgataaatcatttatgggtggacacaactgaaatagtaataaaaggtaattatgattatttagaaaacattgagtaatacgacagtcaatttatacagccatattgacttcataaagtcatttctactctactttctttcctaatatcatgtttacttacacaaatgtaaggatttaaatctatgtatattcccctcacatccaagatattcaaaattcacaaattaatattatctatatatatataacctcttttgattcattcaaataatctttttctgaccacataaataaataatctctatgatgactagtttcttgaattatgtgaagaaaaagaaaataacgtttacatttaattttgctggtttgccagcacagggcctcatattagtaggaactcaaagttttgttgaattgaacttaatattttatcagtgaaatgtaacccagaataatagtaacagtcaaaaggctttgttggtattccagtatgtgtttgggaagataatctacttaattcattaaagaacacatcataaactacagattgtctcagaaatctgctcttttatcagctctctccacttggaaatctgccagttgcatttcaatcaggctctgcaggggatttggggatacatgttctggccaggagccaagctccacaagagacaaggggagcatagaagaggaggagaaaagatggagcgaaagagatgaactctaaagaagtccaagtctttctgggtttcaaatactatcagggtataactcttctgctctgaaacaatttggtattcattcacaaacacaaaccaggacctattttctactaataaaaatgtcaagaaatttacttttgagttaatttaaaaagcattttttatactcctatgtgacatctccctgtgaagaaaaggctttggaaagttaagctgcaatcaggtagataaattatttttaaactaattttagtcgaataaaattttctacccatcactcaatccaaaatctttggtcttccaaacttagaaacagatggttctttttgtttaaatcaaagtagcaattctgttaatgcctctgatgttttcaaatctaaatttcctgactggcattactggttcaaagctactgttctaggcaacaattgttagaaaaagtttgagcgggaaagttcaatgcgaaatgaagcccaccaaatgcaaactcaggaacaggtgtccacagttgcacacacgaactcacttgctcgtattccaaccacagagaacaacctgttattcactaagggctccacactctttcatgccccagtaacttttatgtcctctctagccagaatatcattcattatccagccctcactatctgtaaaaattatgtttaaactccaaaaccatttcagcaaccacccaaactgagctcatctctctcctagccactctttatcgaagaattggccacatttcagccacttagtatctccacctagttgccccaaattaaaccccatccagaacctagcaattttcc

SEQ ID NO: 1242520 - DNA, 4001 bp, Homo sapiens
tccaaaacccacaacacaccgccttgggactacctccgacctgacttcctgctttgcccctccccgtcaggtgtggcacggatcctgacccacgaggcgggaatcactgacattgtggtgttacaggtaactttcccccttctctgccaggagcctgggatggggattaggggccccattcagcaatgggcaacccttggctgacatctcagggctgagtgggaacttgtccccaggcggccctgctccatgacacggtggaggacacagacaccaccctggatgaggtggagctacactttggggcacaagtgcggcgcctggtggaggaggtaacagatgacaagactctgcccaagctggagagaaagaggctgcaggtggagcaagcgccccacagtagccccggggccaaactggtgaagctggcagacaagctgtacaatctgagggacctgaatcgctgcaccccagagggtacgctttcgtatgggctgtaagggaaaagggagggggatgccgccttctgaagacacatgttggtcagttcccctgaaaaaccctgggcattcttaattcccaaattaatcctactggaccactctttgatcttctttcatacagtaaaaatacaatagctgggccaaggggaagttttcaggacagctcattccatcaggaactcatggccttgaaccaagcttgccaggaagtggggaaaaggcagtgctttccttgacatcacgctagcaagtttctgtcgactcttatgcaggatggtcagaacatcgagtccaggaatacttcgagtgggcagcgcaggtggtgaaggggcttcagggaacaaaccggcaactggaagaggctctaaagcatctgttcaagcagcgggggctgacaatctgatcagtgcttgaagctatccagaggcacaactccagcctcgttcaggccggacaggattcatacgccatcttttctgtgtctcctgagctccctccatccttcccagatattagaggccaaaaaaagacttgcattttttctcagtctgaaggtctcctgctaactaagctgagccccgcgtggtgggaatcagatgtacccatccatttctgatgcactcaccgcctctccccaagtcttgggtctgtttgctattttgcatggtgggatctctggcccctcagggacttgagattatttaagtactagttcctaacacgttctggaaaataaaaataactctgggttaaggtttaagctgctgctgctccttctccagcctccgactggtgggctgcatatctttccttcagcaaagcaggactaattgtgtgtcccggagtcacctccctcaggttgcgggcctcaacccctccgaacctggcttccttgtcagtgacatgggttgtgtaattatcaggttagactgtgacgtgcctgatggagcctgacacataggtgctcaagaaatggtagcagcctttcccgttaagaaagttggaagggggccaggcgcggtgtctctcgcctgtaatcccagcactctgggagaccgaggcgggcggatcacttgaggtcaggagttcaagaccagcctggccagcatggcgaggccccgtctctactaaaaatacaaaaaaaaattagccgggcgcagtggctcgcgcctgtaatcccagctactcaggaggctgaggcaggagactcgcttgaacccgggaggcggagtttgtactgagccgagatcgcgccactgcactccagcttgggtgacacagcgagactccgtctcaaaaatgaaaaaagaaaagacgtatcggaagggagtgccgcccgcttactgacaaccactgctgggcaccggagagaccccagcagcaacatgattgggccggtgggggattccggttccccagtacctcaagccgcgcgggaaactcggtgactcgcaatcccctcgcccttccgcattgcgggttacttcggttgttaagtgacagggacttccgggaaggcccggaagtggcccggggctgtccgaccccgggagcccggcggtcggcgtaggggaggcggtggaactttgctcggtggccatggggagggattgcccggtggtggtttttcagtcgttgctgagcagctgaggtttatttttatgtattttattctgcatccagtcatccattaaagccaaagtttattaagttgtctggaaaagcgatcatcttgggtacgaggaaattgttaggtcaaagctgttcgactacgatagttgtttgcccaagtgaaggccccagcggagggctctgcgaaaaagtaggtgaaaggcaaccaaaaaagccgaattaaaagaaaacaaatgaacaaagttcagagtaatccccagggtatggtacattttggagaactttgaacttaatttttttaaatagttttgcgggagtaagataacgagatttttttaagaaaagatgactttgttgtagtccactttatatattttgttgcctgtgtttttagtgtcatatctaagaaatcgttgccaaatctaatgccatgaagcttttcctgttttcttctaggagctttcgttttagcttttttttttgagacggagtttcactcttgttgcccaggctggagtgcaatggtgccatctctgctcaccataacctccgcttcccgggttcaagctattctcctgcctcagtctcccgagtagctgggataacaggcgtgcgccaccacgcatggctaattgttgtatttttagtagtgacgggatttatccttgctgcccaggctggtctttaactcctgacttcaggtgatccacccgccttggcctcccaaagttatcgttttagctcttacaagtaaagtttttgatccattttgggttaaatttctttttaaatcaatttaatttggtataaggtatacatgatgttatgaggctacatacaggtagtaaaaaggttactatagtgaagcaaattaacacatccatcatttcacgtagttacccaattttttgttgtttttgtggcaagaacattttgggttaatttttgtatatggtgtaatttttttgtatatacaccatatacaaaatatatgatgtatggttttgcttgtggatgtccagttttcctagcaccatttgatgcaaggtctgtcctcttagtacctgtttttggatttttttattttttattttttagtagagatggcgttccactaagttggccacactggtctcgaactcctgacctcaggtgatctgcccacctcagcctcccaaagtgctgggattacaggcgtgagccactgtgcccagccttgaataactcttcacaatattgctttctagaattttagttcctgcctctttttaaactataaactagtattacatttatagccagtatttaggtgtaccctccctctcattagtttatgcccctagacaaattctctttttgcttaagtacacctactttcttccactaaagttttgtacattgcaaactgttgagtctttgcatgtctgaaaatgtcttcatttcccccgtgctcttgaatggtgtagctgatagcaaattcaaggctgagttttctctaggtttgaatggactccaggtgtctactgtagctaactagatgtctgctatcactgtgattgtctttcctttgtaagacttttctatttttttttttttgaacagcatctccaatttgcattcataaaattattaatccaaattgcgaaagtagacttttacagagtcacaggtcagtaacaaaacaggaaatgaaatgttccagagcctttttttttttttaagatggattctcgctctgtcacccaggctggagtacagtggcgcaatctcggctcactgcaacctctgcctcctgggttcaagcgattcttatgccacagcctccctagtagctgggattacagatgtgtgccaccacgcccggct

SEQ ID NO: 1242521 - DNA, 4001 bp, Homo sapiens
atataagagtctgtagtaaggacattacccatttattcagccattcctctatggctgggcattcaggcaagttccaagtttttcttactacaaaaaaggctgaaataaacatacacatgtctacttgtgcacgtggacaaggtttctctgagagaaacagcaagaagtaaacatatgggatcacaagatacgctcatttgaaattgaatagatatgctaaagtactctcgaaaagagctgtaccaatttatacccctccagcagtcatcagagagcccttggcccccagcctcaccactgatgtgtctgcctctctccttctcgaaaagtgtacaaacttttaaatatctgccagacagacctccaaatcaacagtaatgtgctgtcatcttaatttgcttttccctggccacaggcaaggttcacttgccaccgggatctcgtctggagaactgtgtctacacccctggcccagaccccttcaccaccagtcaatgcttccacctctctgggtcactcacataccttctcctgaatctggcccccgatgttccgcaaggcctcctggaaaactttgttcttgggctccaagctcacacatctctgcaggtcaaggacagcctggtccaggcggcccagcttctctagggcttggctccgccggtagagtgctttgacatccccaccatccttttcaatggctgagcacaaacaggagcgctgtcagcacccatgaggccactgtctccaggcaagagcagtagggaaagatctcgaggaaaggccagaagaaggtgggggggacgaatgtggggctcggtgcttcagcctcagaaaaggtgagggtagctgcagaaaaggaaaggcccgaggcagtgggaaagaaagaaggcagatgtgtctctggggccaaaggaggagaatgtgacggtgcagcggtcccagagtccttgcccaccacagaagccctacagctccacaccagggcccaccattcccctacctttggatgcctctgtttctgctttgtcgtaatcttcctgtaagagaaagacaggagcctgaaggaatggtcatctccctctcggggcactaaccaggcagcaggggtactctcgctctccaaggtcacccgatcccccaccaccctgaggtgcaaaaaacatctggcaagcggggatggcctgggagcgtgaatgtccagctggggcccaagcatcagcttagatgggcgaaccggggcccgggcgggcgaggggaagagcgccaggctccctcaccagcttgaggtggcaggcggcccggttccggtgcagaacggcctggtcctggggcgtcgcgtccagacccagggcctgagtgtaggccgccagggcgcccccgtagtctccacatttgaacagctcattgccctccttccgcagctgctccactgagctggcctgtagagagaaagggggcggaaacgtcggagggggttcggggcagagcccgggagctaaggggagaggagaggagggatcggggcgagcctcatggatggggagaaggaggccagggatggtcagggcgggtgcgaaggggtgatggcgcgggggttgggtacgcaccccgggggtggccggccggggctcgggggtccctggaccactcacagtcatcgcggagaggttgtctcgtgcccgcgcaggcgcagtctctggggcggggcgagtctgggttcgggacgccaccggcagctgccccgccccactcttgcgtcggaggtggggtcagagaggggcagggctaaggagggagcgcgcccgggcaggggcggggcgcttggctctggatcgcaggtgcaggcaagctccgggcgcacctaagctgtccccgcagagacctgcagggagctcgcggcggaggacccagagggaggcctgcggtggctccagcccagactccggccccgaccgcagcagaagtgcacgaggtctacggtcatcagggtcacaaccagtaggttgtagaggcccagcactaggagcgggcctgggcccctgcgggagagaaaaagtatctggatcccggccccgaccgcgctctcgctgctgcgctctgtggggggtacagaatccctgggagtccggagaaagctcaggactccctccccaaataagtgtcgtcttacatacacacatttgcatacgaatttaggagctcatcctagagccacccatgggcagattcaggatggctccccattaccagcttgcacagccccctgaacttctcctttgtaattgtaatcatgatctacatgattttctgttgcggtctgtcccttcactagtctgtaagttacaagcctaccaccccataatttaggaacagagccccagatactggaacaccctgtcgatgttccagtggctctggggttggagatctcacctgaggatgggcgggggcggaagagcggacagattgacttggtacagggcctcaaattcagcccgggtgcagcaggagccccctgcagcctgcaggtggcagcagtaggcttcctctggagaatcagacagacgagggcaaaagaaaccagggtagtgacggccatggacatcccgggtggtctggcacaagtgagggtggtggaccagagctgaagagagaggtgggggtgctagagacaagcaggaggggcctttccacagctcactccacccctactggagagtaaaagagatcagcccctaccagaagaaaagatgcccttccacccatccccatcagttccagttcccaggaatagcccatagcaccagaggcaggtgggccacaggggtaagtgctgtacctgagagagaggttggctggacaagggtcacccagctgaagagcagcagtagccccacagataggcctgtcagcaaggggcctgaccttctctggatgcccatgagagttcactaccacctctgtcctggtcctgggaaccccaacatctctctttctaggccgtgactgcagacaataaggaaataaaagtcaaagccccaaggcccttgggcaccattaatacgagcctgaagcttctctatcacaggcttttagagagagatgacagggactgggtttctgtctcctgttggaaaacgtggggcctgcattgccaaactgctgaaggagagaaggctcaaaggactagaggacagaatgagggatgagagagcagctgagccattagtatgaagaacaaacaagcatttacagccaaatatgtttctacccattctccaacttccaggctgccatggaagctctgggaattctgaccctcctatttcaggtcccagagacctcagttccagcatgtggggcttccctccctaacctctgctacgtggcaaccaccaagactagctgaaaaccaagggtgactcctttcattagcctttcccctgagccttatctgccccagctaccagccagaacacaaaagctacatgtctgattagagtatacttagctaatagggaaccccctctcacagagaagttctatggggatcaccaggtctctcttacccctcagctgcccctaaggcagggaatttctccagaaggccaccagccagcagaattaagtgttattccagtgcctacccaggcctgacaacatcatgctcccaggacagcagtgacaacactcatcaccccaggggcccacagaagatgcctagagactgaaataggagctctcatagcataagaagacaaggcaaatttcatctgcaacactgaggacaaacaaaggcagttcctgcagaaacgtcacagctacctgggagcctaagtctgaagcaattaggcagggctcccagggaaggctctgatttttcaggtcaggccctagggtctcctggagggtccaaaggtagactcccctgcccacagaacctggcccatccctacagggagaactatttttagaacacttggagaattttcagagct

SEQ ID NO: 1242522 - DNA, 4001 bp, Homo sapiens
gtgattttacctaaaaaatgccagaagtgtgctaattgtccatgttgtctttctgtagtttactacagatgagcaagagcaatcccaccattccctgtgaggtaggcttctcctagtgtttactttggtctttttttttttcttcaaatttcttttgggaaaaaaattaagttacaattatagcaccacagcaatggctacagttatagctaatgtaccaccaccaaccaatttgtaaagcagtgccatacaccttatttgttgttctatactcaacatcccgacagatttacaggtaaaagctaatttacacaagtttctgcatcctcacaaaagaactgcaatactgctctgtgaaaccaattaaccgttaattttcaaaggcttcatgcagaaaaagatacctgactttacaaaggcaagcaaagcatcagacgtctgagcgcgccaggaaaccgcagttatttctattccttatcccagagtacatttttctttgtggacctaccgatgttgtttccaagaacataatcactatttaagtagtaagctgtcaaaagtgctaaggcattctctaaactatcttcccagctccggcccacaatgagacatgtcacagctaaatcataccattgccgtttttctatatttcttcaaatgaacttcagatttctgaagtgcacaattcgaattgtacgctattaatataacccaagataccagtgaccatctcaaagctaataaacaaagactagcggtggcaccagggccctaccaggaagtaagcaaagccgtgtggccggtgcgatcctaagaagtcgcttagagcagacaatgagagggcactggggcttccaagggggccagcaggagttaaaacgcttaagctactcaaaagccttatataaatctaataagtgtttcacaacacaggaactgggaatcccaacgcattttcggacaacccaaaaggtctgaaaaacaaactcgagcagtcccctccaaagcagctgttggctcagcctccgagcttctcagcccgcagcctgttttcaaacttcaccatccctgacggatgaaagaccccgacctccgccgcccgagctcccagcgcctctcggggtttcgaggtgcccgagcctgcggagaagggaaaggaaacccgggccgggttcggcggaggagaggagccccgcgcgccccgcagcccagacaaagctgcgcccggagagcggcgctcttcccgccctgtctgcggagaagcgcggcgcgggccccgccacacgtgcggccgcccctcgggggccggacacccgccccacaggcgaccccgcaacacggacgggcacagcccccggccacggcagggcggggcaagggcgcacgcagctggccagggtccccgcctgccgctgcccccacgcgctcgaggcctccgcggactcccgcccctcgcggccctctccttcgctggcccggccgtcgggcctcgggaaacaaaggagccgccgccgctcccgcacgcgcccgcctcatcgcgtaccctccccagcccgccgggcccggctcgccctcgcccctccccgagtccgcgcgccggccgcctgcggcccctagacggcaggcccggcagagccgcggcctcgggtgcgctgcggggccggcccgtggccgcactcaccgctgcagcaccaggacgacggggagccgttggggaacttggctgagtccggagcaatgcagacgctggagctcaggtgtggacactccatggccacgaggagggcagctgggaggactgcggctccaggacccggcgaggtgggggcggaggaactccggaggctccgtctggtgtcgcttctagccgggcgctcggccgacggcggctgcgtctcgagcccttgcgtcaaagaaagcacgggcttccggacgccgggttttctcgcccgccgtctcccggcgccccgctccgtagaacgtgtaactccgagatccgggttctgcagccacccctagactggaggcttccgcctttccaggccggcccctccccgccccgcccccgggtccgcccccgcccagcccgcggggtggggtcccggcgagctccagctggtggcgcagagtccggctgtgttccgaagtgactttcctagtcacgccgcttccccggccccgggaagggtggggcgccgagcagggcaccccgggccgtccgcggcgtttcctgcggtgggcggaggatactgaacctatgtggtgcggactactcggtggcttcgtggtaaaaatccggccgctccgcaaagtgtaaagaagaactttaaaacctctcgggcagacaggcaccgtggccctcattttatacacgaagaaacaagctggggaggccaagggcctggccccgggggaggcgggcagcgggtttcatgggtgccagggcagtcccgcccgacttagcgttaggctccttgcggcaggtgcgatccgtagccctttctaggttctgaacacgtggcgttagccagccacctagatgctgcgtgggtgggcccgcaggggcgcccatgaacccacgttcaaatcctgtcactgtgactcaccatctgcgttacctccagcacatcgtaggactttcaagccaggaagttcaagtgagataaacgtagcctgggattgctgggcaagctaaactccccattaccaggcgataagaagggaagggatctagcatttgttagatacctaaggtctcccagccaggcacttcccataccgcatttaagcctcgcaacaccctaccagctgttaccatcccctttttaccgcagggggaaaccgagtctgtaacttgttgatctgtatggagattggatccctgaccctctgacctctttttagtgagggattagagaagagggcaagcctcaaggggccgcttgggccggcataccctggatcgagcctgcgatctcactggggcacttgaggacgtccggggctattacaaatattgcttccaagttggggctccttgtaaaacccggcgaaggagcctcggggccagaaggcgagcaggaggagggggaagactgatgtggcaatcctgcggccagagcgagaggaggaaggaaggtcaggaaatgattaaccgggccgggcagtggttagagccgggcacctccccgcaatgcagtcctagagcagccagggacgccccgtcaatcacttcttactcctccctacctcccacgccacaagtcggcctcttccgcatagacctctgcctaatggtatccacccaccgggggcacctctgctcatcctttccccagaagtatttctgggtcctcaaagatctgtccttttccaagtggtatttgctgttagagcaagcctcggcctgggatttttatggcagtgatgcgttgtggaaagtgcgtctgcctaggaaggcaggccggcatgctttcaaatcttagctctgctgcctacttgacggccaggcttagcaagcgtctctagccgttccaagccttttctagatctgtaaaactggaagaagaatacttgtctcgcaaggaacatgtgagaattcatgaaaattgccaccacatactaggtggccaataaattataactttgtatttgtttttactgacactagatgagagctgcttccctgggaagcgggaggaggagaaacaataatatctgcccttggctcaagttcttccacccatctctccatgtcaacctatttgtctttaaggccttgctccaccaaccttctgtttcctccggacacccacccccacttagcatccataaccccttgttcggccctggagcatgacctcactcaggccatgcttcatactggtatgtaatatttcttcaccctctcagagactccgtttcctaatcccctagacttcagtttaaacatcacttcctgagggagtctttcccgaccctttcccacccgcagggtacct

SEQ ID NO: 1242523 - DNA, 4001 bp, Homo sapiens
gacaccctgaaaatggggctggttcccatcagcctccttaactggaagggtatcatagtaatctgtgcactctgcactgtgttggtgccacatgggaagaaagggttttgagagaacaaaatatgtacaaatgacaataagcttctcttaatattatgaaataaagaagagttcttaataagacttcctccaaacacattccctaccaaggacaggaagtattggaacttggagtctaaaattgtattatggcagagcatagtggctcacacctgtaatcccagccctttgggaggccgaggtgggaggattgcttgaggccaggagtttgagaccagccagggtaacatagtgagatcttgtctctattacataaataaattaaattaaaaacaaaattacataacttagaccagaactgtgaacaagtacctgaagccaaataagacagataaaaatttccttctaaaactaaagcaagacaactgacaacttgctgggcaagtaattaaattattattattattattaatagttaataaaacaatagctatcaggtagtgagcctggcactatttaagtacttaacatgcattttcccattaaatctttcaacaattgtgtaaggcaggaacgattatttttacatcccattttacagatgagatgtcaggtttaaatgatgtagtcatttactcatggggtgtgtggtggtatgtaaaaaaaggaatatccacctatctgtttacctccctccctctctcccaacatacctatccattaagatatttggatttacatatattaagattgtctatatatattaagattgtctctatatatgtgatatatatgtatatatttgtatatatatgtatgtatggcatatatattgaaggcataatatatgcacattaagagcatgaatatatatatcttaagagcacacatatgtgtatatgtgtatgtatatagctatatacatataaacacacacacacacatatacacggagaggagaaagagcacagactttgtaaaaatatagatcttagtttaaatcccaactatgccgtttattaattataggatctgggattctatgtccgtttctcatctataaaataggaataatatcatctgcctgataggatggttgtgaggattatgcaggtatcatgcaagctacttgacacaggttcgtctaaatgacaactgaaaaatttttttaagtgattgatctaggatgtccttcccagtaagctacaggattagagtgttcatgtgaattgcccagacctgcctgcacagagagaacactgagggttccaaacgggacctcctctccctgcacagagcttcctcttacaattttttgtattgtgccaggcagcctggtatctatgtcctctcggatttttctttccatatattgtatctaaagttggggctccatgagacagtgaccttacctcatacatacttttaagtacagttatgccagtttgaaaagtgttcactgttataagcatggtcattttcacttttactcactgataccacaggaggtcctagactgtcaccctttaggaaggacatgtatttattgccaagatattaggtacaatcttccttcctttccggggaccttccatgggtcacacctgggagaaccctcctgaatgcagtgtgtgtcccctgactcctctgagcttgactttcccaccactgggctaatctagaaagctgtagtagatcaaggctcacaggacgtggtagatatcgaagtcatctgcagggagagacggctgagaagtcattttaatggaaccacgttggacttttgcttctattcaggagctacatctattcctttcaacttcatttctctgagcctgttaacgctggctttttgttttaaacaattgatatgctcctctctcttccagtagctgcgaactgattttcacctgtatcaggcaccactccaacttggattttccgtacatcataatcctttccattcaccttcaagattctatcatgttgccatgagacactgttactgggttgtctgaaatgttttagaaagattaggctccagagaatgaactacacatataacctctcttccttcttccatcactcagtttctcttgtgtatatatatattacacatacacacacacacacttaacatgtgcacaaaaatttaccgccactgagttagtggacactacggcaaccctgcctgctctgggcactcattcccccttcccagcgactacaccacacctaggagccctgagggaatttcctcaccccggggagcgaggatttccacttctattcaggagctagatctatccggactgaataccggatcagaaaaaaaaaattgccataaaagaacattatgggaacgattgatgaaatttgaatatggataatatgcagatagttttttctattaatgttgaatcttctgaatttgataagattgtactgtgtttatgcaaggggatgcccttgttcttagaaaatacacactgaagtttttcggggcacaggggcatgatatatgcaacctattttcaaacggttcaggaagcacacagggacaggaggacaggaaggaaggggactgataaagcacatactataaagccagtgcacccacacgccagcagttggtgattccgagtgaaggcccactaaagagcactattcttgcaactcttctgcaagtttaaaaaattaaaaagaggccgggcgcatcggctcacgcctgtaatcccagcactttgggaggctgaggcgggaggatcacgaggtcaggagacagagaccatcctggctaacacggtgaaaccccatctctactaaaaatacaattaactgggcgtggtggcgggcgcctgtagtcccagctactcgggaaactgaggcagaagaatgacgtgaacccgggaggcggagcttgccgtgagccgagatcgcgccactgcactccagcctgggcaacaaagcgaagactcggtctcaaaaaaagaaaaaaaaaattaaaaagaaagaatatattacacatattttttgctaaaatggatttctctccagatatatgactggtaagtcaaaaaaagcaaggtgttgaggaatccatagtatgcaccccaacttatgtctaaatggttaaaaaaaacccacatatatgctcaggctacacgaagatatttagaatattcattctttgacacctggataaggaatcctggcaagtagagctgtcctctcttgcaggtatttgatatttgcgatgtatttacagaggtatctctccaagtcacctcagtggtggttctgcaggacttaaatcctgtaaacttgctctatttgtcagtgaggctctcccaagtccttcattttctcctaatcaatagggtcttttaaaagtttcattttgtgtttgatgctggtaggtaaaaatacaattatttgtcatatgttggttgtctatccaggaacctttctaacctgacttactctttaattttttaatttttatttaaatagagacagggtctcgctatgttgcccaggctggtctcgaactcatgggctcaagcaatcctcccacctcaccctcccaaagtgctaggattacagatgtgagcccctgagtatggcctaacttgacttacttaagtctaatttttacataggttctttggattttttataaacacattcaagttgtctgcaacaaaatcagtttaatttttttctgagtcttacttcttctttactagtgaggactgccagtaaaatagtgaaaatagtgaaaaattgtgaacatagtaaaatagtgaatagaagtggagatagctaattgcttaactcagagagaaagctttggataattcaccattaagtatgatgtttgcagacatagtattgaagagttgtaatcatgaatggatagtgagtatgaccagatttct

SEQ ID NO: 1242524 - DNA, 4001 bp, Homo sapiens
ggtaactgggacaacaacaaggtattttttaaatgtttccttaattatatctaattttattagcaacacatacctgaagacatttttttcctttcacttccataaatatgagtgcattttcatggagaaaagttcgtaatatagtgctagacttatgaaaaaaatttaatgtactggctttattttccaactgtcttacccaaaagtcattttgattattttccattatgtccacgctttttattttttattttttgagacggagttttgctcttgtcacccaggctggagtgcaatgacgcaatctcggctcactgcaaccttcgctttccaggttcaagcgattctcctgcctcagcctccagagtagctgggactacaggcgtgcaccaccacgcccagctaattttgtatttttagtagagaccgggtttcgccatgttggccaggctgatctcgaactcctgacctcagtgatccgcccacctccgcctcccaaagtgctaggattacagatgtgagccactgcgcccagccacgtccacattaataaacaaatgcccataaagattaaagtccaagtaaatatattaaaaaacgaaatgctaaaaaaggcacctttaaaacatttttgttagtttttcttatacattgttttcttaaaaaaacagatgtctatgtgcaaaatttcattaatgagaggtgtattttttttttaaactactacagggtcttcactaatattaaagatgcatccaatgtgtcacaagaaaaggaatacatatttcaaagcagccatatcaacatgataaagacataacacaaccgatatcaccttccagatatgcttaatagtccagggatatgctgtaaggagaaactacccaaatccatcatgaatgacattcaccaacgaatcttaaacagaatcggctgaaatgcaaaaatctgcttacatagcaaagccgcagcagagcaagcctaaaacaggaatacttccttaacaaataccacttggcatttttaatggctgcagcaagatatttacaaaactaacgatgctttgcagattcagaaaaggtaacatcctttagatataaatccctttcatctgaaaccctcaggtctcttaacaaatactaaattccttaggctctgcaacacctccgtgtcaggtaaattttttgttagtgattaagtgacttgttcaaggtcacagaatgaactggaggcaagaaataaacccaggagggtggtctgcagctttataatgcacatcactgctagtaaggattctgataatttccaaggtggagtggcggtgaaattaacttgtcccacaactctaggatggaaggcactttttaggggaaaaaaaaaaaatcttctatttgaggaagtcatagttttaactctgacaagcttatagggtctttaaactcaaacttcactaaaatcaagtgtgactggggaagaagagaaactgggaaacagttttaggagctacagtaaggcctgggattgtaggcagattgcagaaaaaaaaaaaaaccggaagcaagaggaaagaggtcaaagtcgggtataagtgtccaagagaacggaagattggtcaaagccaccttttaaaaccaaaaaaacacacgaaactcgcttggcaatcctaggtagatggcgtaaaagactcaaggttgggcctttcctctccacaagctgattctacctttaggagttgtcccactcctctccgcggacagagcttgtctccggggtaaccagcagctggtggaaggaaaggcgttcatcgttcacagcggacgacttcccagagaacaggtgctagggcccaagacccgcactcaccgtgacgccgggcgcgcttcactaacgccagccttctcgccaaatgcccatctcccaagaactcgagggagaattagccttggctaccaggacggaagccagcccagctcacccccttttcccgatttgcattgcgaggcgacgcgtcgcgtctccagacgtcacggcaggggcggggcttcgcgtgcgctcccttgactcctctctcttccaccgccctccccttttcggtgagggccgcggggcgagggatggtcgagggagggtcgaggaggacgttatgggtgggcggtggcggcaagggcggggtttctctgagtcgggtcaacatagttggccggtcccttaccccccgcactgcaccctgcatttccgggttgcaaggcggcgcctgggccttgttgtggaagaagcaaggttgctcttgcgtccctttactacgttattttcctcctcagattggaaattagaaaaaaggggatttaacgcccctctatttctggctaaacattctctgaagccaagcctttggtcaaagaaaaacaagtattatcctaaaacatattttatgtacaatttttaacgtcacttaaaaggccccggcgaggctgggcacggtggctcacgcctgtaatcccagcgctttgggaggccgaggcgggcaaatgatgaggtcaggagttcgagaccagcctggccaacatggtgaaacccccgtctctattaagaatacaaaaaattagcttggcgtggtggcgtgcgcctgtaatcctagctactccagtggctgaggcaggagaattgcttaaacccggggagcgaaggttgcaatgagccgagatcgcgctactgcactccagcctgggcagcagagcaagactccgtctggttgggcgaaggccccgtgtaatagaaacgaaatgagacgtctgaactttctcgcgagctgatctttgtactctcttagagaaaggtgattggatgctccggttgcctgtaaacataaaattgacttgggtggagctttaggcagtagtcactaagtcctcaggaacattccaggtgtctcagggatgggaaatctggctagcgaggtctagtaaatgctttaagtgaaagtgtgtgccacatggtacagtgtacactgctcgggtgatgggtgcaccaaaatctcagaaatgaccactaaagaacttttccatgcaacctgttcctccaaaactactgaaataaaaatttttaaaaataaaaaaggataaaataaagaaagtgtgttcaatgaatttgtgatgaaggccaggttgcagtggcccaggcctgtaatcccagcactttgggaggctgaggcaggaggatcccttgatcccaagagacagagaccagcttgagcaacaaagggagaccctcatctctacaaaacaaaaatttaaaaattagaccgggagcggtagctcacgcctgtaatcccagcactttgggaggccaaggtgggcagatcacttgaggtcaggagtttgagaccagcctggccaaaatggcaaaacctggtctctactaaaaatacaaacattagctgggcatggtggcgcgtgcctgtaatcccagctactgaggaggctgagtcagtgaatcgcttgaacctggaaggtggaggttgcagtgagccgagatcgtgccactgcactccagcctgggcaacagagcgagactccttctccaaagaaaaaatctaagttacaaataggatttccattttccatagaatctaaaactccccaaattgctgtgaactacagcagtattttctccatttggtaagagacataaggacagcttaactacccttctttatccaaactaagtcaaaaacagaacccaggtttcctgattcccactcccaagtaaaactaaataggttttatgtatgttgcagctgttgcacccttttcctctttgaaataaaacttttctatttcattggggaaagaaaacatgactgaaagtccaaaatgtggccaggcgcggtggttcatgcctgtaatcccagcactttgggaggccaaggcggacggatcacgaggtcaggagatcgagaccatcctggctaacacggtgaaaccccatctctgctaaaaata

SEQ ID NO: 1242525 - DNA, 4001 bp, Homo sapiens
ctgcttcagggggcaggggtctgttgctgagccacggattttagcccgaaatatctacatcaccagaaatctgttagaaatgccaatttctgagttcccctgagcaattccgattcataaagcctgggatagtggccacacagagcacatcttggatacctcagtgacacccacagtctctaggctgactagaatcctggaagactaccaaggaaatataaagttttctaaatcattatccatcccttaattagcgcagaagattcttaagtatttgtttctacagaaaagaaaaatccttccaaatagcattatgaatagaaatgaactcatttctattcataacgtctactcatagagtctcgctctttgcaacaaggctagactccatctcatagaaaaaaaaaaaaaaaagaaagaaaagacagtctcactctgttgcccaggctggagtgcagtggcacaatctcagctcactgcaatctccagctcccaggttcaagcgatttctcctgcctcagccaccctaatagctgggattacaggtgcccgtcaccacgccccactaatatttgtatttttagtagagacagggtttcaccatgttggccaggctgttctcgaacccctgacctcaagtcatcctcctgcctcggcttcccaaagtgctgggattacaggtgtgagccaccgcgccccaccgagaaccatatacttcctactttttttttttttttttttttaaagacaaggtctcaatcaattgcccaggctggagtgtagtgtggcccgagcatagcccactgcagctttgactccctggactcaagtgattatcccgcctcagcctcctgagcagctgggactacaggtgcgtgccgccactcccggctattttttttttttttaaatagagacagggtcttcctgtgtggcccctcttacttttactaagagactaactcttaatataaaggaggtgcaaaaccaccgctttcatttcggttatcaggcactaacccacagcagccgcagctcggtccagctgcctctgcctcaaggctcttagccgggcggaaagcttctgaaagaccacgtagagaaggatgcagctgaagacgatgtaccagccataggtggccagcagggagcccactgaaaagaaaaacagttttcaaaaaactaaaaatgacactactagttgacctttccataagactcaacaaacacaaagtgtaactcctgccctcaaagccttcatggtctaggctgaggaaaaagcctcctaagtagatcgttaaaacacgaactcaagaagtgcgacaattcagggatcactgagaagtgagacttcccaaccatctggggagtcgggggcagttagagtgtggagggcacagcaactgggttttgaagaatgaagagcaactaatctgaatcaggaaggcaaaggcctttcagagccacatagaaaggggtgacagcgcggggagtcaggagtgtgtatggggctgtgtgggacgggtcccagaggcaaacgccaacggccgagtgaccccagtaactaccacaggaagggcttggttcgcaaaaaagacttgcgcaaacaagggacagccgagccgcccagggaagtgcggctcccgagaagcctccgcgcaaggtccgggcctgctgcccaaggtccgcgtaagcgccaacgcccgaccgttcccaggcctcccaggctccggcgcccggtgcagcggcggacgacccacccatcatggctgcgcgtcgcaaaagtggcggcgcgcgcccggctgccccgcaacgactcacccgtggtgtgcaggaagcgcagcccctcggtctccagggccggccgcgcggacagagactcctcttggcgttccatgaccgccgccgccgccgccgcccagccctgccgccgcgcctccagccgggcgcttccggtgcgctcctacgcacacgtggcgcgcccggacgcggtcgtggtcccggccaatcgcaggccgaccccgccccgtcgctgggccaaacgcaggggggcgtggccgaggggcgtggcgggggagaaatcccggctacgctcgccggggccgggacagcgcgtgtgggaacgttctgtgctatctcttggcttgagtcgggggtggaggacggacctcgttcacggatttcttaccgaatttctactttcttttttttttctaattggacactgaagccaaggaagtcagtggtcgcccggaagcaggatttgcacccacatccttgcccggggcacattggacaacagggctcagttggttgacgactcccagcatttgagggttgcagccaacgtccaccccaagtgaagacacgaaatgtgagcagcctcctgctcctgctgctggtgatacctttcaggccaagaaagtccccaccgatcctcaaggttctttctccaaaatcaaagccttttaggaaagaacgatcatagtaactgctctaacctgtgttgaattatactgtatcaccacaagacacgatcacagagttacttataatagtgtcctggctgtgttcctctgcctgcaacgccgtcccgcaccctcttccaccactcaaacgtcaccacctttatggtgaccataaccatcctatttgaaatgtgaccttgggtttttctggagcatttgaagtgcacatacctagctgtgtttcaaaagaagggttgggaattgggaatagaactgaaaaaataatgaataggtgacaacatccgagtgctgcgtcaccactgtcgccaggagcagtgtggggaaggcaaaccatgacatgaagcgtgaacgcaatcagtgtttcttcaatgcaggtttgccaagaagttcctcaagggggacagctgcagggatttgagcactgacctcatcaagctttcccagcagtgtgttcagaaagcaataaaggggacctggcattcatgagccatagcaaagagaagcctgaaagctcttcttccctgttggccaccttgaaaatggactcctcagatgaaccgaggactctggatgttatccataaaggctgtgaagatagcttatcgatttaatgaggaattttaggagggagaatttccttcttcatgtttgcctttccgttgtaaaaggtgatgaaccatcaccactctttgctttgctacagatgatttctcacttgctctggcatcttgcaggaacatttatgtgctaaattgaatgacttctatggaattagttgcaattctcagtcccagattagctttaaatccgccttacatctaaatactgataaactagacaggatgagcagggttgcctcaactattttgttaggctgtgaaggacattaggtataccgtactggggtcatagttcatggaaaaaaatggttagggcctcacttttctctcaggaaactcataccaaaacagtttcaatcaatgcttgggagcagttttatttttatacagtaacttaacaggatggtttaacacaagagttccccatcttgacaaggtgtcagatgaagacttgagagcttcaagaatgttgcagtgggccaggagtggtggctcttgcctgtaatcctattgcactttaggaggctgaggcaggaggatcacttgaggccaggagttcaagaccagcctgggcaacacagcaagatcccatctctacaaaaaaatttggccaggcacggtggctcacgcctgtaatcccagcactttgggaggccgaggtgcatggatcacctgaggtcaggagttcaagaccagcctggctaacatggtgaaaccctgtctctactaaaaatacaaaaattagccaggtgtgatggcgggcgcctgtaatcccagctactagggaggctgaggcaggagaatcgcttgaacctgggaggcagaggttgcagtgagctaagattgtaccactgcactccacagcctggatgacagagcaagactgtctaaa

SEQ ID NO: 1242526 - DNA, 4001 bp, Homo sapiens
ataaaaagtatcaattcagcaataaaaaaatgcaaattaaaaaacaacagaacaactatttacatagcacttacttattgggtattataagcaatccagagatgaccaaaagtatacagaaggatatgcatagggtacatacaaatactaggccattttatttaagggacttgagcaacctccaattttggtatggtcaggggtactgaagccaatcccccatagataccaagggactattgtattgttgggcaaaccacagtgaaccaatcaaatgatcagccacctattaaaaacaggctcttgccaggcactatagctcacacctgtaatcctagcactttgggaggctgaggcaggaggatcacttcagcccaggagttggaggctgcaatgagctacgatcttgccactgcactccagccttggcaacagagcaagtccttgtctcaaaaagacaagccaaaaaaaaaaaacaacaacaacaacaaccaggctcttccgtaattcagggtataaacagcattgcccaatatatgttccatatacgtaattataaattttagaagccaagtttaaaaagaaaaaaagtaaaactaaaaaacacgggaaatacactttaatattatatttaatttaacccaatatattcaaatattatttcaacacataagcaacataaaaattattgaggtattatttttttctcctacttcattaggagtaatgcttattcaaaacgatgttttaattcatacagcaagtctcaattagcactaacctcatatcaagtgctccacagctacagtggctagtggttaccctagtggacaggggaagtctatagctatttgttgttgcttgaattaaaagcagatccatacatttgagtcgttttttgaattttcctccaaagctgacaaagttcccaaaccttttgtggagtgagaaagtcccaaagtcctcaaagcttaacacgtaattcatgcaaacgattaagctcgttgaagagtgtatgtttaagtacactatttcctgaatacttttatacacttaatctccaggataaaaacgttggcataaattcctgagcatgcaaccaagcagacacctaattaatgacgatgctggtcgaggcttgaatttctctctattgctccaaaacaaaattcaaaatcctcttcgtattgacggaaaagtaaatattaaaggaagaaatcattttcacaggagctgaaagcattaagagtaagaatccctaagcacacgcctatcttaaagatctcctgcccgttcctctccaaacccggtaatcctaaagagaaggaacccagttcttgctccctgtaaaatgatagtgaagataactgcgagatgcaacttcctccttttttcttagtgccacttcgagcgtatatgaccagacaaccatgctcactccacgcgataccgaaacagaaagggctctgtttttatgctgtagggccaaaggggccaccctgagtgcagcgagaggaccacagaaacgggcagggcggggacagcagggccagggcttggcctcgggggacgagaaaggtgggaactttggcagcgcgggcgggatcccgccgcatctccccagccggagtcgggactgggaccccgagaatccgcgggcggcagaggctcccgcatctagcacctgccgcaccgggatggggagtctcaggcggcgcagggagcagggcccgggcagaatcccggacggagcagccctcggctgggccctcagcgcccgcagcccactggccgcgccctctcgcttaccgccccagatgcccagcttcagctgggacttgttcaggttctccacatagtcccccaggaagcggttcagcaagtccgcgaccaccgactccagcaccatggtggcgctgaggcacaaggagagggaggagccggaaccgcccggcgcagctgagggctgcgaccagcgctgcaaatgacagcccctccggcgcaggcccacccccgcgccgcgcgcgtgaccccgccggtgcgcaggcgcgctgtcgcccggccggtagctaaggaggcccagctgtgatcccgaggctttgtaggcgccgcagccctggccctctagaggccgacggaggagtgcgggggaagttagcttgcgcctgtctcgtcagccgtgcacgagaaaaaaaaggaccttcgagaagaacaagggagggcaagagttaccgagtacagggacatctatgtggccgctctgctttcccgccgtcacctgctgttgaactccggccgcatcgcggtgtccggagccgcctggcctggagtatgcgctgagcgtcacctaggcaaccacccctgcacctgtggatcaggtgggggaaagggaccgaccgcgttcttgtcctgctagagttcgactccgcctggggcttggtctctgcttcttgaaaacattgtttttttattttgtttctgttttgttttgttttgagacagggtctcgctctgttgccaagggtagaatgcagtgtcgggatcatagctcactacagacttgacatcctggactcaagagatcctcctgtgtcagcctcccgagtagctgggaccactggcgcgcgacaaataatttgaaagtgggaggaggggaacagaaccacatcaaatggcagatatcatagaatgagaactgaatatacgcgttttgtgggaaacgcgttcttttcccctttctctaagattcgcttttaattcactagccactaaccagttacctatctcattacagatataaaaaacaaaacgtagtagtgcctttttaagtatgagttacttgttatttatatatcactttcttccatgctatcgttgaactgtctttgatgtagcacgaccttaaaagcagagcttttataccacaagatctttcaacccttgtgaaatttaaccacccattgagattcacctctttagagaactagaaattttttcctaaaatatatttcaaaaagttgttgagatacagtacacaggaagaaacctaagaaatgctgattatttgtagtcacaagcattaataagtgctttgctacgaggaagtgtctgagaaactattcgtgtatttttcttaaacaacctaggcttgcacaggatcacaaagaaaaatcttaaattcaaagtccgctggagaagaaagaaaatcaaaatggctacaattggtgttgtgtattaaataaaattaaaagtacaaagaaagacccagtcagtactaactagtactatcaagatcacattcctctcccacttttgcacactccattcctctttaagaagataaatccttaaccgtctgtttttcctagctggtcacaaagacaaaatactagtaagtactttggatttcttcaccatccacaaccaaataacagcctaacctgtctattttgcttttgccatctttcctaaattctccatgtttttcttctggaccatgccatccatctccttgaaattcacttcctagcctccagttattccttcctccagtctattctcatgaacaccggatgtgttttcccaaagcacaggtgagcttaggttagtcacctgctcaaaaacatccaataacttcccagtgtttagaacactctcttcaaactttctccacgttctttctagtcatacactctaacaatcccgcttcctttttacattcacactgactatgctccaagaggaatgtaaagaagcaatatatgttctggttgagataaggcatgtaccataaaaagttaagaaagaagccaatccaaggatgtatgaataacagtataagatgataggaaagatggcacaggcaacatagcttggtcaagcaggtggagcaataggcacaatctcttgggagaagtgagtaacactaatgctttgtctaataaagtaattccttacagttctatggtataacttggtaattttgaaagaataatgtgtaa

SEQ ID NO: 1242527 - DNA, 4001 bp, Homo sapiens
ccagtagttgggactgcaccatcacacctagctaatttttaaaaatttgttttggtagagacgggggtctcactatattgcccaggctggtctcaaactgctgatttcatgtgatcctcttgtcttggcctcccgaagtgctgagatgataggtgtgagccaccatgccctgccaggccagatacttaaccactaccctgtattggttctctttggaaagggataggatatttcctgaaaactccaaattcactgctttacttgcctggaatagaagaaaggcccagtgagttaacagtccccaaacacctctctagtccctactcctaagctctgtgagctcttgattaccggagcagtgtatccttgcccaggctcatgcacagctgattgctggagacgacaagactggtaatgcgctcggaaggggtgaagtcaatgcgctgctttgtgaagatgggcacttccttctccagctgggcattcacataccctacaggtaaggaatgacaagaagattagctgtggaagagacaggtgaagggcaaggagaggcagaaaaaacaccacagtgctcctcgccactttcctgacatattcctatccccaggaccttggttaacaaatagtttgatatcaagtcgtttgctggtcacctttacaatagaggtctggagctctttccacactctgacagcagtgaggggttgattctttgaacccttaagatgctgtcacagcatgatatacctgctcccactggtaatggggctgcgtggaggtgggacgggactggtggtctgggtattctcccttatcaggtctttggcccagcaatcccagcttaactgaagtagtatagccccattctctgcccccctccctgcccatgcggtaatgagcctcagtgtagagttggcaagtgctgggatattttgagcattgaatgaaggtaaagactagagtgaaagcagctccaattcgttaactccactcactggaacagttccccagggctccctatgccctcattctcctggagactcactactttctacaaaaacgtccccaaactccaggctgcacccagctatagccaaggccaaaaagatttcatctccattttccccgttcagcgacaaaattccctctgggaccctcccttcttcctctgcaatactccgccttcaccactttctttgtccattccttccctcccacctccagaaggggcctggtgggaaaagcatcagcagaagccgggagcccattctaagttctcccaacagcccaactgcgccctgtaggtgagtaattccttatctgggccccaattccctctcaaaaggaccctagcggtagagcctagatcacgcggcagctcccgttgctctttcaaacttcgactatccaccagctgggggccaagagagcctgaggagaatcaggggcctagacccggaaggcacggcccaggggatgaccccgagctcttggagctgccctcctcgctgctcccacgcaaatgctaggagagccgaaaggggcagcggcaccctcctcttccttacccgagtgggggatgcccacgctagggcagccgggctgcaagacggccgagcgggacagcgagttctcgtactcatccaggatggacgccatggtgcccggcctctgggctctttgtccggggcctggggattacaaaagggctacccccccggggtccccgtcgccccagaatggaagctgtaactccccagcctctgacagatcctgggaacctgcagccgtcgcctcctctttaaaatcctgaggatcctcttgctcttgccttatgcagcgagataatcgggcagccctcgtccttgaatctggcgcagtcttgcaccttactccccgcccccgctacaaaaaaatcacaggctcccttcagccggtgccaggtgatcccaacctcgccccggcagctcagctgactcccgcccccgtgacgcgggcctaaaacgtaacttccgggttctcagagccccgcgtacgctggcgcacaacgtcgccgggccagccagcagaaggcgagacgagggctgagggctgggcgcgtggcgagtgctgctgaacacaagccccgcccccaggatcctgctgcagttccgagctttgacaccaggaggcaatcccggctttctcagccggccttccccacccgccccgcgccgcccagttttggctttcgtgcccaagctccgctccctcgggtggtctgtccagcctccctgaccagctcccgctcccgcctctctaaacagcctcggggaacctcccgttcctcaatccaatcgctgtctctatcccaccgtcacagggcacacgcagacaactcctggccactcttctcccttacccaaaggccccccagcttccaggagaccgcagagctggtggccaggctagtgggaagccctgtgccaggaaccgccctgacctgccccacagtggctccttggctcagggttgctgggccgcttccattcactcattcaccaaaatgtggttgagcacttactctgtgccaggccttgggctgggcgctggggtcacagagatgaggacagcccctccccgccctggaaaaggtcgtaagccagcaggggcgctggacccgtaaatagaccattcatactagaaaagcaagtgatggattatccatcaggcacttactccacgaatgagcgtccactctgtgccaagcactgttccaggctctggggacgtggcagagaacaagacggaaaatgtctcttgcctggtggggcgtacccagcgacgtggccacggcactgagagcgtgaaggagcagggaacaaatacctgccaagcctagcaagaacgagggacaagtgggagcaagcgtgaaggcgggggccgcccagcctgaggtggagaggggagtcctcagccagggacctgcgagggctggggcgcgactgtggttgggttttcctctctcacctgcttaggcgacccagatggagtctgttcccttctggggcccttggattctaccttgctaaagtggaaggctctggactagggtcgccaccgtcctggctctgctgggcggcccccgcctaacaactaagagcatccctttgctctcagaagtttccaggtttgcaccataccttatgtggttgggttactcttgctcaacttcctggccacgtgcggagaactgtgactctcaccagccccactgagggctatctgggctctctggcttggaggggcactagtcctggggcaggtgacaagtatgctgtccaggctcatttcccttcgcaccagggtcctgcttctcttgaccaagcctgcagcctcaatgcagccttcccacctgaggttgccaggtcccaggagggaagtgcaggagcaggacaataggcaggaggcttcctctaagaaaagtgatcccagacagggagctgccctgctccatacataacacttcacccccaggtcacctgccatctgccctcaggtctggactgtgcagagggttgtccctgctgcacagagcccattagcagttggaggtcagcataggagtgctgccttagggacacagagtacttccagctacagcctcagggaccccagcaccccattgttgggctccatggctctccgggatgtatgggataggcctgggtggaccctgtttgtggcagactcagtacagtctcccttatgcgttgattaccacagtgcatttccacctactcattcttcagttcttaggctggactttggattctttgagagccacagaatcaagtgtggcagttgcaatgagacaggtaagggatgactgctagggcatcaaaagagaggattcctgtatgaaagcagctgaatttgacccaagacttgaagtgcatgtatgatctccaagggcaagctgtatctcttatccctgcccagccacttgctagctgtga

SEQ ID NO: 1242528 - DNA, 4001 bp, Homo sapiens
tataatcccagcactttgggaggctgggacgggcagattacctgaggtcaggagtttgagaccagcctggccaacatggtgaaaccctatctctactaaaaatacaaacattagccaggtgggctagcgtgcgcctgtaatcccaactactggggaggctgaggcagaagaatcgcctgaacccgggaggtggaggttgcagttagccaagatcgcgccactgcactccagcctgggcaacggagtgagactgtgtctcaaaaaaataaataaaataaaatagaaataaaatctggtctaagatgccctgcagttctcatcttgatccatcttccttccagtcctcacaatgcagctgcagttctacatttctatctgctggatgttacaagctatatttcttacgggcatcttaacttcccccatccaaacccaaacaaatcaacttcccccatcaaacctgttcctttttctaattatttttctcatttctattcaatgttaatacaacaaatatttattaagcacatggtgtgtgcttgactctaagctaggtactcactaggtagtgttgaacaaaacaaacatgatccctgcccaccttccagtctaatgaggaatacagacataaaatgaataactaaatgattacacaagtaatccattaaaatcacagtggcagtattattttcctaataacccaggttaaaaatctcactcatttttgcttctccttcaacatttataaccaatcagtaagtctttgagttttctttcaccataacttaaaaatccatcactttccttcattcccactgctaccaattttgtgtgggcctttatttcttgtctgatctacggtctcctaactggccttcttgttgcccatttacgccaccacacacatcactattagaatcatcaagtattgtctcatgccacaaatggaaaaaaaatttttttcagtggctactgtgtaactgctgatgggtgtcttcccttacatgccttgtctttccctggtttgccaactttgctcctaccaatctatctgcctggagcatgcttagtctccaaagaaaatatgcttattactcacactcacttccttgaagctcctagatcatcaccccaactagaaatgatcacttactgtgaactcttcgggtacactagctctatcactcatttaccacctgtgtgtgataatttgtgcttcatacagctcctactggagtggtaagatccctaatggcaaagatgtcttaaccatctttccgtccctagggatgcctggcactaatggtgtctcccttgcctgtatgcggggttggggggtgatttccattaactctctggccaggttccaaacagctcttactactccctggattcattctggacctgctggggaagcgccaaggacaataccaggggccaagaacaagatcaaaggggcacggcaaggaagaaatgtgcatccaatgagtgctaaactgtagatgcgataaaggcgtcaggcaagcactgacctgctccagcagatagatgagctggtctcgagccagcctcttcagcatggagaagtcaggcagctcaggggcgtccggccgatggggaaaagccatggcagcggtcacctgcgccgcggggtggaaggacgcccttcgttctgagaaggccggccgcagcccagggaagcgcaaggggggctatccttcaggcctgggcaccgacttccagagaccccagatgggccctcgctcctcagcagcactccaggaatgaatggccacctccaggcaagagagctactacctcggagcagccttgtctcagacctgcagccaccgtgtctcgaccctccctccctgatccactctgcccgtcagcaggattccggtctacaccccgcagagactccgcagcgtacgaggagaaccccgccttctaccagaaaaagaagcgacttcctagatctcccggaagtccctttcgctcccagcgcttcgcgtaccaggaaggggacggcgtcctgaaagggacatttgaaaaacggaggcaacgcgtctattaattaggtggcggcgcctggggtcgcagcactccagaggctgaggtgggagaatcgctcgagtcagggaggcggaggttgcagtgaactgcgatcgcgctactgcaccccagcctgggcaacaaagctagaccttgcctcaaaaaaaaaaaaaaaaaaaaaaaaaaagacataatgaatgcatcaggctagctaacaatacctcaactctgatcaatcataccatcatatcatttcctggtgagatgcataggaaatacagagcatcacctattgccaaaaattgaacctaatcaagcctcaagatctaactaccagtttataggctatatagagattagcaggaatatgttaagacaccaaaggtatgaaatcaaccatatccaaaatgtaggaaattatatgggacaaatgatctgtcgtcttcaaaaaaatggcaaagtgggaaatgtgggaggggaaaacacttcagaataaaagagatttaagagatgtatcaacaaaatgtttcaatgtgtggatcttttttggataataattcaaagataactgatttaaggaattactaaaacttttcgggtattgtatttcttttcttctcttttttttcctgacagagtctcgcccttttgcctagtggaggagctcggctcactgcaagctccgcgccacaacccccctgccgccccaggttcaagagattctcctgcctcagtctcccgagtagactgggattacaggcgagtgccaccatgcccggctaatttttgtatttttggtagagacggggtttcattatgttggccaggctgatctcgaactcctgacctcaagtgatccgcctgccttggcctcccaaagtgctgggattacaggcgtgagccacaacgttgggccaggtattgtatttctatgttattattattttttgtatttctatgtcatacaggcttgtatttctgttaaaaacaagtccttatctctttgagatacatactgaagtttttacaggtgaaataatttggccaggagtaatggttcatgtctctaattcccaccactttgggaggtccaggtcggggtcggggggttgcttgaggccaggagtttgagataagattggtcaactacaacacataaaaaatagccaggcatggtggtgggcacctttaatctcgatacttgggaggctgaggcaggaggatcacttgagcccaggagtttgaggctgcagtgcgctacgatcatgctacagcaccccagcctgggcaacagagtgagacaccgtttgttttttcttttctttttttttttttgagacaaggtctggctttatctatcacccaggctggagtgcagtgatatgttctgtctcttttttttttgagatggagtttcgctcttgttgctcaggctggagtgcaatggcacgatctcagctcactgcaacctccacctcccaggttcaagcgtttctcctgctgcagcctcctgagtagctgggattacaggcatgtgccacgcacccagctaattttgtatttttagtagagacagagtttctccatgttggtcaggctggtcttgaactcctgacctcaggtgatcttcccgcctcagtctcccaaaatgctgggattgtaggcatgagccgccatgcctggcccgatctgtctcttaaaaaataaaaaaaaaaactaaaatatgtttgggatttgctttaaaataacccagggggagatgtaggaacattcaggaaaaagattgggccaggcacggtggctcacgcctgtgaacccagaccgaggcaggtggattgcttgagcccaggagttcaagaccagcctaggcaacacagtaagacccccatgtctataaaaaaattaaaaaatgattggccatttgttaattgttaaagctgatgggt

SEQ ID NO: 1242529 - DNA, 4001 bp, Homo sapiens
taaagcacttttgaagcaggaggcagttaatggcctcttgtaacctaatatgtacctaagcaccttaggaaccaaagagcatttctcctgttcggtgggtgatcaaggaaggccaaaagctacctattgtttcaaaactgtgttcctgaaaaccacaggtgcaaggaatctttactgtgacaaagtggagttggtgagagtctaggagcactatgtgctaatggtccaacaggagatcagagtcaaggattctgacgagctaagtcaagtgtagccacagctgcattaatccctttcagaaacatatgtccttagctgagttgggtaccccctcatccatgttgcaataataggcagcatatgtctctagtattataatctgttcacgtgtatttgtcccccagtgtgtgtcctaggagcacaggcactgtttcttattcatcattgtattactgtcccaagcaaagagaatggcccgtgtagccacctaataagtatatctgatgaagcaatgggggaattaatcctttcatgcagtgtcaggtctttcatttaaaaactttttctcctcctctatttaaatgtttaatgagagcatttaatgacagaaattggttttcttgagatgtctggaggaagtaggattctcctcttaacccaaaggactagaactgcttactgtggaggtatgattttaaagagacccagagctgctaaaggaggaagggtgcacattaacatgaaaattcttcgtgaaagaaccctacagaagaagtcatcaagaactctgcaaggatgactcggtgacactgtgaacagctgacgcacatggtatcagacaccaccaagattccataaggcccatcatggttacctatctagctcagtataagatctgattaagggatctgaatcatctttttatggtccttgatttctaggacctaaacattaagaggaaagttagaaatgatttccttggtctttggcggctggtatcaaaccagtcactcacggataagagcacaatgttcaccgttatccctgaaaccttcatttgtatttcagagcacacaagagatgtctgtcccggccttctgcactagtcaatcccaaaaggactatgctagtttttatgggttaggtttcaagacagtctggaaactcttccgcctacagttaggtaacttggacactttggatataaggtaatcaaccgcttggctagattcaaaggttagctaactacatgagttccctacaggaatgagaaatgaacgaatgatcactaaggggaaaaaaaagcatatggtgttaacttgttcaatgcccccaaaaccagggttgactttcatctagaaaacaacacaaacatctggacaacttcaagcccctggcaggctgagaacttcttactgctttgaccctctaaaatgaagtcttcgtgggaatcaaaatgggccaaagctgagcacaactaaaaaggaaagctcatcctcccactctgcacagagagcaaaagcaaggggaactcccctaaatgactggatcactgggatcacccaagtagccccacagacatcgatgtctatagccggtggtcatctctctgccttctctcatcctaagcccctctcgtgtagcatccaaccgaagcccacacggatggacgcctgtccacttccccggcctcagaaaagatccggaccgctcctgtgctgactccgcctcggccccgcggcccctcggctcaccccaggcagccagacagtcgatttgcagaggcagcttttctaggatcggcactggctcgaaagcgtcgtgcatggcggcaaggggagagttgccaccgccgtctcgcccagagtgttccgggccgggctggggtccggaacgagtctgggctaagggtagaccgggatccggccaggaaccccccggctacaggcccttcaacaacacagccatcgtcaaccccggacttcctgctagttaggcccgcctcttccgcagccgaagtcccgccccttcctcccggtgcactctaaatgaattgttttgttgctgagttgccatcgtcactctggacccatagctactccatcccgagtagccatgggcttaccatagaaggaacaaactcttaatcttagaactgctttaggcagtgggcgtgatggttaaaaactcggcctttggcgtcgacctcagacggagatctaccaattaggaaattagctgtgatttagaaaatttaatatttcgatgccatactttcctaatctgcaaaatttttgtaaatacctgtgacctagtgtcgtgagcgcttagcaacacctgacacccactaagctctcagtaagtggtagctttagtattaccattatatcccaattagtacaagcaccttaccttaatgctttcatggttgttctaggccagtggttctgaaagtggttctagaccagcaacaacagcagtagcagcagcacctgtgaacttgttagaaatgcaaagtttcaggcccattccagttctactgaatctgaaactcgaagggaacagcaacctatgttttaataaaccccaaggtgagtccatgcacttaaaagcttgagaaccaccattttaggttagggttgttcagcgatagcactaccggcatttaggacaggataatttcttgttgggggagggggcatgttctgtacaatgtaagatgtttaacagcatccctaacttccacccaccaaatgccagttatcttccccacagaggtataaaaatgtctcttttccgtatgtcctctgggaggcaaaattaccctgagaaccaccatttgaggccaatgcttttcaaatttaacgtgcatacaaatcacctagagacattgttaaaatgcctcttttgattcagtaggaccagagtaagaccctcagttgagcaccaaaaatctcccagatgttgctggtccctggatcacattttgagtagcaagagtttaggcaagagatgattcactaactcttggaagtcagtgaaataagcctccttttaatttgatgaccacattcctaccaattcaactttccaaagctgtgtcttacatcctaatattcctttaggaaggtgtcatggcttttcctcctataggacctgggacctgtactgtctgcggttaccttagtattccccttgaagacttaaaaaacaacaaagtttgggctgcaagaatgatctatatctggtcatttccccctaggaaaacatcgtaggtcaaaaaattaagcatttgggtttaaagcaaaaatgtaaaagaaaaagggtaagtctgtgatatgaagtcaaaaaaactggtcctggtcattttatttttacacaatatcagtttcttcatatgtaaattaggaatacttgtcccatctttaccaaatgctgttctgataatcaagtgaaaagtactttcaagtagtcaaaaacatgaaaattgctacacaaatcctgtgttatagctgattttcaccatagaagctgatcaccttcttaaaaatttagaattaccagctgttgtgctggaaggtctagtaccttttcgttcaggcccaaaaccctaaggtttatattgttttacagattactgcaaagctatcaatttcttctgaacctaagaaatgacacactatatctattcccagtaatacagaaagctgtaagtagaattatcagggcccaggctatagaacttgaactatacactcccgcttaacacaatgggcttttttttttcctagtctcaagtcaacatcaaagcagcctaaaaaaataatttgaccaactatcctgctgcattacaactattattcatctgctacgttttaatatgcaatagcagcatgcaacaataccaccagcttttggctaatgacttagcatgagaatatagtcagttcttcagattgctgttcctcagagatacttcctaggaaacttttttaaaaatc

SEQ ID NO: 1242530 - DNA, 4001 bp, Homo sapiens
atacactggttcatggaaacaatgtttacaactcaggttgtaagcataggcgtaaaagaagaaactgaaagttcctgaaggatggttcactcaagcagtataggcccgactgaaaaaaaaaaagtgaggtcctgcacaatattggttcaactacactatattagaccataacatacgctcactaagggcagggaccatgccacattttgcccatgatgtctcctcaaaacttatcacagtaactggcacatagtaggtgcccaacaatttgataacaactgatgaactacccctaaatcaccagatataccatatattatttagcaaaatacattataaatgttaactctggacaccagaaacacatttcctcttctcctcattcaagcagacatatgggggactccctcacgtctgcccagctcctgtggtagtcccattcatgcagggaggcctttttacaagttgaggatcatgaggagtactgccctcacctcttaggagaatgggaggaaacagtttacacagacttagatcaaatacaaaaaagcactttcagcccgtgaaatctgctgttgacagtgatgacagctggcagtcttgccttctctgaagacacctctggagctggctctttctcccaagtgatgcatttgtgtcgactcccaaatgcacctcattaacagttacaaagtcgtgggagatcaatttagtactcaggttggagtaaaggagggaactgaaagttcctgaaggatagttcactcaagcagtataggcctgattaaaaaaaaaaaaggccaggcacgcctttaatcccagcactttgggaggctgaggcgggcagatcacccgaggtcaggagttcgagaccagtctgaccaacatggtgaaaccccatctctactaaaaatacaaaaattagccagatgtggtggcgtgcgcctgtggttctagtacttgggaggctgaaataggagaattgcttgaacccaggaggcagaggttgcagtgagccgagatcgcgccactgctcttcagcctgggcgacagagcgagactccgtcttgggtgggggggaatccctgcccaccacagtctaccaattttgtgagcacaacactatgtattcctcacttgggtggattctgagcccccaagtctcccacccccacccccttcccacgtgtactgttcaaacaactagggctcttctttctcaggaacagtctgagaaataggccctagccacctatttggccttgaataccaagtgtccatcagctagacgtttgtaattcttccctgaaggtgataattagctcattcataaagaactgattctcagcagtctcgctctcaaagcaggattctacctgaatttctagtgcctcacctgctctttggctttcccgtcagcctccgggagtccctccccagttctcagatataatttcatctctaaaagtccagactgaaaatcacatctgggagatgtatttttaccttaaaaatcagtcaagaaaatgtgggatctggaagtctctcttggaaagagggggcagaggggagctgagcagagggcgaaatcgtgcagtttacgcggagctggggaccccgagcctcagagcgaggggaggccgggagcagcgccccggaactggcgcctcacagacagcgcggggcggccgccacggtggcgggaaggccaagcgctggccctgggttgttcttcacccataaccccttcacctgtaaccccaacaagcagcgaaaggcagtcccgggccctcggcctccccactcaccccgtgcccatcgccggacacagtccgtcggcataaactttccgtcggcataaactttccgtccgcgcgccacagccggaactataaggccgcgcgacagaagggaatccggcgcctgcactccgcgctgggcggggcggtccttggagagcttcagggtcgcccgggcagggttctggctcatcccggagggacgctagggggcgcggcctctcttcgcgatggccaatccgcggccacccctctcctcccacaaatccccaacttctctcgagccttggctgggtttcctgccgtgtctctctgcattgccctgaatctctccccattctcgggctctttccttccccttctgccccactgacccatgggcctcacctggcccggtgactctgtgtccgcttcacacttttgtcccctcactcccctgggccccgtcggtgcacgagcccaacccttcctgctattttcctcgtcactctttagccccctctctcgtatcctctgaaccggttgacagaatcctcttcctgttctttttaaactgcaattcctgaactacaaatcctggccgggcgtggtggttcaggcctgtaatcccagcactttgggaggccaaggtgggcggatcgcttcaggtcaggagtttgagaccagcctgggaaacatggtgaaaccccgctctctactaaaatacaaaaattagccgggcatggtaacgagtgcctgtaatcccagctacttgggaggctaacgcacgagaatcttggggggaaaaaccccaaaactgtaattcctggctgaggtatgctttgtatatccttcttagctgacctgagcccaatttacctcaagacttggcctcttggtctcctcagcccaaatgctcactttatttcccctatcccctctttgagggaagcagagggccctcgttcctctcaccctggacaaggcatgcgtgctcagatttccctgtaaggcaacatgggctcttgcctgccactctggccacctggtgtctccattgtagtctgtgcctcagtgaggtccttaagagggcaagaggtgactttctttctaaccatgtagggagccagggaatcccagctagagataggcttagatggatgccagcaggcccctgggtagttacggttcaaagaacaatgtggaaccacataggttacaaagtgagtacagaaaggcctctagaaggcctcaggcatttgcctttttcttttagctgataggatggggcgagattaggagatgggacgaggaaggaggatgctttgaactgaacagacaaatctgtctgacttctcacagcttgttatgtgggagattgtggggccagttgcttgtagttttttcctgtccctgggaatatccctgccagcactggggccagggccctgcagactgccctatttgcttcaaaacttctttccccaacctggctgatctcaccatgtcaagacctagttatgcttgagcaggcattgggctccaggtaagtaaggctgcagcctgataacttagtcatgatttctaatcttgccctattgggagggatgtggccaagaatgtgtgggtaagcaagtgtctagttacccctaatgtgacaacgacttagccatagggttactgtcctcgtggtaattctggctcagttgcagggtctgattcattaccttacccaaccctaaagcttaagttagttcactgatggatgatcaaatcttgtgacctagttcttctgaataacaggctttgggagacttggaaagcaaaaaatcaatatattaaattgatgataaaaggcacagctaccaggaggactgtgttacttagggcaactagtttgtttgtttgtttttcctccttagtggaatcccattacaaatcagaaggttgttcagtgactataacatcagagaacatcagcacaaaggttagaaggttttaaagggggtgtctttcaagccatcactggctgatgaatttcttttccccactcaaacgaccctcagcatttgcgtgtttccacacacacattaaaggaaatcaataaatagtttcctttgcataatctctcattccctttattttttcctgccttgaaacagtggactgctgtcccaaaggctttgaaaggcagtgtttgatccccagtctgacagaggaaag

SEQ ID NO: 1242531 - DNA, 4001 bp, Homo sapiens
ctataatttatattcataacaaagtcacactgctaataatgtgatttgttgcctacattcacagtggaagaaaatgctaaatttcagttggaggttaggaaacataaagatgcaatttttcctctcagccaagttcacggccctcgcaattctacccattggcagtttaagggaccacacagttaaggcatccaggttcaggttactttctttaaatctgccagcctaaaaagctgccgaaggttttccaataacaggaaatcaaacaaacaaacaatttataactaatccttgcctatgaagatctcaaattggtagtgttttgttttggttttgtaaagacaagttctcattatgttgcccaggctggtatcaaactcctggcctcaaacgatcctcttgtcttggccttccaaagtgctgggattacagacaggttggtagtgttttattcatttgtgacccatgaacagggttctttctgcccagggtaggaaagacaggaaagtgctcaagccagtttggctaatgggaatggtattcaacctctgcttcagcacagccttctgcctgctgaagcacaggcttgtcctcttccctgtcattctgggcctcacatttggcaatggatagaaacaaaaaaaggaggaaggcttgcggtaagccagcttccaaaaacccgggctccaaaagacaagggtgtgattctatcaatgagtgcacatttgaggatgtacaatgaatccggtcctattttaagtaatacacaaagatttagctcactgaaacctcataaccccgcttactaggtacagtagttctttagctgaggttttgatttccacagttccagaggtcaaccgtagtccaaaaataggtgagtagagtgcagtaagatattttgagagagaccacattcacatacattttattacactgttataattctattttattattattgttgttattctcttattgtgcctaatttacgaattaaactaagtaatcacaggtatgtatgtgtaatctgtatgagaaaaaacacagtatagatgctcctcaacttacaatggggttacttcccaataaacctatgtaaagttgaaaaattgtaagtcaaaccacggtaagtcagtcagggtccttcactatccaagatttcagacatccactggaacgtacaccccgcagataaggggggaactactatttttttattatcagttccacttttctagtaagaaaagggaggcttagaagcggttaaggaagcttccccaagggacactaaaaggtggatacaagctatagtataggctaccaagatacactacctcttacttcagggtcttatgaaggtcagagctaagagactttagaccttagccctctcttgccatcttctctctttgggaaacttttccctaaatttcctaggcagaattcatcactgactcagtgtttccaaggaacactacagatgcctctatgaaactactcaggcaagtcaacagcccacagtattgcacggtacttggcgtaaagcgaacccagcctctgtctgtacccgtccagtgatgtctgtatctgtccagcacgctacctaagacagcgtggcccactactggaaaacttcggttaatacagccctcccagctacggataaatgatctcctccgcagagaaaccagccctaatctcgatactgcccagaacattctcaggacgcaaaaggaggccacccacgggcctcccccactcccctcaggccccgtacaccgaggaacagccagggcaaatggagccatggaagccaccctcaggccccagggcctggagcatccctgaacggacctgcttacaggcagcctcgggcccaacctcgctcactcgccctctggcctggactgtcaacggccctaatgaccccaatccccaacggccctgcgctccaactcaccactgcactgccaggctgcacgtcggaagccgggctccgcgcgactgcgacgcgcaaagatgagctatcgaaggggcggggcatcgcgccggccccgccctcacggctcggagcactccgcagcgcccgttgccgtcgctatggcgggcgcggggcagacgccgacgagggtgggcggagagaggagggaggaagccaggtcctgcttccagaggagtggtagttggaaatttgcttccggaagcgcagacgtttagcttccggcaactgcaggtttagaggtttgtgttgcaatttcattttgtacttttgagattggactaaagctaataacttctgttgctgaaataaattcagtgaaatcgagctttgtctttcaaactgctagtcatgacccattaacgtgacagatatcagtttaataggttgtcaactgactttttttttttttttttttgagggccaggcagagtagctcacgtctgtaatcccaggactttgggagccgaggtgagaggcttgcttgagctctgggtttccagaccagcctgggcaacatagcgagagacctcgtgtctactaaaaataaaaacaattagcacatgcctgtagttccagttacttgggaggctgaggcaggaggatcgcttaagccctggaggttgaggctacattgagccgtgatgacgccactgcactccagcctggggaacagaactagaccccgtctcaaaaaaaaaaaaagagatggggctgggtgtggtggctcatgcctgtaatcccagcattttgggagtcggagtgggtggatcacttgaggttaggagttttgaaatcaacctggccaatatggtgaaaccccgtctcaagtaaaaaaaaaaaaaacagaaacaaaaacaaaattagccgggtgtggtggcatgtgcccgtaatcccagctacttgggaggctgaggcaggagaatcgcttgaaccctggaggcagaagttgcagtgagcacagatcacaccactgcactccagcctgggcaacagagtgagactgtctcgaataacaacaacaaaaaaagatgggaagaggctcatgccccattatggaggccgccctgtggctcagatgtggtggctcactcctgtaatcccagcactttgggaggccaaggggggaggattgcttctggccgtgatttcaagaccagtatgggcaacatggcgagacccaatctctacaaaaaattttaaagttacagacgcagtggtgtgcacgtgtagacccagctgctcaggaggcagaagtgaggatcacttgagcccaggagtttgaggctgcagtgagctatgattgggccactgcactgtagcctgggtgacagagtgagaccctggctctaaaaaatatttttcgaaaaaactagttttgaagttcaaatatatatatagagagagagacggaggactattagaccacttacaactaggtgaagttcatctttgggggcttttttttcttttgagactgagtcttgctgtgtcacccaggctggagtgcagtggcgcaatctcggctcactacaacttctgcctcctgggttcaagtgattctcctgcctcagcctccccagtagctgggactacaggcacccaccaccacacccggctaatttttttttgtatttttttttttagtagagacggggtttcaccatgttggccaggctggtctcaaactcctgacctcaggtgctccacccacctctgcctcccaagttgctgggattacaggcatgagccactgcacctggccatctttgggggctttttgaggaggctatgtgtggtgagaaattggcaaatacacccacatctcccaggacctattctcttgtcctcagtaatctcacattaacacaaaagagaagacatcctgcagctcttctgctgcacacatgacttccctgcatgccagcatccttaaccctcaagttcacatgtttcagagtgatatgactaatttttctcagtcacattgactggagag

SEQ ID NO: 1242532 - DNA, 4001 bp, Homo sapiens
taagagaaagaaaaaattgaactaagattttctatccagcaaaattgacttttaactagaaaggctgcaagttaatataagcatgcaataacttaagaaatattgtttaaatatgcctttcctgggtgacctactaaaaatgagctttagataactagaataattgaaaagccatcagcatcagaataagaggtaagcactaaatatacatttacctgtagaactaaaatcaaatgatggttatagaaatatggctgtattctctgacaattcatagaacaactatgaaaaatgcaggtgatcagagggatatggagagtgcataaaaagcaggataagctgagtaattacatagtaatacatatacttagtagtatatgtattacctgagagtaaaagagtatcatttcaaattagatgctggaagagagaaagtaaaaatgttagtagcaaattatttcattattgctaatagttgagggctaactggcaatgagaagaaaggtaatacgtaaaggttttagcataaaggtaaacattaggaaaaaaaaaaactaccaaatactccctcaatacctacatacagaaagtgagagagaaagagagattttgaggaaaataaaatgaaatagatgacatagtaaaagaacatatatagtttcatatatttgtgtctatgtacaaacttaccatctttatcaataaatgttaatggacttaattcacctattagaataaaagagattaagattgactaacaaagtaaaatctaacactatgttgtttttaaaaagatacatcaaaaacaaagagttaagcaagattaaagataaaaggatagacaggatataaataaatttttaaaaagcagtggtcacaatattattgagcatggtggaatgcaaaccaaagagcaataaataaagacacagagaagagtatttcgtaatactaaagactgcaattcacaatggaggtatttcaatgactaatatatgtgtaagtaataacacagctactttaataaagcagaggctaaagagaatggaaactaacgatagataatgttagcacatatctctgaatataagacacataatggggacgaaatattgacaagaatatagaaaacctacagaactaagtcaataaagtagatgtaataatcaaactctaatgccaatagtagacagtacaccttgtacttaagtgcacatgaaacatttaccaaaactggccacatcttattttccggagtgacccctccaacattccaggaatggaactagcacagaaaacttctctgatcacaacgcaataaggctagaaattagatcgttccacctggaaatttcaaaacacattactaaataattcagctcaaaagggaaattcaatacaaaactgtagaacttaaaaaaattgtaataatgaagacataacaatacagcaaaccaaaggaagaaagaaaaaaaaaaaaaacaagaggaaagaaagacaatgaattagaaagcagtaaaaagaagaacaggaggagccaagatggctgaatacgaacagctccggtctacagctcccagcgtgagcgacgcagaagacgggtgatttctgcacttccatctgaggtaccgggttcatctcactagggagtgccagacagtgggcgcaggtcagtgggtgcgcgcaccgtgcgcgagcctaagcagggcgaggcattgcctcacttgggaagcccaacggtcagggagttccctttcctagtcaaagaaaggggtgacggacgcacctggaaaatcgggtcactcccacccgaatattgagcttttcggaccggcttaaaaaacggcgcaccacgagattgtatcccgcacctggctcggagggtcctacgcccacggagtctcgctgattgctagcacagcagtctgagatcaaactgcaaggcggcagccaggctgggggagggacgcccgccattgcccaggcttgattaggtaaacaaagcagccgggaagctagaactgggtggagcccaccacagctcaaggtggcctgcctgcctctgtaggctccacctctgggggcagggcacagacaaacaaaaagacagcagtaacctctgcagacttaaatgtccctatctaacagctttgaagagagcagtggttctcccagtacgcagctggagatctgagaacgggcagactgcctcctcaagtgggtccctgacccctgacccccgagcagcctaactgggaggcaccccccagcaggggcacactgatacctcacaaggcaaggtattccaacagacctgcagctgagggtcctgtctgttagaaggaaaactaacaaacagaaaggacatccacagcaaaaactcatctgtacctcaccatcatcaaagagcaaaagtagataaaaccacaaagatggggaaaaaacagaacagaaaaactggatactctaaaacgcagagcgcctctcctcctccaaaggaacgcagttcctcaccagcaacggaacaaagctggatggagaatgactttgacgagctgagagaagaaggcttcagatgatcaaattactctgagctatgggaggacattcaaaccaaaggcaaagaagttgaaaactttgaaaaaaatttagaagaatgtataactagaataaccaatacagagaagtgcttaaaggagctgatggagctgaaaaccaaggctcgagaactacgtgaagaatgcagaagcctcaggagccgatgcgatcaactggaagaaagggtatcagcgatggaagatgaaatgaatgaaatgaagtgagaagggaagtttagagaaaaaagaataaaaagaaatgagcaaagcctccaagaaatatgggactatgtgaaaagaccaaatctacgtctgattggtgtacctgaaagtgatggggagaatggaaccaagttggaaaacactctgcaggatattatccaggagaacttccccaatctagcaaggcaggccaacgttcagaatcaggaaatacagagaacgccacaaagatactcctcgagaagagcaactccaagacacataattgtcagattcaccaaagttgaaatgaaggaaaaaatgttaagggcagccagagagaaaggtcgggttaccctcaaagggaagcccatcagactaacagcggatctctcggcagaaaccctacaagccagaagagagtgggggccaatattcaacattcttaaagaaaagaattttcaacccagaatttcatatccagccaaactaagcttcataagtgaaggagaaataaaatactttacagacaagcaaatgctgagagattttgtcaccaccaggcctgccctaaaagagctcctgaaggaagcgctaaacatggaaaggaacaaccggtaccagtcgctgcaaaatcatgccaaaatgtaaagaccatcgagactaggaagaaactgcatcaactaacgagcaaaatcaccagctaacatcataatgacaggatcaaattcacacataacaatattaactttaaatgtaaatggactaaatgctccaattaaaagacacagactggcaaattggataaagagtcaagacccatcagtgtgctgtattcaggaaacccatctcacgtgcagagacacacataggctcaaaataaaaggatggaggaagatctaccaagcaaatggaaaacaaaaaaaggcaggggttgcaatcctagtctctgataaaacagactttaaaccaacaaagatcaaaagagacaaagaaggccattacataatggtaaagggatcaattcaacaagaagagctaactatcctaaatatatatgcactcaacacaggagcacccagattcgtaaagcaagtcctgagtgacctacaaagagacttagactcccacacattaataatgggagactttaacaccccactgtcaacattagacagatcaacgagacagaaagtcaacaag

SEQ ID NO: 1242533 - DNA, 4001 bp, Homo sapiens
agaattattcataaaggacatcctctattgtgagcaacattattactaacattattattattaaataacagaaatttcgagtatatgaattgtcaagctacaaagatatctgaatgcaacaaacttgaaatcttaaaatcttactgataccattattttcaaggttcctttaagttatttcacaagtcaaatgcactcttccattccagtaggcatgtataaactagaacgtcagatttctaaagcattcagttcattgggtagagaccgttaatggaagatttcacacacagggagaaacttaagagtttattttctctctctctctctctctctctctctctctttttctcttttgagacagggtctttctccgtcacctagcctggagtacagtgaagcatgcaatcatggctcactgcaatctcgacctctcaggctcaagtcatccaactccctcaggcttcctagtagctgggattatggactgacgcacaccaccacacccagctgatttttgtagagatgaagttttgctatgttgcccaggctggtctggaactcctgagctcaagcgatccacctaccttggcctcccaaagtgtttgaattacaggcatgagccacagcgcccagcctagttaatattttcttgacaaaatacttataattttaaaataccttttccaaaagaagtgaaagctttggaactcaatataaaatattaatttttaggttaaaaaaatcactttactagacaccttcaagggcagtttccctttctcctacagccttttacattctttacagaagactctattggcacattttaatattgaaggagttaaaaaaagacaaaggaacaagtgatgtttacaaaaaaaaagctgcacaagaccaacttaaccacaagtacttgcatgacagaagtggccgctttccttttcactggtttgtaagtggtgagagctgaacagggaagaaaggaatggtgttttggcagtgacaatgggaaggggtggaggaaaacacttcaggtaaaaagatccccaacaggtgacctagtctccaatcggtgaccttgaagtcatttaacacaaaactgcggggggggggggggcggtgcgggcgggggaagacaaacgtaccatacacctacgttttgtttaacagaacgtcgttaactgtattgaaatggatacaaaaatgctataataagtggggaagatggtataagtcagcaccagtttccaaaaggaagtattcccagtgcatcaccttttccagattttgtcagcacagacagtcccccctttatcttcctgcctctcatccaaccttacaaggggcaaaagtcttgtccccgcagtctttattgccgactcagcccaagcggcagagcaaggaaagtttcgccagcccccgtccccacagccccaagctgtcacaccccagcaggcttaggcccacccggtcgttttccctgcccttgaactcagctttaaaattaattcgacctaaaattaaagttttaaaaataaataaataaataaaattaattcaatcgattccgttccatagaagtccaattcccaagttccaagaaattatcctaatagggaaaggcaggtccctaaccgtatctggggtagactcctcccaggagcataggtagggatactgcgagatgagcggctttgttcactcctgatgccacatctggaaaagagtttgaagagggacttttccagtttccaagtgcaagaacttagagcaaaggaaggggttagagatagcgctgcgcacgcccaccctctttcccggcccagctgtatccaagcgcgggccgtcccctcctgcgccgtgctctgaaggcgggaaggcgtgcggctgcaccagccaggggcagacgaagaccaccagcctgggacccggcagcccgacctgcgctctgggggtgcctgccttacctgagccgtggggcggaggagcggcagaggccaggcaggctggcgggtctcgcccttagggtcacgggtaccggccccgcccgcctcgccccgccccgccccgccccggtcctgcccccgcagcgcgcggaccgggctagctctggccccagccgcccgcgggcgggtgcacccgctctcccttcctgcaacctggacccgctgcctccctccctccctccctccttctctcacttgcggtggcggctggaaaaggcccgccagcagcctgcggttgcctgtcctctcagggctggagagaattagttagggggggttagatcaaaagagcccaggtgacgtgaactcttgaccctaggcattggcagagatgaggcctcaaccttttttttttttttttttaagtttttggggatacacagtaggtgtatatatttatggggtatatgccgtattttgatacagacaaacaatgcgtaataattacatcagggtaaatgaggtttccatcacctcagcatttatcctttgtgttacaaacaatccaattatactcttttagttatttttaactgcacaattatattattattgactatattcaccctgttgtgccaccaaatagtaggtcttattcattctttctgttttttctacccatttaccatttccacctccacccgactcccccaccccccactacccttcacagcctttgataaccatcctcctactctctatcttcataagttgaattgttttaatttttagctcccacagataagtgggaacatgtgaagtttgtctttcggtgcctgggttatttcacttaacataatgatctccagttccatccatgttgttgcaaatgacagaatctctttctttatatggctgaatagtactccaccgtgtatatgtaccacatttttcttatccatttatcggttgatggacaacttaggttgattcaaaatcttggctattgtgaacagtgctgcaataaacacaggagtgcagatatttctttgatatactgattttctttcttttggatgtatacctagcaatcgggttgctggatcatatggtagttctagttttagttttttgagaaagctccaaattattctccgtagtggtggtactaaagagcttaaacaactcaataggaaaaaatataataattcagttttaaaatgggcaaaaggccagacacaatggctcacatttgtaattccagcactttgagagggcgaggtgggcaaatcacttgaagtcaggagttcgagaccagcctggtcaacatgatgaaaacctgtctctactgaaaatgcaaaaattagctgctcatggtggtgtgtgcctgtagtcgatgctactccagagactgaggcaggagaatcacttgaacccgagaggtggaggctgcagtgagctgagatcacaccactgcactccaacctgggtgtcagagtgggactccatctctaaataaataaataaatataaaaataggcaaaagacccaaaaagacatttttcgaaagaaggcatacaaatgacaaataggcatatgaaaaggtgctcaacatcattgatcatcagagaaatgcaaatcaaaactacaatgggatatcatcttacccaaattcaaacggctcatatccaaaagacaggcaataacaaatgctggcaaggatgtggagagaagggaaccctcatacattgttggtggcaatataaataagtacaaccactatggagaacagtttgaagcttcctcaaaaaaataaaaataaaactaccatatgatccagcaattcctctgctggatatatacacaaaagaaaagaaatcaatatatccaagatcttttggtaagggatggaaggacgttttcctcaagactgcataggcatggtggctcatgcctgtaatcccagcgctttaggaggctgaggtgaatagattgcttgctcccaagagtttgagaccagcctggacaataggaggagacccccatctccac

SEQ ID NO: 1242534 - DNA, 4001 bp, Homo sapiens
gctgttctttcttagtattctttggggagggggggtgcatcttcctgtactcatcccttaaatgtgttccctgaggttccgtcctcactatattctcctcactccttatataccacacattcactaggtgactttaatcactctacgcatttcgaccgccctctatatccttaatcgctccctaaatctatttctgataaagtataactgacctcctcctctgatagccctctgtaaaccacgagacattctacagcatttatctctgtgcatatgtgcctccctctgttagactagaagggcaggcctagcgctttctctctttctagtatccaggacaatacctggtagataacaggagctccacaaatgtttaataaataaataaaagttgacatactcagcatttatattttaagttaccttgttttcctttacagaaagtctgagaggtaatttcagatgaagaatttcattctttttcaggctttcatagccagcaacaaagactcctggaaaaagaagcagaggtagctgtcacaaattgttagaaagattgcagaccatgcaatcccccgaagtaaggatacattccttcactgtgcagccttgtatggaggaattgagtacctggttgtgtctttttcagacaaggtctcgctgtgtcagccaggctggagtgcagtggtccgatcacagctcactgcagcctcaacctgccaggctcaagtgatcctcccaccacagccttcagagtagctgggattataggcgtgagccaccatgctcggctaatttttgtattttttgtagagacagggtttccttgcttaggttagtctcaaattcctgggatcaagcaatctgcccgctgcctcagcctcctgaagtgcccagcctgaagactttttttgttagccacgctggaatacagtgtcgtgatctcagctcactgcaacctccacctcctgggttcaagtgattctcctgcctcagcctccccagtagctgctggtacacaggtgtgcaccacctcgtccggctaatttttgtattttcagtagagacggggtttcaccatgttggccagactggtctcgaactcctgacctcaggtgatccgcctgcctcggcctcccaaagtgctgggattacaggcgtgaaccactgctcccggtcagagatcttaataagaggaatattagtgctgatggggcatcaaattgctacaagtgactctcaggtgcccagaagagtgggttgggtccctctaggcttagctcctgaaacccagctcaggagtgagattccctctccttcagggctagaaaggtataccacctttgtcatcaatccattcaaggactcgagtggctcctgacaggtcgaatgcatagaaatcctggtacctgcacaaaagggacacagaatcacacgatgcacagcacttcacagctcaaagaactccaagatggcagccgcatggttcagtggcccaaactctggagtcaggcagacgtgggactgagtttacttcccattttactccctgtttctgggaccaggccagtcccttgatgtccctgagcctcggtcctcatgtgtggacgtcccagggtacccagatttcccaaggttgacgtgaggaatcaatgagatcatctgtgttctgagctgaactcagaggctggcgcaaactaactgggcactgcgtcttcacaagcgcggctcttactagtaatctcacaacgcgcgcacgcaggaaggagccatttcctagagatgggggcctaggcccaggcggagtcctccacggtggcgagccccgaggccacagctggcccactctgcaccaggatccccaacgtgcctccacccacacccatccgcccgccaggcaagctccaggcccagctcccatgtcccagccccgtacgatttacaagcgcaaggattccaccagccagtcgtccccaggatccatggcaacgaccgcttccggcgtctcacttccgcctgcgagccttcgggggccgcgcggctctcgcgagatgtgggcagggcctcccgttaggggcggggttaacaggctgagctgcggcccggcatgggtgggttacgggttttctccgcgaaagctccgggaaaagtgacctgaaatcgggactttcccgctgtcagctccaagcaggacctgaggaccaaatgatcgcccgttttagggccaggtgtttgcagcccaagagaggggcaatgaatgctccaaggccagaaataatacaggaccgcccggttaaattcgaatttcagaaaaacggtgaataatttctttcttacgagtatgttcatgcaatatttggtacattttattagataaaattattgtttatctgaaattcgaatttaactgggtgtccagtatttttatttgctaacgctggcaacccttctgacggccagagaagagaggaagcggccggcagggtctggatcccaactcggcgctcccctccaagtccggcgggggtattgagtaaagcccggcagtgtagtgtctgcagcccccttttactagcgaggaaactagtgacacttgcctgcgccagtaggtggcagagatgagagtagaaccccgcgcctggcacgaagcctggcatgcaacaggcgttatttgcttgctgaatgaatgggtaggaggccagagtcagtgccaggctggtgccatggcatggggtattctggactttttgagccagccccatctcactgaacactctgccctccagcccccttttcctcccatcccctaaaagacgggtgaaaggagaggaccaggcattgtatgtaaagagcaaggttttattcaccaattcaacagggaagcaggaaatacagcaggaacataatctgtgtctgcatcagcgatatttctggtgacccagccagaaatcacagtaatggagtaacagagatttgagctcaggatttacatccagatggggccatcaacagggtcccattcagcaccttccctgggtgggcacaatctaagccacgctgttgtgtctgccccattattggtgtcatttctgcagtatttgtaccagcagcctcctgtactgaagagaaacatacagaagaattgagccagggaggggctcctgataaagataggggcatcctgccattcctaagtgccagatgtctgcagaggtgggcaccagcaggctgtcagctgaggcaggccccagagcaccctgaattgccttggaggggtcggggcagtagttttctcagaacacagccccaaccacccagggtggtcatgacagtcaaagaagatcgtggaagaaaatccaaatacagtgcttggtgctgggctagtgtcagcgtcctcactcccccaccccagctctgccccagacctcactctgaagccccagacgtaggcactgctgcttctgagattctctagttggtctgcatgtgtcagagcttcaaaaccaagggcattagaggtgacattgtttcccttcagactcagccagcccaagctcctaggccttacatctgaggtcctcaggggctgctggttctgtgcctcaggaagtcagggatgttggttgaggctgggttggaccttttctagggaatgcctctcccttcaaaatgcacacactatatgctaggcacactgggggatatgaaggcgagtctacaacaggtgccgccagggagctcacagactgataagagctcgcatctactaagggctgtctatgagccaggcaccatgctgagcatttgacataaatggtctcatttaatgggagatgggccttattatcttcattttatgggtgaagaatattgaggctttagagaagttaagggacatttctaaggtcatacagctactaagtagctaggttatgagcccagcacgttgtagtcaaaacccacattctaccacatcacactgccttctgcacacagcagca

SEQ ID NO: 1242535 - DNA, 4001 bp, Homo sapiens
aaaaaaaaagaaaaaaattacacaccaaattccttaaattgattggaattacacagaacaaatgtgtttctcatgtatcttacctactctgtcatttgtctcgttttgcatttaaaggaaatattattcaacacaaccatagaatcaatttatgtttccctaccctgatatcaaaggtcagtcaataccatgtcccacaaactgatgacttctgatatactgtacataaacatgtaaaggtgagaaaggcaccataaagtatgactaaacccaaaaatatatgcagttagtttagagaaagaaaaaaggaagcagagtaaagattaagtcaatcctttcattgacacatcaacagcaagagcaaaaataacccaaggaagttatttgttaaaccttaaaaataataaaaatgtattattacatttatacttacattagatgatgaaataacttgtttgtaccagagagatcctcgaaaaacttcgatttatcagaacttcaaatttcaaaaaagagaaaccagaacaagctactaattaagttcttaccagggatggtgtggtatcttcatcactgtctccatcctgactactttccacatcaacactgagattcatcgcatctgccgttctcttgggttgtagcttgttactttcagtatgaacagctgaggatgaattttgcagcgtggattctgccttggaagatgtgtttttcatctttggaggtataatccttctgcaagttttctttattttagtcttcttacacgccacttcattgttagaattcttttctgatagggatttggggcacataagctggtctagctggtaattactgagtgaaaagggggcaagatagaccttagctgtttttattaaaactgtagtctgtgctggtctcagagacacataagcgatgttttgattttctttatattcatttacctattcagatcaataaaagaaaacagaatattagaactccaagtcctgtgccttttcttacaggatccctaacagatctaataattcccatttcccaaagacaatataaatccaaattgaggccaggtgcagtggctcacgcctgtaatcccagcactttgggaggcccaatcgggcagatcgcgaggtcaggagatcgagaccatcctggctaacataatgaaaccacctgtctctactaaaaatacaaaaattagctgggcatagtggcacacgcctgtagtcccagctactcaggaggctgaggcagaagaatcacttgaacccgggagacggaggttgcagtgagccgagatcacaccactgccctccagcctgggcaacagagtgagacttaagctcaaaaaaataaataaatccaaattgacacccttcgtaagaaaacttattttcccctccaaaatcctagatatgtaattcactaaccttaacctcagtagaattcacttactgggcacatttgcccataagttttccagaccaataataataatgactagcatttgtgactggggcaaataccccaactgtcagctgcggattgtctggaattatttaaagagtgtgaagccgatcataactgtggcagaagaaaacgcagaaggttgaagaaagggaatcccagatgtgactctcccactatttctcgggttattgataagaacctttcgtcaaagctgaaggcctaagggcagggatcccccgcctacccccggtgccaggtgccctcgacctcctgggcctgtgtcccgcataaccctcacaaaaaccgaggcaggagcacaccttggaagcaccagtccgtttctcaccttcatctggggtcgctgtctggagtccgccttctcagccgccgcgcccgacctggacatctttcggcttcttagcggccggcgccttcccgccaagattgcggcgggaggccgggaggggcgggtccgaggcggggcggagcccactcagatccccagcggccgcagcgccagagcaggaagttggggttttacgcgcgcttcttaagaaggccgccttggccaggcgcggtggctcccgcctgtaatcctaagcactttgggaggctgaggcggcggatcacctgaggtcaggagtttgagaccagcctggccaacatgacgaaaccccgtctctactaaaattacaaaaattagccgggcttggtggcgcgtgcctgtaatcccagttactcaggaggctgaggcagaattgcttgaacccagggggcagaggttgcagtgagctgagatcgcgccattgcactccagtctgggcaacaagagtgagactccgtctcaaaaaaaaaaaaatgctgtcttaaagccctagactcaaattctttagggatgtcctggggctgaactgacatttttacctttgactggtgattttgattctggtggtactgggatgtcgctttgaaaaacactaacaggccgggagcggtggctaacgcctgtaatcccaacactttgagaggccgagaggagtggatcacttgggcccaggagttccaaaccagcctgggcaacatagtgagaccccatctctataaaaaatacaaaaattagcccagcgtggtgttgtacgtctgtagtcccagctactcagaaggcaggggtgggaaaatggcttgaacctagaaggatgaggccacagtgagccgtgattgcgcggaactccagcctgagcgacagagcaagaccctcttctataaataataaaataagattctggctattctctttaaggttccttctagcccaaaactgtttccttggttgcttagttgggtcccacactgttccttgcctgagatttgtccagtttcatttcttctcccactcaaggcccaattgtagaacacaggtgaagtaatttgggttaatcatattaatagcaacttcaaggcccctcatgactcaaaaattactgataaaaccaaacttttcatggtgtcctgtataaaacatactgtttctggactttaagactttgttcctactgtcccttgtctcccccgcagttataaagtcctttctactgtgaaatgtgtcctgactttccaattagccaatattatatatattttttaacacgactcagcttgtaaattggagctgcttctgttattatcctgtaagtccttaaagagttcttaaataggccgggtgcggtggctcacctctgtaatcccagcactttggggaggccgaggtaggtggatcatctgaggtcaggagttcaagaccagcctgggcaacatggcgaaaccctgcctctactaaaaatacaaaaattagccgggagtggtggcccacgccaacactcagcactgtgggaggccggagtgggcggatcacttaagcctggccaacatggtgaaacctcgtctctactaaaaatacaaaaatcagcagggagtggtggcaggcgcctgtaatcccagctaatcagaaggctgaggcacgagaattgcttaaacccgggaggtggagactgcagtgagctgagatcgagccactgcactccagcctgggtgacagaaaaagacagtctcaaaagaataataattacttagatatttaaatacaaacattttctagccaggaatgtattttaataggtagtttccagaaactggaaaaacctgaaagcctaaaaaagtggagttttgggatttcaggtgggcaatgtcccaggcacctcgggagttttttttttttttttttcggtcactggcctaaatcagcaccacctgccctgtgaaaccaaataccgcaccacagcccaccctggccttatgaactaagctaatcggatactactggcaagatttttattccatcaaactctacttcttctgagctttcaacaagccattcaaacagtaactcactgtcgcctgagtttcttattcactataccgttcttggcttcaaaccaagctaacacgtaaaatctttcattcgaacc

SEQ ID NO: 1242536 - DNA, 4001 bp, Homo sapiens
catctctactaaaaatataaaaaatcagccatgcgtggtggcgcatgcctgtaatcccagctcaggaggctgaagcaggagaatcgcttgaacccgggagacgaagggtgcagtgagctgacattgcgccattgcactccagcctgggcaataagagcaaaactctgtctcaaaaacaaaaacaaaaaacagatgatacacatctgtgtttagaagcaccctgtgctcacctctatcatctaacatatctctgtgttgtacttatcagtttactgtgttccttgttaacctattaccctacgactagagtttagcacagtggttggtatatggccaggactcaataaattctcattgcttgcagaattgccctgacctgggccacgtatttagagaaaacttctggctctcttcgaggctctttcctctacaaaaaatgagtaacccatggggccaaggagatatgctcacccaaagcctagtttccctcttctggagtctagaccatgttcagggtaccaatacccctggaatttactgcccaaatgacaccatggcctgcatgagcccttctcagctttcacctgagggcagacccagctgctaatgtgagcactcctcgatctgaaaaggtggcaaaggcatggctgcttgcagaggtacgggcagacgttggatgtggcttggagtatcaggatggtatacaaggctcctggcagggaatgcaggtgggcaccagaaaccagaaaagaaagggaagtgggaaaagactgggagccatttctccccacactgccatattccagctgtgtttccaggtattctaaggagtctagggattctgaagatgaacctggccttctacatcattatgagggtctatttgtcaatgtaggaaaacagactatattttactttacaatttgttgcttgatttataactaaaatatttaaacatacggtgtgctggactccatttgtactcttacccagggcctgcaaatgttaggagctggcctgaccaagggaataaagattacgaaaatgttcaccttattttattttattttatttttttgagacagcgtctcgctctgtcgcccaggctggaaagcagtggcacaatctcggctcactgccacctccgcctcctgggttccagcgattctcctgcctcagcctcccgagtagctgggattacaggcgcccaccaccacgcccggctactttttttgtatttttagtagagacggggtttcaccctgttggccaggctggtctccaactcctgatcgcaggtgatccgcccacctcggctcccaaagtgttgggattacaggcgtaagccacagcaccggccgaccttattttgtggttatagagggtacattttataaaattactgccacggagtgggtaaggctccttttcttcaagccgcacagaacgaatgttcagcggtgcaatttcattgcaatctatttttgcttcactttgctcataatgactcttttaggatttcctcaggtaacaatcttctttcaatgttcaataatccaagcagaacattttctcacttcatccgcctcccatgctaggttcacactgtgaaattggcttatctctgacctaaccacttccttcaccagacatagagctggtgtagctcaagggaaagaggcacggcgctgggaaatgattaggccccaccgtcccaagcaagagctcaggggagttctgaggctggagagaccattcgggatatcaccccgggttcctgagaacctgagatctgcggggaggcgtcaggcatccggaaacgcccgagtctggggagacggaccccctcagactttcctctaggagactctacaggtaaaggggagtcctgggactcgaggggagccccggcatccaaaggtaagatcagttttgctcacctggccgggcggcgttgcgtcgccttggtaaccacaacttccggcttgaaccggaagtccgcgaagttgctctacagaaagtgtgcccgccccctctggggcggagagactcagcccctccccctcagcggataacctgggactgaccgttccctggggatccgacgggccccagaggacccacgcctgagccccgtgcgactcgtggcctttgggctagaagccatggacgccttcacccgcttcaccaaccagacccagggccgggaccgactcttcaggtgagtcaggtgccagcggcctccgcccctttctcgccctaactcggctcccgtgcctattcccctgcacccgggaaaaaggaggtgatagcctagtagatggaagcaggaaggacgttgccagctcctacggagggagtttagtatccgagcccctccttaccctaaattcaacgtgagtgggcccaacgcacccgcgtcccgtcctagccccgtgcacgaaagccccagtgcctggcaccctagccgcctcgagaccgccgacgacgggacaccggctgacagatcctcctcccctcctaactttgctctccgggcacagaaagattggttctctccactcaacattcttccgagggatctcctttaaagagaaactttggattagtatttgtggctagggaagcaaaccacttggtgtgacttcaaatatctctcttttttttttcttttgagacggagtctcgctctgtcgcccaggcagtggcgcggtctcggcccactgcaacctctgcctcccgggttcaagcgattctcctgcctcagcctcctgagtagctgggattacaggcgtgcactaccacgcccggctactttttgtatttttagtagagacgggggtttcgccatgttggccaggctggtctcgaactcctgacctcaggtgatctgtccacctcggcttcccaaagtgctgggattacaggtgcgagccaccgcgcccggtctcaaatacctcttgaaatgtttgaggagagacagaagttctcttccattattacccaggctgtatcattgagatactgcatgtggaatagttttgtaaattgtaaaacaaaatatagcggggatgagaccacaccaactggattggggggaaatacagtggggagaagctcagaaagaactaactgcacctctaaggttcatgctgtgctactgaaaatattaaacagagattgtgtctctttttcttttggttccataagaaacgaaaagaactgagagattgtatctttaatacgaatacagtactagttcatgatgttttagagatttggttgattcttgcttaatgaaaaaatatttacagttgcagttttatttaacagctctgcattctcttctgggtgtgcaagtgctgatacaaacagatcaattagaatggccccaataatgaggcttttggaagccatctttatgacagctattgttcccagtgttttgcaactatgaacttatataaccctcatcacaaccctatgaggtagatactctaaatattttacccacttcagatggagaaactgaagcagaaagaggttaataggtactacaatggcagaactgagggattcacatccacgcaaatgactccagtgcccacttaactaccaagctatactggctttctcattagtttgataggttttttaaatggttactttatatacaagcttcattaaatagaaatttcattaaatagaaacctgtaattccagtgtacctagaatgtaccctgcagggtttatcaaggaagttggttaaaaaaataatcatttaggccgggtgcagtggcttacacctgtaatcccagcactttgggaggctgaggtgggcggatcacaaagtcaggagatcgagaccatcctggctaacatggtgaaaccctgtctctactaaaaatacaaaaattagctgggcgttgtggtgggcgcctgcagtcccagctactcaggaggctgaggcaggagaatggcatgagcccaggaggcaaagc

SEQ ID NO: 1242537 - DNA, 4001 bp, Homo sapiens
tttaagcttcctctcccaacccctcatttttaagttccagataaatatgtgaactacactaacgtgaacggctagctcaacagtatgaactacattcatgctatagtaccccagagtgaacttaaatttgggaaaactataacttttctgatagtatttactacagtaaaatacatcataaacatgttcgattttaaggagaaaccacctatctctgtgagaaaccgagtgtgtaaaaaacaagtctgatacaaaatgatatcatttttgaaactcccctgtgggttcctcatatcctaaggtgaagacgataaagttgaagatcaaacgctgactggcctgaaactcccctgtggtttcctcatattctaaagtgaaatcaacacgagaagtgggtgtgtagatatttacacataaaacccacagtacaaaaatgaccccactaacgagctccttttataaaaccattttaatttggaaagcttattctacatttagcttaggctgaattcttctcttcacttccccttcctcagaagaatgcacagaaaaaaatcattcaggttaataacagcagtgagccgagactccagcctggctctccttaataaactgtgggtgtggacttagaaggcatattttctcctaaacccttctgtgaacttgtacttcccctccccttaggttcagtaagtttaccactcaaataattactctctctcaaactacctctttcaagcttaaaagggcactaatgcggtcattccaaactgatgaataaagttcaccttctgccggctttccatttgaccaagtatatattacttaaaacaaaacaccctatctcctaaaagccatttcttcctctaaaccattttatcccatttgcgacgtcccctcatacacaggaattgcttacatttagtccgtgttattctttcctacatggatgggttgttttcagtcttgcttgcaatatttctggcatttcctgttacaacatcctgctctgccagcatcttcagggcaaaagttgggggcctagcccagctcccagctgcaagtacactaggctctaacttcgcttgtcctctctgcagaccctcccgcagctcccgccggtttcccgcagcggtcccgcgcaggtgacggcactggggagcccgcggccttctccgcccgccggctcctccccgtcagccgtcagccagggctctcggcgccgggggagcctcccacagtgtcccaggccatggaagcgcggacgaacgccggcgaccgggcctcgcttacctggcgcagccgcgcgtccgcctcgacccaccgcgcgcgcaaggcccgctcccggaactcgcgcgggctttcgcagtcggccgcgccgccctcagccgggaagagtgcgtcgcgcactgtggcgccgccgcagccgtcggccgccgcgcccagatagcgttccagctgcccgcacagctcctgcagcgccgcctcgccgggacccgcgcgcgtcggccacagcagcgcccacagcccgagccccagaccccaggccccgccgccgcccacgtccagctccggcggcagccgcgggaagcagcgctccagaggcggccacagcgccgccaactgccggtgcgcgccgcggagccccgcggccgagagcaggccggcccagctggacggggagacggcggcctcaggcttgggctcgggctcgggccccaaccgggccccctcgcgcagccgccgctgctgcgcggtacggtcgtgacaagtcacagcgaacttgccctccgcgccgttccaggccaccaggaagcgcagccggtgcctctcgggctcggcgaagaggccctcccggaccggcacccagccctccaggctgtcaggctgctcgtcctccatggctgtcggcagcagcggccctagggctcggcgggcgcgggcctggcctcctcgcaccgcctgtcacgggacagtccgagccaaatcatttttcgctagaatcgaaaccgcgtcagtgccccagcagcaccctggcccccggcacttctgattggctggctgccggaggtggggcttacaagaggcattcggggttggttgggtgatagacgagagggccagcgacaaccaatgaaaaggtgagaaggtctccctcaggagtcaatcatctcgcaacctgttcaggagtctgggaaatacaactcttgcctcaccttttccacccaatacatacggacgttggaaaaatatctgttgaatcggcgagttattgtattagtctcccacactaaactatgaacttgagaacagggaccaagctgattttcttttctatcatcagggccctattgagtacatggttcacgcccttaagaatgtcacaaatgcgttggggagatgaaatataaactcgatagtcatttattgagggcctctaagtgccaagtactgggcaagaagccgcaaatttatttttgtcaattcaacaaacttttattgagtgtcggctgtgtgtcagtattgagggggtggagtaagagggggaattcagggcactgcagctcccaaccagggtgtttaaatacaatctgtgttctaactcttcactttagagttaaggaaacggaggcccagacaaacttaagatacaccgacactcgggctcgacatgcccccctggctacggaaggcctgtttaaggagatatcaggaaatccagtttacgtgtcagggtggagctaaatctgttcatgcaacaagcaccaagacggccctagtctctgcctaggaaatgtgcagtgtagactgagaaatacagtccatgtcagctcccatcctgggagtgcactgagacaggtggtgggaatgggaggaggaaaggagggagatgccaggaagctgggatcaggagccgtttgccaaagcaaggcctgtgaggtgttgattcgggaacaagtgaaagtgtttgtgaaggttttgagctgggaaaagttggaatcagattttgtacttgctgttatccccaagggtaaacaataagcaaacgaaaaaatcagggcgaagctaaagctctagttagggcatctctctgccttgaaaatgacctcaagaaatctaggaacctctgtggaatgcaacttgaagatggaaaggtgcctttgtctgaaggtccctccccttttatgcctgctgccggtgtgagggttggggattgggccctgggactcagtcactcagtcttcttggagagataaacttttagctgaagtgattgattttcccctattttaatatactattttaactaatatgagttacttatgatttttaacagtctgttttaaatatctttcttgtatattcctcacattatatctttttactatctgctttatactgtgttatttctgttagttttcttatctatttggtttttcaagcggaaactgtcaatctttctaattataaaattgtcgtgggtggctgggtgcagtgactaacacctgtaatcccagcacttttggaggccgaggtgggcggatcagttgaagtcaggagttcgagaccagcctggccaaaatggccaaaccccgtctctactaaaaataccaaaaaaaaaaaaaaaaagagagagaaaaagaaaagttagccgggcgtggtggtgcatgccctataatcccaactactcaggaggctgaggcatcagaattgcttgaatccaggaggcagaggttacagtgagccgagattgcaccacagcattccagcctgggcgaaacagtgagactctgcctcaaaaaaaaaagaaaagaaaaaataaaattatcctctctctatatattaatatatgtcttagtccattcaggctgctataacagaataccattgagtgggtggcttgtaaacaacaaacatttatttctcatggttctggaggctggaaagtccaagattaaagcaccagcagattcagtgtctggtaaggaagggctgcttct

SEQ ID NO: 1242538 - DNA, 4001 bp, Homo sapiens
atatatgataaaactatttttcaaaaagtcaaggaagtgacatacacaaaatccactgcacagataagaaactcatagacaaatgcaagttttagtaatgttccagttttgggtttggggggagtcatcaaggatttatgatgtttttatctgcttatactttaccgtgtttttttttggtagtattaaatatattttggttacttcttaaaaacgttactgacatatagttgacaataaactgcacatatttgaagtgtaaaacgtgtaagttctgacatatgcatacacccaaaaagttatcactacaagataataaatccaccgacccctgtattttctcctgcacatttgtgatgtctccctttaaacacattttaaaacgtaaaaaagtaaaaataaaaaagacaacttgttttggaaagctaaacgtgcatattttgcaaaacatttcccctagggctctggagaaactatacacaactcagaaagtgccttaaaattggtgacatggttaccgaacaactaaccttaaaagtttatggtattttacacttttaaaaaatcaaattccgatttcggtttgaaagaggaatttaatcctgtttctcggagcttcaaaatcattaattctgcccggcttttttttgagacggagtctccctctgtcgccaggctggagtgcagtagcgcgatcttggttcactgcaacctccgcctcccgggttcaagcgatgctcctgcctcagcctcccagtagctgggactaccggcgcccgccaccacacccagctaatttttgtatttttagtaaagacagggtttcaccatgttggccaggatggtctcgatctcctgacctcgtgattagtccgcgtcggcctcccaaagtgctgggattacaggcgttgagtcaccgcgcgtggccaattctgcccagtttttatggcccaacaacttaatataaattatctttaggtaaccccaaggtcctaacttcctcacaactggttacaacttccgagatgtgaaggtaaatcatagcgtcccaactgtgtaggatagttagcacgtgacttaaaaaccaagttaaaaagatttcaaacacaatattctttcatacttttttaggtagctaaaacttaaatataactatttcaaaaaagcagacaaaaaatttagaatcctaagcaagctaaacccaagcaggaaaaaaagagaccaattcccttcccggtgccagtcaggagttggagacaccgggctgcctccggctggtttctgaaaaacgccgcaggtggaaaaacatcccgaagaggacctgagactcggaggaggcggggaactgacgcgccccagtgtgcccggggcccttccgacccccgccagccaaccgctcgcaacccgctcggggcggcgcgcgtcgcggcctccgcggccctgaagaactgaggctcccgaccccagcgcgaccaccctgacaggaagcggcccccggccgcgggcgcccgcgcgccgtctgaggtgaacccgccgatctccggcccccacccccggagccgggagtcctcgccctctcgcccgcggcccccgcgggcccaccacctgctgcgccggccggccgccctccgcttccggctctcgggcgccgggaggggccgggggcgggcctcgcctagctgcagccgggtgggggaagggagcaggcgggggaggggcagcgccgggcaagccgggccccgcgggccgcgctcctcacctggcggcgggtctctccgcctgacacgctgcgcgccgccgccggtagccgccggtgaatgggtacaggtaatgccgccgaacccctgcttgctccggctccgccaccgccggcccctccgtccgctgtttattaaacttttctgtttggttgttcggcctatgacgcgaccgcggaggagagccactggattggccggctcccgcggctgacgcgcgggccccgcccgcccgctaattattaccggcgcgggcggggccgcaggccggaggaggcggggagaggcggggtcaaggctcggagcgcacggcaattggccggaggcaggaaaagaggcggggcggagcgaaaggagatgctcctccgccttctgcacctccagtgtcccttgctccactgccctctctggggcgcttcccgccgcggtttctctacctccaatagctacgggaaggcgattaagaggtgccgcggagactttaagggcttggttatgtaggttcaggtacctttgccacctcgcagggaatggcgtgtccctgtcttggactgaggcaccaaaaagagttgcactccacctgccacttgtgcaggaaggaattctgagcttctgtcttcccatgcaggccggcgcctcagtctgcaagcgcaaagtccgagctcagggcgcatactggaaagcagttctctgccctgtcctgaactgggacttggaaatagaagcaagacgagaagcgtgcatgcacacgtgtgcaatacatacatgcacaggcacaagcacccccagttccagcctgttccaaaagcacggggtcagttcccacctgcgtggtgcacgctgggctgctgcgctggaactaggggtgataggcagaatggctccccctgaagtttttcagccttcgttcgggctcacgagcatcacgagcaggaagtacgtgacactttagttcgaggtcattcaatcctattgtgaatgaggagttccgttagggcatccaggtaggcgagcccagtcctgagaatcctctttattttaaatgttggtattttgttattcatggattttttttttgcattaattttaattttaaaaaataaaaatgttattcatcttgatcacttagttttttggtgctcccttaaatgttgtgcctgaagtgagtacctgttgagcatttagcaacacagaagtcaccttggggagtacagtttaagtggaggacaaaagcctgattggaatggtaataaaacctacttgttaggctatttgtgggggttaaataacataatatgtgtgaaagagcttcttgaactagcaaggttatgcgtcaagtcttacggattttgtcttaaatgtatttttcttccgattcttgtccagtttatcgttgtattaactccagcacctaacccagttggattttcatatgcagttattatgaatttgcagaaattgggtttacatgacctttactgctttcctttgttccagattcgttctgggagattgagagattatagtattgcattgtgacgtggaatgcagacagaccactgtcacttactagctttgtgctcttaagaaaattgtgtgaaatgggaacgaaaacctaccacaaaggattgttatgagggttaaaagatactgcatttctattcacccagtaaatgctatatgccgactctctgccagcctgtgctgtaggtgctggagacagcattaagaaagatgaaggcccttctctcattgacttacacaggggaagagagggagcagaaacaataaacagtatacatacgcaacctaccggtcagtgtacataaacaacatattcacagcacctggtatgtaacagatgctcaataaatgattgtgtatgcattattatttccagccccatcttctttcctgtgttccagagcaggacattcactgtgtgcttatcacagccattcaatatgtccaaggcttattttcccccaaacacattcttcctcctgtagtcccaattttggctaatggtgacaccatgtttccagttattaaagctagaaactcaagctttattgagatttaacacacatatcattacaacttacccatttttaaagaatacaatttgctgggcgcggtgacacatgccggtggtcccagctactcaggagggtgagctgggagaattgctcgagtccaggagttctgggcagtagtgcactgtacccactggtgtccacagag

SEQ ID NO: 1242539 - DNA, 4001 bp, Homo sapiens
gctatgaatcttctatttaaacataatagagaatcctaatgtttttcattcatcttatttctaagtaattcaatctattctagtcctgattacctaataccgtctaatgcaatccacattaagtatttactctagagaaattcttgtacttgtgtaccaagagccggaaacaagaaatgttcacagagcaagactgcttataacaaaacaaaataaaaaacaataaaaacacggtcgaagtgcccataagttatggcagattaacatatcataaagcaatgaaataaactacagccacatactatttttataaagctcaaaagaaaaacaaattaaatgccacacagtttcggcatacaaacatatatgataaaactatttttcaaaaagtcaaggaagtgacatacacaaaatccactgcacagataagaaactcatagacaaatgcaagttttagtaatgttccagttttgggtttggggggagtcatcaaggatttatgatgtttttatctgcttatactttaccgtgtttttttttggtagtattaaatatattttggttacttcttaaaaacgttactgacatatagttgacaataaactgcacatatttgaagtgtaaaacgtgtaagttctgacatatgcatacacccaaaaagttatcactacaagataataaatccaccgacccctgtattttctcctgcacatttgtgatgtctccctttaaacacattttaaaacgtaaaaaagtaaaaataaaaaagacaacttgttttggaaagctaaacgtgcatattttgcaaaacatttcccctagggctctggagaaactatacacaactcagaaagtgccttaaaattggtgacatggttaccgaacaactaaccttaaaagtttatggtattttacacttttaaaaaatcaaattccgatttcggtttgaaagaggaatttaatcctgtttctcggagcttcaaaatcattaattctgcccggcttttttttgagacggagtctccctctgtcgccaggctggagtgcagtagcgcgatcttggttcactgcaacctccgcctcccgggttcaagcgatgctcctgcctcagcctcccagtagctgggactaccggcgcccgccaccacacccagctaatttttgtatttttagtaaagacagggtttcaccatgttggccaggatggtctcgatctcctgacctcgtgattagtccgcgtcggcctcccaaagtgctgggattacaggcgttgagtcaccgcgcgtggccaattctgcccagtttttatggcccaacaacttaatataaattatctttaggtaaccccaaggtcctaacttcctcacaactggttacaacttccgagatgtgaaggtaaatcatagcgtcccaactgtgtaggatagttagcacgtgacttaaaaaccaagttaaaaagatttcaaacacaatattctttcatacttttttaggtagctaaaacttaaatataactatttcaaaaaagcagacaaaaaatttagaatcctaagcaagctaaacccaagcaggaaaaaaagagaccaattcccttcccggtgccagtcaggagttggagacaccgggctgcctccggctggtttctgaaaaacgccgcaggtggaaaaacatcccgaagaggacctgagactcggaggaggcggggaactgacgcgccccagtgtgcccggggcccttccgacccccgccagccaaccgctcgcaacccgctcggggcggcgcgcgtcgcggcctccgcggccctgaagaactgaggctcccgaccccagcgcgaccaccctgacaggaagcggcccccggccgcgggcgcccgcgcgccgtctgaggtgaacccgccgatctccggcccccacccccggagccgggagtcctcgccctctcgcccgcggcccccgcgggcccaccacctgctgcgccggccggccgccctccgcttccggctctcgggcgccgggaggggccgggggcgggcctcgcctagctgcagccgggtgggggaagggagcaggcgggggaggggcagcgccgggcaagccgggccccgcgggccgcgctcctcacctggcggcgggtctctccgcctgacacgctgcgcgccgccgccggtagccgccggtgaatgggtacaggtaatgccgccgaacccctgcttgctccggctccgccaccgccggcccctccgtccgctgtttattaaacttttctgtttggttgttcggcctatgacgcgaccgcggaggagagccactggattggccggctcccgcggctgacgcgcgggccccgcccgcccgctaattattaccggcgcgggcggggccgcaggccggaggaggcggggagaggcggggtcaaggctcggagcgcacggcaattggccggaggcaggaaaagaggcggggcggagcgaaaggagatgctcctccgccttctgcacctccagtgtcccttgctccactgccctctctggggcgcttcccgccgcggtttctctacctccaatagctacgggaaggcgattaagaggtgccgcggagactttaagggcttggttatgtaggttcaggtacctttgccacctcgcagggaatggcgtgtccctgtcttggactgaggcaccaaaaagagttgcactccacctgccacttgtgcaggaaggaattctgagcttctgtcttcccatgcaggccggcgcctcagtctgcaagcgcaaagtccgagctcagggcgcatactggaaagcagttctctgccctgtcctgaactgggacttggaaatagaagcaagacgagaagcgtgcatgcacacgtgtgcaatacatacatgcacaggcacaagcacccccagttccagcctgttccaaaagcacggggtcagttcccacctgcgtggtgcacgctgggctgctgcgctggaactaggggtgataggcagaatggctccccctgaagtttttcagccttcgttcgggctcacgagcatcacgagcaggaagtacgtgacactttagttcgaggtcattcaatcctattgtgaatgaggagttccgttagggcatccaggtaggcgagcccagtcctgagaatcctctttattttaaatgttggtattttgttattcatggattttttttttgcattaattttaattttaaaaaataaaaatgttattcatcttgatcacttagttttttggtgctcccttaaatgttgtgcctgaagtgagtacctgttgagcatttagcaacacagaagtcaccttggggagtacagtttaagtggaggacaaaagcctgattggaatggtaataaaacctacttgttaggctatttgtgggggttaaataacataatatgtgtgaaagagcttcttgaactagcaaggttatgcgtcaagtcttacggattttgtcttaaatgtatttttcttccgattcttgtccagtttatcgttgtattaactccagcacctaacccagttggattttcatatgcagttattatgaatttgcagaaattgggtttacatgacctttactgctttcctttgttccagattcgttctgggagattgagagattatagtattgcattgtgacgtggaatgcagacagaccactgtcacttactagctttgtgctcttaagaaaattgtgtgaaatgggaacgaaaacctaccacaaaggattgttatgagggttaaaagatactgcatttctattcacccagtaaatgctatatgccgactctctgccagcctgtgctgtaggtgctggagacagcattaagaaagatgaaggcccttctctcattgacttacacaggggaagagagggagcagaaacaataaacagtatacatacgcaacctaccggtcagtgtacataaacaacatattcacagcacctggtatgtaacagatgctcaataaatgattgtgt

SEQ ID NO: 1242540 - DNA, 4001 bp, Homo sapiens
tttgctagagattagaggggaggagaggaacagcagaaaggataatttattttacatacaatccagcgttttttctactatactatttttgcattgaaaaggagataccaaacagtgccagactttttacaatgtgacttcaaagtaagagagtcattacacataggttaacaggaattttgggttttcatgcaaatgttcaactaggttgaactagttcaatcactacggctatgaatcttctatttaaacataatagagaatcctaatgtttttcattcatcttatttctaagtaattcaatctattctagtcctgattacctaataccgtctaatgcaatccacattaagtatttactctagagaaattcttgtacttgtgtaccaagagccggaaacaagaaatgttcacagagcaagactgcttataacaaaacaaaataaaaaacaataaaaacacggtcgaagtgcccataagttatggcagattaacatatcataaagcaatgaaataaactacagccacatactatttttataaagctcaaaagaaaaacaaattaaatgccacacagtttcggcatacaaacatatatgataaaactatttttcaaaaagtcaaggaagtgacatacacaaaatccactgcacagataagaaactcatagacaaatgcaagttttagtaatgttccagttttgggtttggggggagtcatcaaggatttatgatgtttttatctgcttatactttaccgtgtttttttttggtagtattaaatatattttggttacttcttaaaaacgttactgacatatagttgacaataaactgcacatatttgaagtgtaaaacgtgtaagttctgacatatgcatacacccaaaaagttatcactacaagataataaatccaccgacccctgtattttctcctgcacatttgtgatgtctccctttaaacacattttaaaacgtaaaaaagtaaaaataaaaaagacaacttgttttggaaagctaaacgtgcatattttgcaaaacatttcccctagggctctggagaaactatacacaactcagaaagtgccttaaaattggtgacatggttaccgaacaactaaccttaaaagtttatggtattttacacttttaaaaaatcaaattccgatttcggtttgaaagaggaatttaatcctgtttctcggagcttcaaaatcattaattctgcccggcttttttttgagacggagtctccctctgtcgccaggctggagtgcagtagcgcgatcttggttcactgcaacctccgcctcccgggttcaagcgatgctcctgcctcagcctcccagtagctgggactaccggcgcccgccaccacacccagctaatttttgtatttttagtaaagacagggtttcaccatgttggccaggatggtctcgatctcctgacctcgtgattagtccgcgtcggcctcccaaagtgctgggattacaggcgttgagtcaccgcgcgtggccaattctgcccagtttttatggcccaacaacttaatataaattatctttaggtaaccccaaggtcctaacttcctcacaactggttacaacttccgagatgtgaaggtaaatcatagcgtcccaactgtgtaggatagttagcacgtgacttaaaaaccaagttaaaaagatttcaaacacaatattctttcatacttttttaggtagctaaaacttaaatataactatttcaaaaaagcagacaaaaaatttagaatcctaagcaagctaaacccaagcaggaaaaaaagagaccaattcccttcccggtgccagtcaggagttggagacaccgggctgcctccggctggtttctgaaaaacgccgcaggtggaaaaacatcccgaagaggacctgagactcggaggaggcggggaactgacgcgccccagtgtgcccggggcccttccgacccccgccagccaaccgctcgcaacccgctcggggcggcgcgcgtcgcggcctccgcggccctgaagaactgaggctcccgaccccagcgcgaccaccctgacaggaagcggcccccggccgcgggcgcccgcgcgccgtctgaggtgaacccgccgatctccggcccccacccccggagccgggagtcctcgccctctcgcccgcggcccccgcgggcccaccacctgctgcgccggccggccgccctccgcttccggctctcgggcgccgggaggggccgggggcgggcctcgcctagctgcagccgggtgggggaagggagcaggcgggggaggggcagcgccgggcaagccgggccccgcgggccgcgctcctcacctggcggcgggtctctccgcctgacacgctgcgcgccgccgccggtagccgccggtgaatgggtacaggtaatgccgccgaacccctgcttgctccggctccgccaccgccggcccctccgtccgctgtttattaaacttttctgtttggttgttcggcctatgacgcgaccgcggaggagagccactggattggccggctcccgcggctgacgcgcgggccccgcccgcccgctaattattaccggcgcgggcggggccgcaggccggaggaggcggggagaggcggggtcaaggctcggagcgcacggcaattggccggaggcaggaaaagaggcggggcggagcgaaaggagatgctcctccgccttctgcacctccagtgtcccttgctccactgccctctctggggcgcttcccgccgcggtttctctacctccaatagctacgggaaggcgattaagaggtgccgcggagactttaagggcttggttatgtaggttcaggtacctttgccacctcgcagggaatggcgtgtccctgtcttggactgaggcaccaaaaagagttgcactccacctgccacttgtgcaggaaggaattctgagcttctgtcttcccatgcaggccggcgcctcagtctgcaagcgcaaagtccgagctcagggcgcatactggaaagcagttctctgccctgtcctgaactgggacttggaaatagaagcaagacgagaagcgtgcatgcacacgtgtgcaatacatacatgcacaggcacaagcacccccagttccagcctgttccaaaagcacggggtcagttcccacctgcgtggtgcacgctgggctgctgcgctggaactaggggtgataggcagaatggctccccctgaagtttttcagccttcgttcgggctcacgagcatcacgagcaggaagtacgtgacactttagttcgaggtcattcaatcctattgtgaatgaggagttccgttagggcatccaggtaggcgagcccagtcctgagaatcctctttattttaaatgttggtattttgttattcatggattttttttttgcattaattttaattttaaaaaataaaaatgttattcatcttgatcacttagttttttggtgctcccttaaatgttgtgcctgaagtgagtacctgttgagcatttagcaacacagaagtcaccttggggagtacagtttaagtggaggacaaaagcctgattggaatggtaataaaacctacttgttaggctatttgtgggggttaaataacataatatgtgtgaaagagcttcttgaactagcaaggttatgcgtcaagtcttacggattttgtcttaaatgtatttttcttccgattcttgtccagtttatcgttgtattaactccagcacctaacccagttggattttcatatgcagttattatgaatttgcagaaattgggtttacatgacctttactgctttcctttgttccagattcgttctgggagattgagagattatagtattgcattgtgacgtggaatgcagacagaccactgtcacttactagctttgtgctcttaagaaaattgtgtgaaatgggaacgaaaacctaccacaaaggattgttatgagggttaaaagatact

SEQ ID NO: 1242541 - DNA, 4001 bp, Homo sapiens
attaagaaacgcacaaataatgacaaaggttattcatacatgtttttgagacaggtaaagttaactggcactactccagtctcctaatgttaactggcactactccagtctcctcctaaaaatgtttctgatatattttcttgaaagaaaatatttcttctggtatgtgcttaccagaagaaaaagaaaagccagcctgaataacaaagccagtgtaaaacattaagccccatacttactaatagcaacacatacactaagtatataaaatatctagcatagatacaattgctcagttaagtgggtaaaagtgtttccaatttccctcagctgattttaatatccagaaaaattgctttatatccatctacatcttggaaagtggtgttgaaaataggcttttaggcaaaaactaatcaacaagtcagagagctccataggcacactttaacagaacatttaaggggctacacatcagaaaaactttgaagcatattctgctggtgtcgatataaactggtataactttttagaaaaacaatttggccagtgaagtgttcattatcctttgatctaggtaaagccactccaggatttttccaaaagaaatcttttttaaaaaggaaaatattttacagctacacacaggtgtgttcaacgcaatactattaaaaatgacgaaaaattagaacctaaaagtagacaattcaaaaaactaggttaattcaggtcacatcaatttaagagaattacatagttactgaaatgaaaacaatttcaacagatagttaagtgaaaacataaaactgcacagattcataattattggaaaactgcaagaatataagacagagaagggaacaggaaaaaaatgagatgaccaaacaatgatctgctggtgggtagataggtaacttttcttgatttcattattattacactattgtttaaacaacagatatagcagaaaagcattaatttaaaaacctttgcatgatccggaacaagtagcatagcaaatacaatggctgaaaatgcttagctggcttttggtctgattattgcaatgattattgcaatttataccttaatttctatgagaacaaagagcaacaatataaagaaaacagtctctaaaaaatattcttgtactgaaatacactacaattacgtcataaataagaaatgtaaatagaatcagatactttaaaaaaaagttgtagtagcctacctatagcttttaaaaatataaatcctttcatttcctgtttcgaaatgttaattacttatctccacctttgaaagaaatgaagagtttgaatgaagtaagaagaaagcagtttcactttgttcatcaatggcctttttaattatgagcatattaaaaattataagcatattaaaaatgtcaacatattgttaaattaaaatatactgaaattaaaaggggtgctgtgctggggttaaaaaaattaaacagttggcatttcaatttactaaaaaagacgtatttaagcctatcacatttatctttcagcaacttaacattttaagtttaaggaaaatgacatatcaaatgaacctcctcaagatgtcatttataaaaactgacaactgactgttcaaacaaccaattcaaaaaaaaatcctgttattggagatgattttgagtctaagatgttttaatgacactcatattctgaactaaaaataatgataggagaaagtcaagtttgattctctgaacacctatttcctgtccaaagagcccttttgttctgcttccctgcttaattttagtgttcagtttgcatcagaaaataaaaacagtgacaaaacctagcacacacagaatcataaaggagcaaaattataaaataaaggatcataaaaagattagaacaaaaatcctaccaacaaaacctccacaattttctgtttgcttcacctcagattaacttcacttgaagctgtactccaaagcaaccaaacctgaataccaagctccaccttctccaattctagtggctgaagagtaaaatctcctccctgttagtgaaactgataattgtgattggatacggctaatatccattattttaaagaacttttccttgctagcaggttaggttagacacactaaaacctcctggataagctggtttcttaaagaaacagtacataaggtttcagttttcccatcatatactgtttgcttacccttgtctaggtgaaaaataaactaagtaacaaaaatgaaaatctcacagaagcagctgtgaccaattgtttaaaatacaatgcttttaatctaaatcatttatttttatggagcaatgaaggtgaagttatgctttaaagacagattatttttaatagagttcacattttacctgaaaattgtaaaacggcaacagaaaatccattacaatatgttgctaagaggaacaaaccaatgtttttttctaagacttaaagagaaaactataacttaagtgaaaatatacagcactaaaatactgaatgcaaaagattcacttctaagctatcaaactcactgacatttatgttctcagtatcacaacagagtagaaatttcagtgacatcaaaggttgatatttctacttaaaactgaagaaaatactgggcagaaatactattacatttaacagatctgacatgtgagtattttgccaaggttaatgcttaaccattggcaaacagatatctaaaagcaaaaggcacatgttctaatgacatgttcaggtataaaatttagaaaagtttaagtctttttcatcttttttttttttttaatgtgtggaaactactttgcactccataacttcaaagtggcatgggcaccctaaagtaaaaggtatactcctcttaaacttctcactaagctacgttaaataatatttttactacagagatcataaagagacactacacaggaactctgatttttaagcaaaaaagacctactgtcactttatacattactaagtttgctatttttacgtgataagtttatatattttaattagaactgcttatgttttagcagcttggcccatcaaacattactctaacattaatcattatctgactgattaaatggcatttaatgtctaatttacggtgtaagtatagtttttacctctaccaaaaatcctgtgattcataaactcgaaattaaagcttattagagtgacttcttcttaaaatatgctttcaatgtatggtttgcatcagaaaataaaaagtgacaaaacctttaaacattttaatttgaagttttcaaagttcaaaatcttgcaactatttttcctcagagaaaactcaaatattagaacacaaagccaacaaaattgttttgaatacaaagggaagtctttgtaacaaactgaaaattcacataattgcaactaggcatgaatatggagcaataccctgctgaagcccaaacagctgcataatctattatgccctttaagtggacaaattgaaagagccaattcacaggggtctactcccaagatcctttgcaaggattcactgttttgaatgcccagcacttcatgagtcaagttcaggttttcttcccactgtgtggacactcttgcaaaagaacactggaagcagaggaggtacagaagcaatcagcaaaaagaatatacagtttgaattacagcataagatttgaggaaaagtgactgtagatggccaaaggttttacgggaagaaaaaaaaaagagatggcaaacagtttaatcttaaaatctggcaagcataaaattagtaaatagttatggaaaccaaataaacctttgctctcgcatcaatttttcacttcgaagttaattatgaaacaaatacgaatcatacactaatataacaccaagaccactctccatctatacataaccaagagaaaagagaactgtggactcagtgattccggatcattttaagatctctgggacctgcttgaaag

SEQ ID NO: 1242542 - DNA, 4001 bp, Homo sapiens
aagcaactctcttccctattgtgtgttctctcctaatctcattttaaaaatcaaagtttcattagtatgttccaaaggcctctctcaccttgaattttccttatttttaacactaattaaaaaagaggagggaagggtgttgaagtactgttcacagaatagcagcaccaaattaaacttggcttttcaagggaaatgccaaatggcagtaaattaagaattaaatttcgttttacagaccctaaaactgcattaaagtgagccttgtaatcattaaacaagattataaatatttattctctagaaatactgaaagattaggaactagataacctctggagatttacacagtgttatgtatctactgaccaatatagaaaagaaaataatggggcaaagtgaaacctttgggtttttcactagttttgaatgcagcaacatgtgtccctccatttctgccacatatcctttgaccactttcattatgaatatccatattcggccgcgcaaggtggctcacgctggtcatctcagcactttgggaggccaaggcaggcagatcactggaggtcaggagtttgagaccagactggccaacatggtgaaaccccacctctttgtaaagtacaaaaattagccgggcatggtggcgcatgcctgtagtcccagctgctcaggaggctgagacaggagaattacttgaacttggtaggcagaggatgcagtgagcagaaattgtgccactgcctccagcctgggcgacagagtgagactccgtctcgaaaaaaaaaaaaaaaaggatatccatattcagtgtgtattcttcacgttttctaaatgttttctcattcactgattctaaagatagtccatttttattttccttcagtcaacacatttgtgttatgaaagagaaagtaatttcattttagtgcatacactgcataacattccttctactccatgcctcagtgaacagttaacaagattttataagtctctgtctacatgctcatcattttgctcaatacaatgctgtacattttaatcactccatctgtacaaacaatgcattcttctaaagagagagaaaaaacatccaattaagagtctcactcctaaatccataaagaaaaagtcggggggaggagggtagaaaaaaaccagacaccaccctaccatagattcttaaggtgttaactttaacaccttaaaggaaagaaaaggagattttttttcttccataggcatttctattattcaaagtactttaaaaaataaaattggcgaatttaaaaaactttcaactgcatttagggaacaagggtgcttgtattttgatatactctttgactaaatgaagttattttttaaaatattagcttttaaaattattataatttaaattattatttccagaagcaattttctctattaatatcaaacatcataatcccaagtaatttttttatggttgtttggtcaaaatattaactttaaatggctgaaatcaatgcaaaataaacagcaatctaaagaattacaatcttttgcttcacaataataaattagtaatgcagattccaatgcttataataattctgaaaaaagatgtgtagtcactaataacattagttataaatgttattgcacaaattattttataaataaaaatctaccacccactccaccctcagtatcctacccaccagaaaaaatacaccctaaaaatgtctcatcatgatgacttaggtctatcttcaagcattttaaattaaaaaaaaaattaagttactatgcccaattacatagggttacaggcttaagtctctactcacacagttgaggttgatgagcaaacagctgtcctgtatcttgagacagacattagctttctgccttccctattctcataagcagctacttaaaagttttgaattttatgcaagaaaacattttaaagccttctgtgttttactgcagcagacttcagattcattcctgtaacacatttaacatgaaacagagttgagacatataaaatttacgtaccacattttaaccacctaaaattttaaggagtgctttcgctattatagctaggttaaaagggtggctgaagaaaaagtgaaaaataaaaacattccaattggtatttgacattattaacaatatgcatataactaatccatagattttctatacctggccacagactaggtgagtaaggattactttatataatcattttatccaaagtaagcaaaagtaggtatttttctgttttccttaagtctagctaatttatttagaataaacagctaccaactaaagaacacttttaccaacagtcagtggaatgcctttagagtctcaagtatacatgtcatagcaccggactagggagaatgagattgttttgtgacagcaggaggagccatgttgctgacattttctatggtttatagcacatttcttgacagattaaaatttctacagtaccattattactacaggttaatcaagtgttagaagccttgcctagaaaataaaaccttgttcccataaaaaaaaaaaactattctactaaactgaactttcaaaataccaaaaatacagaaagtctgtaaattaagaactacaattacaagataaaaatctttgtttctccatcccattagcaaatatgtattacataggcagtcataatgacagtttgcactgcaaaaataaatgtatgtatttatttatttatttatttatttgagacagtttcgttcttgttgcccaggctggagtgcatgcaatggtgcgatcttggctcactgcaacctctgcctcccaggttcaagagattctcctgcctcagtcacctgagtagctgggactacaggcacccaaccatcacgcctggctaatttttgtattttttgtagaaacagagtttcaccatatcggcagggctggtctcaaattcctgacctcaggtgatccacctgccttggcttcccaaagtgttgggattacaggcatgagccactgcaccaggccaaaagatttaatttttaaaaaaatttatattgctacataaaaagtgccatttaaaaatctgacacatgccggacgcagtggctcacacctataatcccagcactttgggaggctgaggcaggcagatcaccagaggtcaggagttcatgaccagcctggccaacatggtgaaaccccgtctctacaaataacacaaaaattagcagggcatggtggcacatgcctgtaatcccagctactagaggggctgaggcaggaggatcacttgaacctgggaggtggaggttgcagtgtgctgagatcatgccactgcactccagcctgggcaacagagggaaacaccgtctcaaaaaaaaaaaaaaaaaatctaacacattatatctaaactttaatgtataacagtatcagaaagccacaatacagagaaagattctaggctttgatgtttcaatgcatttcctattcacctgcattttttaatacaactgtaagtaaacttcaagcaaaatatgtacacttcaattaaaacatcctagaatactgagataactacctttcccctatatgtacactgggctatacctttcccctatatgtacactgggctaatatgtatattggtctaaatttctatagtaaattttaggaaaaacttaaagatgtcatgaacatagtaaatgtactgtttatattagcaacataattcaaaaacaccatgagaaatagcacccaaacactccaatttcatagactaattttaaaactattaattaatgctgaaatatttaacatttgctatgctgtaagagatgacttgatgttttagggtttattcaaagtaactcaaatgtttctctataatcgacttatatggtacatatgaatattttaaaaataattcaaaatctcataagagttatatgaaaggtattctatcataataagttaaa

SEQ ID NO: 1242543 - DNA, 4001 bp, Homo sapiens
ctgcaggctgctcccagggactctccaagcacacacagagagaagtcactgaagttatgaccagctgctgggaggaagaagaggagtggggcccctaaggcctagggatggtgagtaaagcaattcctcggtttccagtaccttattcaagccaaatgaaggtttatacaaaattcccatgctttctaccctgtcttcaattccctgacccagggatgtagaagacagatagataaagcccagtatttcaggccactgactcttccacaaaggagaatcagagagacagggcagagccgatgcctcctctgctcttgcagagatggagggaggcttggctcaggatgggctaacaatagcctccatttattaagcacttactatgtgccaggcactaaacccagtacttaacattcatcatgtgatttattccttacaatttacacacattattttacttaatcttgatgccaaccgtgattatccttattttgagagggccagagaggttacataacttatccaaaccaaggtcaccgcctcaataagacagcagagctcagatttgaacgctgactccaaaatccaggttggtgaatgctgcacggtcctgccttcctgcgtgacactaatttactccatctagttcccatcatctcctggtcagaatccctggccacaactgaggcagagggaacctgcagtttaccagaggaatctggcaggtctgtgatagggacaggacagtcagccttcaccatggtgccccggaagcaggaggaagtgtggtaatctaactccagcgacctggagaagggcaggctgcgggatggggaagatttcagagcagagggagtaacgggcttggtgtgatggacaccgcgcttcggaggagcagggtggagagaagaaaaccgccagatgctacactgggccgacagaaaagagtagctttgcaaaaacgacggcagcgcgctttacagtttatagggaactctcacctaaagcacttcagtggaccctcacataaaccctgaaagcgagagaatgttagccccattttacagaaatggaaactgaggatcaatgacttcatcaaaaccacacagctggaaaggagccgtaagaccaagtctttggacgttaagtcccgcgcttttccctcctctcctccctggccctgcagccctcggggagggaagactcgcctccttcttgaagagggtgaacttgacagcgcagccgtagcacctactctccatggtggctcccagcaccgcagggtctgcagagctgagatcacgccggccaagtcctgggccccttggaccctcaccccagctccgcccttcccttccctgccctgccccgccccacacgcccactggcactgtcccgccgcgacctagagcagggaatccggacgctctcctgcagccagcgtacggcagcggcggcaacgggggctgctgggagtcgtagttcattcacgactgccggcctccctcagagtcagtcaagcctgacccagaacacaattcccagagggctaggcgccgctcggagcctgcagtcctcacgcgcgcttagactcttgggagttgtagtacgaatccgtcaggccggaaccatggcagtgaccaaggagctcttacagatggacctgtacgcgctgctaggcattgaggagaaggcagcggacaaagaggtgagaacggtggcgaggaaggctgatcttgagaggtctggcggtccttcctgtcctagcgcctcggccactgctggcatccgctctccaggttcattcgggtcctgggcggggagcgagggtcggcgctatgccctccgcaggcgggctcccagacatttcctggacggtccgagggcctcaagaggaagcggggtacagagggctcttcgcgccgggtggctgtgctctccccgtggcccctgtctcctagaggccgcggggcgaggcagcaaggaacgctagcctcctctgcgcctgcgcagtctcggcctccgtttccgcttctgccttgactgtgacaagaggtgcctcatttcagtctcttctgcaggctgatttaattcttccactaagagcctagaacgaaagaaaagtaagatctcaaagcctctccactcccttttcatgcccccttgccaatgtgaccgatgaccctgctgtctctattttcttttccactcaagcccattgactcttttcaagtagctgatgcccttctcagcatgtgctagttagtgggctaaaagcaggaggatcagaaggttaaggcagatggtatagaggtccatgctaccttaggtggtgataaagatgccagggagtgaaacactgatcaagctggatttaggatttcttttatctccccctggatcatggtggtagttttaacaatatacgaaggagaggcgttcatcaaatgaaaattagtgcccaactgagccgagatcgcgccactgcactccatcctgggcgacagagcaagactctttctcaaaaaaagaaagaaagaaagaaaattagtgtctactaggccgggcgcggtggctcacgcctgtaatctcagcactttgggaggccgaggcgggcggatcatgtggtcagaagttcgagaccagcctgaccaatatgctgaaaccccttctctactaaaaatacaaaaattagccgggcgtggtggcacacacctgtagtcccagctacttgggaggctgaggcaggagaatcactggaacccgggaggcggaggttgcagtgagctgagattgcaccactgcactccagtctgggcgacagagcgagactgtctcaaaaaaaaaaaaaaaaaaggaaaaaaaaatagtgcccactaatgtcccagtacttctgggctgccctgctcatggggtgagtgagcttttgagaagaggaagctctggggcagaaaatcagagagacccagagggcccttgagaaatgctgtcaacctgcacaaatctgtcccctgcagccgcagctgaaatcagaaatggccatgggatgtctatgaagcatcaaaagcatctgctccacctctctcgtgtttcaatattttaggattaataattcctaacatctgtataatgcttactatgtcctagacagtattttttttttctggatagtattctaagtgctctatgtttacaaattattattttttaaattctttattattattattttttattattgtttttgagacggagtctcgctctgtggcccaggctggagtgcagtggcgcgatctcggcttactgcaacctccgcctctcgggttcacgccattctcctgcctgagcctctccaagtagctgggactacaggcgcctgccaccatgcccggctaataatttttatttttagtagagacggggtttcaccgtggtctcgatctcctgacctcgtgatctgcccacctcagcctcccaaagtgctgggattacaagcgtgagccaccgtgcccggcctattattattttttgagacggagtctcgctctgtcgcccaggctggagtgcagtggcgcaatctcagcttactgcaacttctgcctcccaggttcaagcgattctcctgcctcagcctccggagtagctgggactacaggcatgtaccaccacgcccggctaattttttttttttttttttttttgagacagagtatcactctttggcccaggctggagtgcagtggcatgatctcggctcactgcaacctccgccttcctgtttcaagtgattctcctgcctcagcctcccaagtagctgggattacaggcacccgccaccacgcccagctaatttttgtatttttagtagagacggggtctcaccgtgttggccaggccagtcttggattcctgacctcgtgatcttcccacctcggcctcccaaagtgctgggattacaggtgtgagccactatgccctgcctgcaaattatttaattagta

SEQ ID NO: 1242544 - DNA, 4001 bp, Homo sapiens
tgttgttgttattacatagataagggcttcctatgttgcccaggctggtcttaaagccctggcctcgtctcctcatgcaccaggacaataggcctgagccaccgttcctcccggcaaaaaaacttttaacatatagagtaaaaacaacttcctttttatagttaagcctctgactaaaaaggaggtacagacggggtataactagtattcaaagaagaatctttaaatttttattttagaatctgaaatgattctcttcatgttctgggacttaaaaaattatcccacctcataagtgcttctctctctctttccctcacattgaaaatttctacctcattaattaaactctttttaacaaattttataattaaactctttagaccagaaagcagtaaggtaaaaacataaatgcctaatacctgaatgtataaatgtaggtatgaaattatgcagtacaaattagaaaatttatattgcttaaattatcttgacacttatcaaaaaaaatttattcaagaaagcactgtggtagtcactggggattcaaagacaaaaagataaatcaaatttggcagaagcaacacgttaattcacaccagtcaaaaaatattttcctaagaaatgttatttggcagtaagactatactatatactatagactacactgttattttggcgatacgactatactatatactatacgatttatacaatgaagcttatattctaacacctttccactggaaaatttaaacgccaaataaaaacttattggtattcaaaagatttggatactggacaggtacggtggctcacgcctgtaattccagcactttgggaggctgaggtgggcagattgcttgaggtcaggagtttgagaccagcctggctaatggggttaaacctcgtctctactaaaaatgcaaaaaaaattagccaggcatggtggcaggcatctgtaatcccagctactcaggaggctgaggcaggagaattgcttgaacccagaaggcagaggttacagtgagccaagatcacaccactgcactccagtctgggtgggtgacagagtgagactccatcttaaaaaaaaaaaaaaagatttggataccaataaagccattctcaacatagttaccaacatggcaaaaatttcagatatgtagctacagcttatgtaggaacaatactaagtttgcttttttaagaagatattacagtagttcaagaaaacattccattgccctttgattagtaagacaacaacctcaagctaaactttatacctaagtttaaatgccatgggctgaccagtacaaagatataaaatatattctctgctgtgttctgttatagataggctttttttaaaaaatcaattacttaccgactttgttctttcctttgttttattaactgaatgagttccttgtcaaaataatcttcttcctcttcctctccttttccatcatcttctctttcctgggcatcaacgttatctttgtgcaactggccagaaatgtgctttgcatatgcagaaagacccacttctgtgaccccgcacactcggcactcatgactaatgtccctagggaaagagggagatgagggacattcaattctccccactggcatggcacactcaccagatctgttattgtttcctctgaaggacactgcacactttggcacagtgaaaaattagtgctaattaatttcaatgctcctttcatcacttttaataagtttgtttataagttacttttgaaatgattttaagattcttttccagcaatcaagaggcaatagacttcagataaatgtcgtttaggaggagaaatcttcttgaattgctgtacttaaaatcttgtcagaggaaacatggtgaaaggggaggcagggcagggggctcagagcaagcagaagttgctctggagcacacccatggtgccagctgcactcagaaggcctggtgacagcgcttacatttaatctttagtctagagctttcttccagtgaaagttaaggggtggaaacaagagtaggtggcgcagccaatcccaagtcggtaactaaatcggaacagctggagctctgcctggaatgtgaggattccggaccccaggagtagtccaggcaaacttttttggtctggatgatacatgtgatctacattctgcttcagaagggcttattttaaagggaatggaaagcatttcagttgtaggaagttaacagctgtgccaagcaaatgtgttttctcaagtttcagaaaatgctacagttgagagagatgcaaaaccaggtttttagttaaactaggcagacttttttgctttgttttgtttttttactttacatacttcatgcaaatctcacttagccagtcttcagaagccagtcttgaatcagtgtccacagctgtagcagatcagtaatttaactgctttttagcttctggaaatcccttgactgggtcagctgactatgcagtcatttatgagaaacatctgaacaccatagttacaagacagcagtatccattcaacaatccaaattggcttaactctgtatcatgtgtcctggatttagactagttatatttttgcacttcctatgccaatctattaaaaaaaaaaccaacaacccaaaaggacatgccgtctttgtccagacagaacacatacacacacgtgcacctctgttccatctttccctcacaaatacctaactagacataggcagaatttacatcaaccagaagagaccctcaaaactgggcacttcatttactagaggacagttactgttacagatcacctgaatattcattcaaggaaaaaaaaaaaaaaaaggccgggcttggtggggctcacgcctgtaatcccagcacttggggaggccaaggcgggcagatcatgaggtcagcagtttgagaccagcctgaccaaaattgtgaaaccctatcactactaaaaatacaaaaattagcctggtgtggtggtgtgcacctgtattcccagctattcgggaggctgaggcaggagaatcgcttgaacccaggaggcaaaggttgcaatgagccgagattacaccactgcactccagcctgggtgatagagccagactccatctcaaaaaaacaaaagaaaaaaaaaaacaacaccttaccaaaaaacagctaaattctaggtgtgctgttttttggtaaggtgttttctttttttttttaaatgaatattcaggtgacctgtaacagaaactgtcttctagtaaatacttagcatagacactcttgtttagggtgacaaagtttaaacactcaaacaatgcccagtaagtttaaaaaaacaacactgttccttattttgtaaggatcatggagaagagctcagaaaaactgagaaaatttgcaagttttcactcttttttgactttgtaacctcaaatactgacatttttaagattcattttaatgtgctctgaccaggtttcctaaaaatatcaatacctgattacccagaatatcaatattctaattccacaggtacttaaatacattatttttactgagggttttcaactgcacttactacatttatacacttaaagaataatcttcggccaggcgtggtggctcacacctgtaattccagcactttgggaggccgaggcggatggatcacctgaggtcaggagtttgagaccacccgggccaaactggtaaaaccccgtctctactaaaaatacaaaaattagacgggcatggtggcgggcacctgtaatcccagctactcaagaggctgaggcaggagaatcgcttgaacccaggaggcagaggttgtagtaagctgagatcgcaccactgcactccagcctgggcaacagagtgagactccgtctcaaaaagaaaagaaaaaaagaaaaaagaataatcctcaactttctccagtttaccagggataccgatacttttctctcaagcaattaaattgat

SEQ ID NO: 1242545 - DNA, 4001 bp, Homo sapiens
tttttttttgagatggagtttcgtttttggagtacaatggcacaatcctggctcactgcaacctccgcctcccaggttcaagcgattctcctgcctcagcctcccaagtagctggaattacaggcatgtgccatcatgcccagctaattttgtatttctagtagagacggtgtttctccatgtcggtcagcctggtctcaaactcctgacctcaggtgatccgcccgcctcggcctcccagagtgctgggattacaggcgtgagccatcgcgcctggccccttccaggccattttaaagttctcctcgaaaaccatctagtatttctaattaaagggctcctactatcttctagactcaagagttaactctaggcatggcgcggtattggcaaatgtgtagtagatactaaataaattctagttgcatctgaaaattgtctttcattatttcattcacgaccaaacttgagaacggggcttaaagcaaattttaagatttcccatgctatttacaacagtactaagctcttaataagcactcaaaagttatctgtgggccgggcgtggtggctcaagcctgtaatcccagcactttcagaggccaaggtgggtggatcacctaaggtcaggagttggagactagcctggccaacatggtgagacctcgtctctactaaaaatacaaaaattagccgggcgtggtggtggtgcacgcctgcaatcccagctactcgggaggctgaggcaggagaatctcttgaaactggaaggcggaggttgcagtgagccaagatcccgccactgcactccagcctgggcgaaagagcgaaactccgtcctaaaaaaaataataataataaaaataaataaaaatacaaaaaattagccaggtatggtggtgggtgcctgtaatcccagctactgggtaggctgaggcaggagaattgcttgaatccaggaggcggaggttgcagtgagctaagatcgcgccactgcaccccagcctggcaacaagagcgaaactttgtctcaaaaaaaaaaaaagaagttatttgtgctttgaataaactggatataaaccattatggtggatacagcacttatttgctaggtaagagaacttcgcttacctaggatgacagtctcaagttgctaaaagccacggatatctcaaacttctcaataagatgccttaatcttactctcaaagatgattacacaacaaattgaaaggggaagaggatgtaaagcatttcctctccacaattatacaccgagattcggactaaatattaaacggacacagtaagctgttgttactatttgttattagttgttattatcaagacgcatcccacaaggagagaaacgaaaggaggaaaaagaacggaggttgtcagtcgcgagaggttgaaatgtgtccctggcctgagacctacgggctttaaggaccagggtctttggactccctgcccaactggggacgaaggaggtcagtggcttcccctaaaggtcaaggctttggagccacgtttccttctggggctgggagcagagctggaacgcccccgcgaaaatccgtaccccgaagccagcagcaccgcctgcccataaacccgcgccggctctgggagagtggaccaccaggttgcccctgagccgcagcctgcaggagtagaaacccggtggtgtcttgcagccccacaacctccctaaggggcagacgaccaggacccttgggctccgatacgctcaacgcaggccggcccgtcgatactcacattcacagccaacccctcttactccatcaggccgccgagagccaggcgagggagctccctgacgcctcagacgcccccttcagttttgggtccgggagcctgctccggacccgctccccgccgggccccgccacagccgccgccaacgcgcaggcgcacaccgaagccgtcacgctcgcttttttttcctttgccgtccgcagttctcaataatctagctttatttgaacacaagagagtgaacaacggacacacaggaagaggtttttctcaaaaagaatggaggaagaacaaaggcaggcccgcttgcgggagagtcagtacgcagcgttggacgctatgaacagcctccctggtccctttttcattctccttgtttctccttgttctttcccggcctccctgtagctcctactctcttccttggtgtcccgccatttcctttagtcagtggcaactgttcgggctacattttgaaaacactccttccttgtaaaactttctgaagttgaatggaaggtgcaagagctttagaacagccagacctgagtttcagatcttggactagctacgaataatttgtgactttgggtaaattacaattcttcttggaacctcaggttcttgagttaaaattaggataatgttatctcacagggtgttgctaggattaaataacataggtcaagtgtttatctatgaatgctgcctatcacagagcagacattccataatactgactttattcttactcatgcctaaggtatttataatattttttaagtagagacggggtttcaccatgttgcccaggctggtctcaaactcctcggctcaagtgatctgcctgccttggccttccaaagttctgggattgcaggtgtcagccaccgcgcccagcctacatttattatttatttatttagttagttagttagttagttattttgagatggagtcttgctctgtcgttcaggctgtagtgcagaaccgctctcttggttcactgcaacctccaccttccgggttcaagcgataatcctgcctcagcctcccaagtagctggaattacagacgtgcactaccacgcccaactaatttttgtatttttagtagagatggggtttcgccatattggccaggcaggtctcaaactcctgacttcaaatgatccgcccacctcggcttccctaagtgctggtattacaggtgtgagccaccgcgcccggccgcctatatttattattaaacttagcccatacccattccctcagaaacctaattttagtgactaagactatcagataaatgaaatgacattcaggttgataattatgtggagtgtccctcctatattattgagattataacatctctgtttaacaagaccttcaacgtctcaaataaaagtaagcagcggtggggcacagtggctcacgcctgtaatcccagcactttgggaggacgaggtgggcagatcatgaggtccagagatcgagaccatcctggccaacatggtgaaaccccttctctactaaaaacacaaaaattagctgggcgtggtggtgcgtgcctgtagtcccagctactcggaaggctgaggaaggagaatcgcttgaacccgggagtcggaggttgcagtgagccgagacctcgcccctgcactccagcctagcgacagagcgagactgcgtctcaaaaaaaaaaaaaaaaaaaaaaagagagagaaaaaagaaaggaagcggctatattaacctcttctatgtaaatccagatttgttctagaggtttaggaaacttccaattccgtgtttgtgacatcacaagtccttgaaacactcaagggttgtggtacgctgctcattctattctccttcaaaggcatgcaatggaggaactattttaccctataaactctgggccatcattcagggaaaagcctgtagaagaccacagtcagatattggtgagtgccaaggtaacgctagattatggtttctcaactttgggattactgacattttggaacatatacttttttgtcaggggtatcctgtgcattataagatgtttagcagcagactgggagcagtggctcacacatgtaatcctataactttgggaggtcaagggaggcagatcgcttgagtccaggagtttgagaccagcctgggtgacatggtgaaaccgtgtctctacaaaaaatgcagaaattagcc

SEQ ID NO: 1242546 - DNA, 4001 bp, Homo sapiens
tctacctcattcccacaaaaatggtatatactagagttgagcaccggagaaggagtcagaagacctaaggttctattaatataattggccttggctcttcctagtcagtgacctcattaaagtcctctccctgaggctctgtttcctcgcctgcaaaatgattccagcaacccagaccacttcaaaaggggctaagagatacaaatcaggggttatcaatgaaaggcacaaaagcaagacacaattacaacagtatttgtagtgatgttaaaacatcagaggcacacagccctaacaatggtataagcaaaccagtgccttccctggttaagtttctgcgtggagacagctggagttggcacagcagtcccccaaagcaggacaccttacagatgctaagaggcagcttttgtgctttaaaactgtccttctagcgttccattttatgtttcatggcactaaaaaagacaaattctgtccaaacctgaaaataaagccaaatatttaagatgacagatttttttttttttaacaaatcttcgcaaacaaaggcctttggccaaaggtctcccgtgcttgcagaagcgggttcaccttgacgtttttcctctccagcagatttctccttaaaagcgttaaaacttgcgataagttgggaggaattccttccatcgctggagcaggctaaaacctcagagtgagatcattctttccgtctcagtaagtgaaccttgcaaagctcagaaaattttgtctccaactccacgtttctcctcagggcccttcttctgtagacaataacgggaattctatggcagaggaggggaggtctctttgacaaaaatgagggtgcaaacgtggaacgaccggtcatctgggcaaaatgaggggccctgtgcctgcaaatcccgaatcccctttggtctcctttcctacgactgaagagacacgggggtgggctgtggtgtgaggaccatgggtcttggccaaacatcggcacaaaatgtaccaaagggagttgcctccagagagaaaagccaaaaccaggctggggacaaacaggcgcacacgcctgggagaggaggtggcggaggagcagaaggcgaaggcctgcgcggcccaggcctgcagcagccgaggcggctgccgcgtcgcgccgggatacctcctcccccgcctgggccgacgcaagatggcggtccggccgccgccgcgcagccggtctcctcccccgcgctctgggcgctcccgacgacccgcgccggcctcaagacccccagtccagcgcccccggagtgaggcggcgcaggccgcgcgggagggcctctgcctgctgcagcgcagggcgggcgggggcgggggggcgcttaccgtgagcggagcggatcggcctgactggagccctgaggaggaggagaaagaggaggaggaaaaggaggagcacgaaaaactacactgcggcgacggcggcggctcccattgcggagctggcagccgagccgtggaaaggggggggctctcgtgcagccggcgcgctgcctcatgggtaggctccgggtcagcctccccgtgtccgagctccctgtcttctcgccgacgcgggaggcgggcaccggcatgtgcgccgcgtcgcgggccctcgaagacccacgcgccccgccacgcgccggtccggggcgagggccagggccctgcctccatgtgggtgcgagctgctggctggtgtggccgggaggcagccccaaaatccggactgctcggaatttgcaggcgaggagccgtgcgttccgggccctccgcgtgtgtaacgacccccagtccgttggcttggaaagtgaaaaggtcatgggatacagccgccgttcgaaagaagcaaggggcctgtgggtcgaagactaaaccaggagagaaaaaggaatcgtccgtttctttaaataacgagctgattttaccaagtctgttttaaatgtgtggttttgcttgcgttccctgtcgaggtcaaatacgaagagacgaatctgtacatttagcgttttatttgggacacaggaattgcaagttcaggttatttacacatacagggtggtcttcagtatgtcagaagaacaaagaggagttagggggttttattttttaaaaaaagttatctattgtttttctagaaagttcgttgacatttagtaaagttttgggtagctggttagttctgactggtgagggaaggggcttggtaaagcttgccctacagctgcagcaggttctttgagaagctaaaacctgaagataaaacctgtttcaggttacagcaggcggtttcagcagccaggcttgctgagaattccattcttagagcaatgttatgtgccctgagggcttcccccagcactggcttctccattcttttagttggctatgacaagagtgacccaattagaatgattaacttgcacactctaattcctaactctgccatctgcatattaacctgtaatagcattttttaaagtttgacaacgagaagtataagaaatttacaagaagaacacttgccaagatactgcttgcgtaaatacttgctaaaggttgtattctgatctgtaaggaaagtttcctaaactgattgtcttctcaagagcaatggcattactggtgcagcttgtgagtgaccaagacttgaaatcttgcctgttaggatccataacagacaccctgttcaatcactgaatcttgctaattcatcttcctattcgaattcagtttcttctctctcatctggctttccccagtttttctcaagtgtttatcattactgtagtctccatattgattactgcccccaaattaatcttccccaaagaccacctggatcactcctacagatctggtgtacttggaggtaaccatgacctatccttctcccacatgggcctgggatcatctacccagctttcccttttctgctggccctgaaaaataaaccttacaggaaaagacagaaaatagtcaaaacagcaaacatggaaagtttaaaaattccaaaatcttggaacattcttaagacatcgtttttcaaatgtccctaaaggttagcaaagcatgctacagtgtcaggtgaaattacaacaaatttaaagatctcggttggctttattgcaattctagattcaggcaccacttcattcagtaaaacagaataggtgttcccatgaatggagcagatgtggttggctttatagacagaaaatgggctgaagaaagaagaaacaacaaaaaacaagttggtcttttcaaagttactttccttgtaaggtggggcactgagacagaataatagaaagaaaactgattggttaataccaggttactccagattaatattgtaagaacaacagcagccaggtgtggtggtgtgtacctgtagtcccagctactgaggaggctgaggcaagaggattccttcagtccaggagttcaaggctgcaatgagccatgatcctgccactgcagtccagcctgagcaacagatcaagacgttgtctcaaaaacaaacaaaaacgacttaaaacagggaacttcattatcatggggattgaaggtttaaactggcctgtttgggaaattaggctgttatctctctcctgatttctcagaaggccacataacaactcagtttcagttttgtgagcatgggtaactccatgttggtttttagtctagtctgctggggcttagtgcaggagtttggtccaaaataatggcatcctcataaaaaggaatgaaataatggcagttgcagcaacctggatgtaattggaggccattgttctaagtgaagtaactcaggaatggaaaaccaaacattgtatgttctcgtaagtgggagctatgttataaggatgcaaagacatagtaatgatagagtggactttggggactccggggagagcgtgagaggggagtgaggaataaaagactatacattgggtagagtgtatactgct

SEQ ID NO: 1242547 - DNA, 4001 bp, Homo sapiens
taggaagccttcccaggccaccgtataatataaattcaactaccacccctgatacctcagattctccttccctgcttccttcttctccttagcatttcacactttttaacagactatatttttgttatatattttatttattgtcttctcccccactcccaggaaagcaccacaagggcaatcatttttgctttctttgttcactgcatctagaacaatgcctaacacgtatttgttgacaaatatttgttgttgaataaatttccacgactatttatttattttgagatggagtctcactctgtagcccaagctagagtgcaacggcacgatctcaggtcactgcaacctccgcctcccgggttcaagcaattatcgtgcctcagcctcccaagtagctgggattacaggcatgcaccaccacacccggctaattttgtatttttttagtggagacggggtttcaccatgttggtcaggctggtctcgaactcctgatctcaggcgatccacccgcctcggcctcccaaagtgctgggattacaggcgcgagccaccgcgcccggccacgactattaattattagactttcccaatggctaagaactaaaacatggtatctttctggcttaccaatgtactcccaacacctagctcagtgcctggcacagagtaagtgctcagtaaaaatttatttaatgaatcaaagccacaactagttgaaaaattggaaaatgatcaaaatggacgcactagcaccacacttctgcccctttcactgtgtaacgtaacagtgaggttgaggaaacagactactaaaataccaccaagcatccaccaggccaggaatctgtctgtccacatcctccgcactctgccacactgtgcaccacactgcacccgcgacagaagcaccctacaggccctccatgagcacaggcctgaactcaagtgggcaaaccataagccaaataccgtcttactccccaagtcccattcttctactgccagtcctattctagactagtcctggatgccaaacatgcttccctgggtgggcctgtggacttattccaatccaggacctttaatgccacctttggcctactcaaaaaatggtttaaaatccctaaacagcttcaataatcctgcagtactcaggagcaggcatacctaaggtcatacggacccctccccctcacaaacgctgatccaaggccaggaggccatctgtccagcagacgctctcctgtcctccctcaggtcacactgagcctcccgccaaccccctcgttggcaggaagagcccttgcagagagacaattttcaccctgatcaacaggcctggtcacccctgaggaccccaactctggagctctaggaatacctgtctgctccgggagaaaccttcctcagggtcagaacttgggctcaggggaggggagtactgaggagcgccaaagagggtcgttccccgaagtgtctgccctgtgacggcgacagctcttcgggcggcggggacggtcgggctgacaggccgtcccagagggagaaagtggcaccgttatccgtgcccgggctgggggccgccggctatcgccgagggcggccgcacgtcccgcccagcgcggaggacagcagcgtgcccggcctgccaaggagcggcggtcgcagcggcggtcgcagcggcggaaggggccggcgcccgacggccgggggcggggtggggtggcggcccgggcccgccaggcggcggtcgggggaagtggctgccgcctctggcggcggccagggtccgccaggctgcagggccgggccccggctcgggctcggactcggtcccggctgcgatcctcccgggcccaggctggggctgccccggcccgcaggccccgctcggcccggcccgcggggggcgcttacctggcggcggcggcggcgactgcaggccagagtctcggccgcgcgcgtccccagcgccggctgcgggagccacaacatggcgacggcgatggcgggcggggctgcggctccgggggcggagcgggggcgggagccggcctggcggcgggacctggctggggctgccgcggcgggggattgggggggggggggggcaggcggaaggcgactcggacctgggcaccggcccaggacggtgcggtggaggggctgccccggcctgggcccggcctcccgcctcccgcctcccgcccgaggcgggctgcgcggcgcaggcccggcgacggcgacgacggcggcggcgggtagggcggggcgggacgcgacgggacggggcggggcggggacggcgccgctcagggctggacccccgaccccggccggcccccgcccggctccagtccccgccacccgtgctaggcaccctgtgcggtcgggcaggcagccgctgccagcgacctgggcctcttgtcctctgacgcgcctcggggcaggggcaggggccgaggccgcccactagaggaacaggatctgcctacgcagctgtctcgcccggcaaagagcgcccaggacccgggactgcgtcctcttcactgagacctggcgcatagggggcctagtcgaggctgttaagtgaaagcaagcaggggtggcgtgggcctggcgctcaggtgcgccctaaatgtttggtcatagctggctacaaggacattcgcgcaggcttggaggtgcggggcagcctgacgtgttgcctctggggtaaccgagggacgcgcggcaaacagagatggaggactggcaacgggtgcctcgaagaggtagactgggagatctctcagggttactggggaaacgatgactgtgcagggtgagaactcagtgagtctggcagaaggctgggagggtgaccggcaggaccttccaagaacccggcgtacctggaaactgggtccgcagcattagggcggcagcaaggtcagggtgtgggaacacggagatgaggccctggtgactaggagtgagcacacactgctaaccatggagaaattccttctccaggaaggagatgcaaatgtgcaagatggctggaactaacatgcagccggagcctgctgtgcaccaggcacagaactgagttgaagagcttgtctaaagagtatgttagccaatgaagcaatggagttaataaagggtgatgatttcaaatgtttggcagtgagagagagaaaagtaggcctggagctcaagaagtaccaagagtaaaggagaaagttgggtcctactgtggaagctgaggcaaaagcatcccttaagccgagaagtttgagttcagcctgggcaacatagcgagaccctccctctctgcaaaagagtaaagggaaaagttgattgttttttgttttttttttttgtctttggagacggagtttcggtctcgcagcccaggctgtagtgcaattgcgtggtctcggctcactgcaacctctacctccagagttccagtgataatccagcctcagccttcaaagtagctggaattacaggcgcacgccaccatgcctggctttttttttttttttttttttttttttttttgagagagagtttcgctcttgttgcccaggctgcagtgcaatggcacaatctcggctcactgcaacctctgcctcctgggttcaaccgattctcctgcctcagcctcccgagtagctgggattacaggcatgcgccaccatgcctgactaattttgtatttttagtggaaatggggtttcaacatgttggtcaggctggtctcaaactcctgaactcaggtcatccacccgcctcggcctccgaaagtgctgggattacatgcatgagccaccgcacccggccctaatttttgtatttttagtagagatgggggttcgccatgttggccaggctggtctcgaactcctgacctaaggtgatccacctgccttagcctcccaaagtgttggaattacaggcatgagccaccatgcctggccggtgattttttttttttttttcct

SEQ ID NO: 1242548 - DNA, 4001 bp, Homo sapiens
agtggaagaaactcacagacctgctactggagaagcccagatgttgctaagagctacagatgtgccagaggcaaagaccaaaataccgacagcaaagaaagcatgagctaccactggaatacaggcactaagagggcaccaccacccaaacatacacatccagcctttatttattaacacttacatatggaaataggtattccctgctgcagctgatctaattacagagaaatcaatttatactgcatctgctgggatcagctgaaagcacaggatgagcagagcacagagcagaaaatcaagagccaatgaacagctcaccacaaggccactgttttgcaggaataagctgctgaagtttaatgctgcctgagctgaccctagactcacacccattctcctccagccctgcaagttccatttcctaaagcatgaactaagatcatcttcccagaggagggactcagttctaacccctcctggggctgcaggcacctgtccttccaagtcaagcagaaggcaaggtatcattacactgttggcagctattaaaccacgaggagactttgattcctaatagttgtgggagatacctggcatgaagctacacctttaatggccaatctcttcctaggccaaactgtcataaccacaacaataactcataagatctaagtacctcaaagtacaatgagtacctcttgccctcaaaatgtgccccttcgctctttggtagccggcaatagaacacttcgtagatatgccatgaaatttagccctttgttctaccagagacccaacagcaccatttatcccatcaagaaccgtactcaatctacattatcaccaaaggcgtattgtttatcaactattatgagtctgatgatgaaatgccagtcaagctgggaaacaaataaaggtctgatgccaatctctaccaacaagtgtctgaggtgggcaaagacaaggtgggaaggtctcaactcagactacagaaagttcattctacaaagtagctgcccccaacaacaaatatcctgttccacaatgtccaggcctgctgtaaatgagtctgtaggggaatcctctaatttggaagaaaaccacattatcattaccagctgctctgaccttgtaattggtcattacccacacactaatgagcctcccacagagtacacatagtatttggcagttagtccagggcagttctgactggcagtcagtgggcagccatatctggccacctcttaccttttcagacttgactttctttagcaggcgacactcattctccccttcctctggctccggtttagttcccaaaggattgagcgctgccccaggctcaatagctatactcccaagtggctccacagctcctgtatccacccctgcacttccatcatactgaccaccccgtcctcccaagggaactggctggaggaccccaggatccttttctgaacaagtccccactccttcgcttctctccttcttgctcttagatgagctgttctccttctcctttttggaaccggctacactgcgggatgccttagccgccttctctgagcccttgggagcaatagcagcaaccaggcctccagcattggcaccatctcctgagcgcccctgcacctctttcttgctagctgccccctcacttggagtgaacagggaagtccctggagtgggtttgctagtgtctttgccactcttactccttttggattttgatttgccttccttcccttgaggacctggcactggggtcacaaacttgatgttgtctggtagtgtggccacagcattgggagccggtatccccacctcctttgagcctgacatttccagtttctgctggtccttttccagatcggcgtccaggtcaatgatgagattccctactccaatgtcccattcatccccactgtcgtatgtctcaaccgggtttgcatccactcctttccctccggaggctccactgctcaaggacatcttagagtcaacgtcccacctcaagattcaaggctcttccttgcccccagctttcctattttcagcttcagctatgttctcagacctgccacattggtcagtacatgcccagtggacaacatcattgctggaaaaagaaaatttaaaaagctgttaaaagaaacaatacaggcaagagacgcctgaaataaactcccacacaaaaacagacccttcctatggggctatcatatcacaacagacatgacaaacaggttcaattgtatttctaaccaagttacattggacctaaggaaaaatcaattcccactccatctccctaggggaaagtacagtatttccaattgcccagagattccatggtaagtcttaactaggagtcctctagagttaatttcccactcctaagagacctatttctactaccactgtcagctggcaacccttcctcaatcaatacaggtcctggcatatcacagatgcaagctctagcacaactttacttatacccccatttctccttgctttttcttacattatcagagacgcagaacatgatctagcaaaagctttaaaaactctctaacagggtctatctctagtacaaatagtatagattcctcctactattgggaaggaaaagtcttatggttaagaatgaaagagaaaaacaagcagaactggggaaaatgcaacttcaggacagggggctaagacttgaactagaggagacaatctcagaggggactcaaccaatcagcttaagttcagagaagctgaaacagccttctaaaactccaggtttcaaattattatctcaatagcaggattcaaagtggcctttcccacttcccactaaaataggacgacacacaaataaagaaaaatgtttactctatgaaaaactggacactactaaaaatcctaacaccaggatgtagaataactcttcactttctcatgtaatactgatggcactgtattgacaaacaccaggcctcacaccataggaaacagagattggctacaaaagggggtggtggtgatggggtattaaaagtgcaatttatggccaggtgcagtggctcacatatgtaatcccagcactttgggaggcagaggcaggctaatcacctgaggtcaggagttcaagatcagcctggccaatgtggtgaaaccccgtctctactaaaaatacaaaaattagccagatgtggtgtcaggcacctgtaatcccagctactcgggaggctgaggcagaagaatcatttgaacctgggaggcagaggttgtagtgagctgaaatcacaccactgcactccagcctgggtgacagagtaagactctgtctccactatctcctgactaacaagacttgaggagtgtgccatctagaaaacctggcagtcaacatataccatccagtattattttatgataaagccaaagagttctgttcttgcttattcctctgtccaccacctttctctatccattaaaaaaaaaattttttttttttgagtcagagccttgttctgttgcccaggctcaagtgcagtggcgtgatctcggctcactgcaacctctgcctcccgggttcaagcaattctcccacctcagcctcccaagaggttgggattacaggcgtgcaccacaatgactgactaacttgtattcttagtagagacggggtttcaccatgttggccaggctggtctcaacctcctggacctcatgtgagctgcctgcctcgacctcccaaagtgttgggattacaggtatgagccaccgtgtccagccaaaaagtaatttttataaggtaattgagtagaaagaacaagccagtagtgtcacagtgaattctgcaaagtggatctctaactttgtagagatctgtaaatgccacagataggacacagacaagacaaattgtacttttttacctattccctcagagcaatgtcaaagaactagggtgtaggggcaagaaaagatgtcac

SEQ ID NO: 1242549 - DNA, 4001 bp, Homo sapiens
aaatgaactttgactggttttacttacacgtgtacaaatgcaggactgagagggcagcttcaaagctggctgagtgacccccaagagcacaaagtccttctccgcacacctgtgggggagttttgtgaatttcccagatgcccacagggactagttatgtacactgcaggtcgataccggccgggagtttccattttgcacagcaagaaaggtgctcagggtgccctttgcaggtgggcactcggcctgcagctcaagggtgggccatgacgttggtccctcactggattgcccggcaggcctccctcagacccagtaggacgagtacctcgaagagtccttgtgatcccagcactttgggaggccggggcgggcggatcacgaggtcaggagtttgagaccagcctggccaatatggtgaaaccccgtctctcctaaaaataattaaaaattaaacgggcgtggtggcgtgcgcctgtagtcccagctattggggaggttgaggcaggagaatcgcttgaacccgggagacggaggctgcagtgagccgagatcgcgccactgcactccagcctgggcgacagagcaagactccatatcaagaaaaaagaaaaggcaccccggatactgctacgccttgccctaaccgtctcgcaaatcctagagatacatgaatgaccctttcaggttggttaaaatccacacaagcacctccctggcctcttaaatctttccaaactacagcttagactggagggaagcagttgcagcgcccataaaagtcatcttaaaaggcaagttggaaaaaaacccgatacgcactagttagcaagtccgcggtgaagggggcggtggcccaagggccggatctgcgggatctgtgcgcctagggtggggaggctggggctgccccgtcggtccccgagcccgcgcgcccacctggtagcctgagggccccgatctgacgctggtgctcacgccccacagctccatccaattaggaaaatgaccgcgagaagacggagagagggcgacgaggaggaaggggggctgagccgcgggaggctcaagacgggccgtagggaccccgcccgccacccccacccccacgcccccagacagcgagcgccggtcctgggtccccggcccgcggcgccccgacgctgtcccggcggagatcccgcggcgcccagcgtgcggcggccagtggccctcggggacgcccccagccccgccagcggcgcgctcagctctcccccacccccggccggctgggacgcgcaacaaccccacccgctccgagaataaagtttgtgggcagccgtaggggcggggcggcgagggggtgaaactttgagtcccgggccgggtgtggggggagcgcacccagcaccgggacacccacgtgcgggcccgagagcctccgccaccgtcgcctcccgggcctcccgcgccgccgccgccgccgccgcgacgctttcctttcatttttgcctctctctctctctctctctctctctctctcattcgcgcgctctcctccctctcgccctctttcgctcgctccctccctctcccttccccctccccctcctctccctcccccccaccccagacgccatctctccctctttccccggctctccctctctccctccagctctccggcatgagggaatgtggaagtgaaaggaaaagacgacatgtttgcagcgcggcgcgggcctgcgcgcggccgtccccagggagaggcggggggcgggtcggccgcggccgcagcgacccacccccgcgccccccgcgcccccgccggccggcagcgcggggctgcggggctggggctggggctggggcggggggccgcgcgggacactcaccctgggtccgggcgcggctcctgcgctggggccctcggcgggccgggccgggccgggccgggggctcctggctgcccaccgcccgggctgctgctgtgcgcccgccgcccgcctccacgcgcgcccgccgcctgctcctgccgccctccctccggctcctctctttctctctctcccccctcctctcgctcgctctctcgctcgcgctctctccctccctggaagaagggaatgaggcagggctgacgtgaagggatgcaaaacagctcctcctaagccagctcgcagaggaagagagagacagaaaagcagcccttttatctctcttttgttttctcacttccttccacccccaacacctccctcttgtcagcccaagttttcttttctctttctaccgcagaggatttttcttcctttctttctctttctttcggttcaactctcccactcgaattgaaagcctgaagggttttctttctcctgtttttttcttccctcttttcttccttcttcctcctttcttatttctctaaaagggttttgtttgctgtgggagtttcgtttgaaaatcaagtcacgccttttttccttcttttctttctttctctctctctcttttttttttctcctctcagcagaaaaggggaacaaagattaactgaagcggggaagaggcagacctcgcttggaaatggggggcccggccctgtccggtacaaagggggcccgggggccctgcgccccgccccccccaagggaagccaggggcgtcctctggagaggagagccggtgcgggtgttggggcacgggtgcggctcctgggtgccggttccttcccaagtgcgagcgagggccgccgagcccgcccctccccagccagaggtggcaagctgggtgtgtgtgcttcacttatgtatttttaaagtaggcagatgggcctggaacaaacatccccgcagagcactgaacagcaaaagcctttaaacagctgttagcagagccctggacggcctgactcgagggagcggcgcgggctccgagcgccagggcccgggtggagaaggggctcagggcagctgctgggatcggcgggctggcggggtccccgagcccagggcctgggcctcggccccggggcgcactgctggggggcgccgaggcgtggtcgctggcagcgcggccgtcaggtccctctcggctccctgaggggccgcggggtttggcacagcctcgccgccctccagctccggcgcaggccggacaccaggcctccaacctccagaacacccgccactccgagccgtttctcgactgcaacgcagggcgggtccggagccctcggacagagccgggcagtgccgccaggaagggtcaattattcatggggcgcccgggcgtgctcccaagacctgctctgtcctcgggttctccggaggagtggggagaagacgggggaaagttcccaaagcaaagttggtcacatttgtcattttcccaagtaagtattgagcacctgctggatgccgggccctcggactggggctgcagccagggggagaaacgtgaggtctcggtgggccccgagagcaaactcagggaacaatgcaagggaagctgcggctcaggaccaggtcaccgggaggaaggaaagcctggatcctctcccctccctcttcccttccttcccttcccttccttcctcccggctgcatctccttggctccaccccttctcctcatcaattcctcccacacttccctgctctccctggcttttcactgaagggtcccttctcccagggaggagcagatgctgagccccattgtctctcccccagtgactgcagcctcccggggacacgacctgccactcctcacccctccccccagccctgagccctgggcctttagaaacgagagccccaaggccacggcccctcgccccaccctaaaccagctcctggtgctctgagctatgactccagtcactcagaacacatttgtctctgacgaggagtgaggaaacagtagcctgagagtttggttcaacaagaaggacaccatggtcttttaacatcagcaccctgagcccccaatgaccccagggcctttgcccaggtc

SEQ ID NO: 1242550 - DNA, 4001 bp, Homo sapiens
ccagtatagtagtaaaatatatcatataacccagatatcaatgttaaccaacaatcaactcttggtgctatgaatatgcattttcagtagcttgaattagagaaattagaggtgaacaagctccaaagtctctaaacatgccgatacagagcaacagtcatgataattaaaattaagtcatgaatccagtgaactgcaaagaacttggcagcaattaggtgccaaggtagtcaatcaggacaatgagtcaaaccaaaagtaatcaagcctttattcacttactgtgacagtgcaagcaagtggtaaaaagaggcactggctccccagtggtctactaaatacaaggacactgggtgagggtcagttgatgcagtgcatatgaggtaatcctctcactgaaaggagcccctaacaaaaatctcctgcctcttatggaacttcagaataggaaagggaggggaaggtctaggagtgaaagaagctgggtcaaaaatggagaaaagtgtcttagccacggtccttcctaggagggcctccaaatggaggtacccaggctaggaaagaagttatgggatttgcatatctagcaggaggggcagggcaagtccttgactgcaaccccctccagaaaactgcaatgcaccggcccatatcgagtatggtgtgggaggacagcttggcccttgaggccagtcaggcaaagcctggtaattgtccaatgtcaggactgaatgatcacacaggattttggtataaagccagattcaattccttttgtatgtttcttcttccctttaataaatgctttcgtggaacacgcctaaaagaaaaaaatcacacaccacaactacctctgattaaaacagggattggctacctacagctcctgtaccaaaaaggagctacggttaatcatccattgttagcactaagattggataactgttgtcacttgcctcccaccacgtggaaaagcacttactgggagccctagattgttagaaccattagtggcaagtggtgatcctatctcctgtttatgagagtcaggttagggatcctcacctcacgcactcatggagctccaaatcccatttcaaccgatttttgttgataacataaaaataaaaaagactgtaatttttcttatcttaaactgaaataaaagaatagtagatctgctcagtggttcaatccagaatttatcctgacaagaacaagatactctacgtgaagactgtaaaaactgtaaaaactgacctcaataatatccaatgttgcctcaaggctgaaagcctgttgattttcttgtcttgactagtaccattaaaacgatgtgaggatttcacgaaagtaagcgaacaagaaatgaaagacctaagagaaacacacacaactttcagttggggaataatctccggcggctgcttctgccccactcgccccgggcccattctcttggccttgaaccctcacctctccctcccagtggactacactggacaaaggacactgacacacagtcctcgttctaaaggcccacaaccaataataagcacgtaatggtcgagccgagtccagaaaccacaaaatcccacgccaggaaaggaagggtaagggtaaaaactgctttggctgcagccaggatgaaaacgccacatgtgatacaacccacagcaacaacaaaaaaaaatccctctacgccttcctctcaaatttctgctccgcgtgagacgcactcaataggtggggaagtgagaaagcaaaaggagctcaggaactgaggttgtggagcccccgttcttgggtccccaggcaccttggcggtattgaggcaggtccgaccctccctgggggtcgctccacttctcagtcgggtttctgaagtcctcctcacgcatctggagctggcgagggcccgggaggcacgcacctcaggcccaggtgccgcgaaggcagcgcgcgcacgtccgcagggccggcgcggcaacgggctgagcgcgcaggcgcggcgctctggcgcgcccagggacacagtccggctggaaacaagctccccccaatttcagggccgttgtcgcctccgggcggtccgcgggtcccgagcggactgggactctggagacgtgcccccaaccccaccgccattcaccctgtcattgcaggggagagaacagaataaagacgggtacattttccatctcacctctgaacctcggttaggaaaacgctgtagccctgactagtgggctcaagggccgactggaaaagggcgagtcagcgttcaaagccgattcggggcagccctctctaacgcagagggccgaggataagaagacgacaatgtgttaggggccctccgggctaggactgtcctcaccactttgtacattgccaaagtaaatataacgtagaggtcaagcgcaggcgctttgtgggcagacatgactgagctccactcgcgactcctctaatggcgtgccagctgcggacctcattagccccgcctcaatcattcagtatgttttggttgtctacagtgtacgaagccctgttctcacaattagataaaatgagtgtgaagtgctcaacataattcctagtgtagtaggccttcaaagaactattatcattattaattactcatatagaatacaactttatgaaatgataggatcccattttaagatgaggaaaatgaggctatcagagacgttaaggaacttaatgtcacacagttaataaacgatagaggtgcgatttgaacacaggttgtctaataccagacctgcatttataactgctgcttcccaagttatagatatttcagcattttatgtagtcacaattgaagaccaaatatttagttacagactaagttggcatgttattactgaataagatgctaaggtatctactaaagattttaagtgcaaaaggcattagagaagaatttactgtggattttttgcaggttctgattgtaattgtatcaccttgagaaaggaggaaatgaaagcagattatcaggcatacttttttaactctaagcaactttttgcattactttctaaggaccatcagcaacaaaaatcaatggtttctaatgttgatatattttcctctaccaaaaaaattaaagcagctgagccaacaaaaattctctgttttggatgtgttagcatgaggaaatggcgaataggaaatgagcttttgcttctcatgtaggaaccctgaaggagtcagatttgggaggggttgaagtctgcttccaacagaagcaggggtggagaagggaaaggaaagacttctggtgtcctaaatgctagtcccaaagtggggatgctgtttgtccggataacccttgtaaatctgctccattctgcagctactcctgggaaacttaactcagccaaataatgcaaacaattgcatccatcatcagccacatcagccttaggagatacatccatatcatgagaaaacactacctgaaattggggaccactggagggtgagattcgttctttatccattacctgcaaaacaaattggcctttgcatggagagtctgaatatatattgagtgtgaaagcagttaggacttgaataggctattctccaaggccacatgccccatgtcataacctcccccatttaccgtgagagctatctcaggagccttctggaaaaaaaagagaaattaacatgaataagagtaatcaaggaagatttcattgaatatgtgaaatttgaactagcagtagtgggtagactatgaataaataaaaaatgtgggggcaggacagaacatggtagggcagaggtggcagggtgaagaaaagatagtatgagaatgaaaaataaagggggtgcatgacatacgtttgaattagtatcttaatgctgcagcttactagttgtgtccttagaagttatttaacctaggctgggcgcggtggctcacacctgtaatcccagcacttagggaggccgaggcg

SEQ ID NO: 1242551 - DNA, 4001 bp, Homo sapiens
taactatactcatattagttatgggagcagctaacttcttggcttgcagatttggtgtcaacctcaagggacagattatacagaaccccaaagggaactgtgttggataccattctatttcaagatcttaatggagtcagaaataagactgaaaaagacattttttttttaaaaaaaagaagacatggataggttgtaaaaataagtgaaagtgggaataagcacaaaacacaactcttaggggctgaaaccaatcattaatatattaataaatcgacagcaatatcatgaaaaacattactttttggaggatagtcaagagtgaattactggatggatcagtcatttattcaacaattaatatgttgccaggcataggagtcacatagaaattaagataatgttttttcccttaaaaagtttccaataaaccagcctcagcaacatattgagacctctttctctacaaagaacttttaaaaatcagccaggcatggtggcatgcacttgtggtcccagctactcaggaggctgaagtgggaggatcacttcagcccaggagttccaggctgcagtgagctatgatggcgccactgcaccccagcctagcaacagagtgagcccctgtctctcccttaaaaaaaaaaaaaatgcagccagcatgaccacccactacaaagaatattgcatttcaagggaggaaggaccagactgtggtgaagaagttttactctttcacatcttttgtcccactacaaatcacctatttactactggaacacacacacacacacacacacacacacacacacacacacacttttgggggaaatatttttgtatttacagacattattattggtcatttataaagtattgagtttttaaggatctaaaaaccatctctctggtttaaaactttaacaaacaacaataatgtaattagaaagtaaaaattgtaataagagttttcagtattggccaggtgctgtggctcatgactgtaatcccagcactttgggaagacgagacgggcggatcacctggggtcaggagttcgagatcagcctggccaacatggtgaaaccctgtctctactaagaatacaaaattagccgggtgtggtggcacacgcctgtaatcccaactacttgggaggctgaggcaggagaatcgcctgaacccgggaggtggagactgcagtgaaaggagatagcgccattgcattccagcctgggcaacaagagcgaaattccgtctaaaaaaaaaaaagagttttgagtataatttttatttctacattcattacaaaacacagctgcagggcccacttgctggagacagcgccactgaggaggggagacgtcttagccacggttatagaaaccctgtttcccagcccgtccctttccccatgcacaggtgacctcaaaggccccacagcgctgaggggctgtgactaagtgccactgtgagaagctccagtgcgttcaccgggtttattaataggaacatgactgcacgcgtggggccgaaccccgttcttcttctcggtgctcgcgccctaaccggggtgcggcggtcagagggtcacagatcagctgaaaccctgggaccaccatcgagaagcaagaaaactgattaagagaatgacttatcccgccgacggtatagagaccacagctacctctcccacagcccagcaagacccgggggctcccaaaggccagcgcgggaaccccgctgagaaaacgtctgggtggcgggcaagccccctccacgcccctcagcagcgcgccgctgccgccgcggtctccctccttgaatcactcaccgccccagggcccagccggggatggagcaggaagtgagtcctccaccgccgagccgcacccggcccgcaaccccgaggctgtgcctcccagaacccgaccgggattcgtgacagggctgtggggacacaggtgggactccggcttcgacagccagcggccggaaagtaccgcccccatcctcttgctattggcttttcagtttccatggctagaatttttctctgtccataggctgatagagctgtcaattatcgcctagccttctgggaaacgtagtcccgagcaagacctcaaaggactcggagccgtggatgtccagttccaagcgttggaaagtgctaaacccaattccccagctaccggtcccccggaaccgcctgtttggagccgagggatctaaatgctgtatcctcactgtggcatctgcagatgtgaatctcctggcctcacccacctaccgcggagcagcctggtgcccaccatgaggtctcccgcgctctggcacttcgcccctccccagcgcagagcagctcagccctcgggcctttgcggcctctcttctgcccagtcttccacctcatccccggcggccggagcctgcagggtgtttgcggaggccaggtcccagaccaactcaaactggacattggaaaggcccagcagaagcccttagtagaaaacagacattccgcatccttcccttggcatcaaactcccaggcacatcccctttccgtctggttgatagccagaggaggcgggcgagggcatcaagtattctgggaaatgtgatatcgggcttcaaactggggaggctcctgggtctcatgtgagagccagtgatcactttgggtcggcccctagctaaaaaacaacaaagtctttccttaaagtgaagaaaatgtgcctgtctactccgtttgttgattcagtgcaatttagaaaaataaaagaacattttgtgatgtattataaaacgcttagaattaccagccatagagtttttttttttttttttttttagacggagtctcgctctgtcgcccaggctagagtgcagtggcacgatctcggctcactgcgagttctgcctcccaggttcacaccattctcctgccttagcctcccgagtagctgggactacaggcgcccgccaccacacccggctaattttttgtatttttagtagagacggggtttcaccatgttagccaggatgatctccatctcctgacctcgtgatccgcccgcctcggcttcctaaagtgctgggattacaggcgtgagccaccgtgcccggcccgagttaatgttgaagatccctttgatgctaattccaccattccttcaacaaaaataaggtgcattttccagtggatatttattgggaacattctgttctcaagatcgttctgggggcagggcgtggtggctcacgcctgtaatcccagcactttgggaggccgaggcgggaggatcacgaggtcaggagatcgagaccatcctggctaacatggtgaaaccccgtctctactaaatatagaaaaaattagccgggcgtggtggcgggcgcctgtagtcccagctactcgggaggctgaggcaggagaatgatgtgaacccgggaggtggagcttgcagtgagccgagatcgcgccactggactccatcctgagcgacagagcaagactccgtctcaaaaaagaaaaaaagaaagaaaaaaaaaaaagatcgttctgggaactgtgattactcgggaatcatacataaccattaccttcatgaagttcacaggccaaaaggggaaataaaccataaaaggtatcaaaatcctaagtaatttttttttccatatagccagtggcatcttagttattttgctacacaattatagtcatctgcaaggtaactacattgcattttcggaaactctgtcgactatgaacaaatgtctggttagcagaggtagttagacgtagttagatttagttagacgaaattgaggaaaatggaaatctcagaggaggtcagtaacaaagtaacacccaggaaacctagggattgccagtcctcctgtaactggaacagagttcaggacctggagaaccgaaggcatcttcagacccctcggtaagtctttctagcattttgccattaaggagatcat

SEQ ID NO: 1242552 - DNA, 4001 bp, Homo sapiens
aatccagcctcggcccctcagtactttatcttaaaaaaataaccaaaaaatcgagtccttaaaaatccagcagcagggaatggctaataaactatgacacacccatatagcagcatgtattagaaactgtgctataggcttggcgtggttgcctgtaatcccagcactttgggaggcctcggcaggcggatcacttgaggtcaggagttcgagaccagcctggccaatatagtgaaaccccgtctctaccaaaaatacaaaaattagccaggcatggtgacgggcgcctgtaatcccagctactcaggaggctgaggcaggagaattgcccgaacctgggaggaggaggttgcagtgagccgagatcgtgccactgcactccagtctgggcgaaagagccagactctgtctcaaaaaaaaaaaaaaaaaaagaaaagaaaaggaaaaaaaagaaaagaaactgtgctataataatggctacctttaggtggtaatgacaggaaaggggctcaaaggagccttctgggatgatggaaattttcaatatcttcatttggcaatggcggcacaagagcaaacatatgaaatttaagatctgcacattacgctgtatgtttttaatattttaaaaattatattgacaaagattaatcattaatgatttaagataatccttctgataggaaaataatggataaacacaaaatcagcagggcagaaaaaccatagacacagtaagtcctcaattccctttaaaaatgaactcacagccgggcgcggtggctcagacctgtaatcctagcactttggcaggttgaggcgggcggatcacctgaggtcggaagatcgagaccagcctgaccaacacggagaaacctcgtctctactaaaaacaaaattagccaggcgtggtggcgcatgcccgtaatcccagctactccggaggctgaggcaggagaatcgcttgaacccgggaggcagaggatgcggtgagcggagatcaggccattgcactccagcctgggcaacaaaagcaaaactccgtctcaaaaaaaaaaaaaaaaaaaaatgaactcacaggaaaaaagaacgggacggcacctacaaaatattgaaagcagtggaattgcaaacgacttaaaatattataaaagcaatacaaaattatttttagcccaagcgctgtagctcacgcctgtaattccagcactttgggaggccgaggagggaagatggcttgaggccgggagttcatgaccaacctgggcaacagagtgagacccagtctctacaaaaataaaaaaattttttaaaaaatcattactacatcataaagactcaactaacaaccctccctcaatgaaaaggggagaaaagctgacaaaagcttaaaaaaaaaaggacaaaaaataaaagctagtgggaaaaccgaagctctcaacgtgtatttactcaaatgactagaagaaatactggcatatggtgtaagagaactcttcctacttgggagcctgggaaaagtgtgccaggtcagctaatttgcggtctgacttggggcacgacacgccccctctgaacctcagtttccccatctgtaaaacgtgtacgctgcgcgggatgtcgtcgaatgccccttcccgtccaaagcctgcgcttctcggtaggagaggcaaggagctctccgccagggagacgcgtccgggacggttcgctgagcggagccggcgcgtaaatcggggctgcagggcccgcaggatacggagcgcgaccccgacgcccctcccccagcagagctgccggcagctggctccaggcccactattccctcacctcgggctactgcccggggtccgcgtggctccaggcctgcctctccggctcacctctcgggagaccaggtcctgctctagcggttgcttcgcgtgcgaaagcgcccccgggctcggcccggcccctccagattcaccccggctcaagcccgtggggcaccgagaacaatggacgggagaggcccgcccaccgccgcgctcattggctgccgagaacggccctggaaattctgcctttctgttggtggagacggcacccagccgggcggcaggagggaggctgggcccaaggcattgtgggagatgtagtccgcccggagacgaacctgaccgcggtccccggagtagggtttggggctgacagcctgggcagtgcctgcggaccagaggcaggaaaatccgcagactgaccgtcagaaaccctgtgttggctagagctgtaacccgagacaagccgtttcacttatctaaggcctctgtatatttgtctataaaaagtgaaagttggatggccggacttgaaggaccttttcggctgcgaaccttgtggcaaggagtattgttaggcaccctcgaccggcgagagcggaccctgggcaggaagggaatccatgggggaacaaatcctcatcgcccaagcctggcgcctttcccccagtttgcagctgtacacatgcacccggtcttcgcacacccctttgttttcgcacgtggtattcctgtgtttggaggaacgccctgccccgcctcctctgccgcggaactcccattcttccagcttctcctgggtggagcctgccctgtcatcaccacctccccaggcagagacaccgcccctagtacacgtgttggacgtccccattttattttttaaatatatatatgtatgtatttgtatatatatatatatatttatttatacacacacactcacagacaggatctacatttcatagagacagggtttccatatgttgcccaggctgacctcgaacccctgggctcaagcgatccttcctcctcagcctcccaaagtgctggaattacaggtgtgagccaccgcacctggctgacgtctccattttagtactgatcaccgggttgcttacttgtcaatctcagtatgggggaagggagggtgcccgggtgtgggaggttggcctccatctttgtgttttacggctggcgctgttgaagaaacggctgccccaaccctgcttgaaaacaggtgagaaactacctggaaactcaagcggaaaatctaaaaatggagagagacacccttaatggtctgtgatagaatagttatgtatgtttgcactgagcaattactggaggcacctgcaatgaaatgactgcttttttttttcctcctctgtcgcccaggctggagtgcagtgacacgatctcggatcaagtgattctcctgcctcagcctcccaagtagctgggattaccggcgtgcgccaccacacctggctaattttgcgtgtttttagtagagacagagatttcaccatgttgatcaggctggtcttgaattcctgacctcaggtgatccagccgtcttggcctcccaaagtgctgagattacaggcatgagccacgtgcccggtccttttcccatttttaaattggatttatttgtaagagctctttgtatattaagaaaattatccctttgtcacagcagttgctactctttctcagtttgctgtttgttttctgctggtttattaaatatagaaatttgaaatttttttgcagtcaaatttgttaatcttatctttttatagcctgtgagttttgtgttagaaagtcctctgcaccactccaaagattatgtgaaattcacctgtttttcactaattaacctcttgaatccaattacagagatgcaaagtgaagttcagctagtgattcttatccaataccctggtagcatctttattatcccagactgaccacatgcaaatagcaccacctccaggccagcctgagaagtctgcactaagcccctggatgcagaattctgggccaccacccctccaagtgattttttttgggatgacattgtattaaaaaagatgggtttctccatgtgtccatccttaccaggaatggaaatttacacaaaaaggaaaagatgcaggggaggctggggatgcacag

SEQ ID NO: 1242553 - DNA, 4001 bp, Homo sapiens
acaggttgggctatactgatacaagacattgcaagattctgaagtaaaattcttacttagcttctaacagactttcaggaaaataataaacataatttagttccccacaattaacatgatatttggagaacttaaaggttccaatagagagcaacagaaacttaggtttaaagaatggatcttggccgggcgcggtggctcacgcctgtaatcccagcactttgggaggccgaggcgggcggatcacgaggtcaagagatcgagaccatcccggctaaaacggtgaaaccccgtctctactaaaaatacaaaaaaattagccgggcgtagtggcgggcgcctgtagtcccagctacttgggaggctgaggcaggagaatggcgtgaacccgggaggcggagcttgcagtgagccgagatcccgccactgcactccagcctgggcgacagagcgagactccgtctcaaaaaaaaaaaaaaaaaaaaaaaaaaaaaaaaagaatggatcttctgggggaaagcttaaggtaacaaatatagtttaatttgaagatggaaaacaaccaaaaggaagatgtgccttcaagtatagaaaagaatttttatctagaaaataatgacctatactatcatcattaccaagaggaaataaaataattccaagttccgataaaaactagggagccattctcttgtggacttatcaagaggtaatatgaataccagaggctaaactacatgtcaacaaccacatattctgcaatttccacttactcctgaaatccctttcccactcactattcccaaccctacttcccaacttggaatggcagtctatcttcccatatgaatctactcctcaccgctcctttgaaaaggtttgagcttctcctttgggttcatctgctcctgtggtcccaggtctgggcttcttgccctctctttcttgggtacacccctgggctggggttccactgactcctgccgaacacttaataactcttgtgatgatttcgggggtgtcatcttctccaagcgcacttcctgccccttcacagagactgtgacctagaaacaacccccgttaattgtcactgcaagatcataatgaggggcattcccagaggagagtatttaataccccaaaagagatcatctttcagagccatggccagggttgtaggggtgagggaggttaacgcgaacaagggtcttattccattgccattagcttaaagcagttgaaactccagaaggaaacgatcaaaatagtaaacccaccttcaggctgaaaaaaaaaaatcccctttcttccctattaagaaactataggaaaaactcattatgacagggtaggtgaaggtacacccaggaagcatctccagacaagcactatctgaaaaagttacctataccagaccagaagtataagcctcaccaagggagactgtgtccctctttaagcctgtctatatcttaatttagccctccacccagtatcacacttttgaatttgaattccccctcccttctcaccgaagatctaggtcttccaggctctctttctaaatcttccacgagagtcactgcctcctctccattttctggacattgttcctgtacccaattctggatctccccaggtaagacggtcaggaactgctctagcaccaacagttctacaatctgctccttggtgcgcacctccggccttagccaccgacagcaaagttcccagagttggctgaaagcctcccgcggcccagccacctcctggtaatggaatctcctgaaacgctgtcggaaggtctcagagttagtgccattctctcttagagctgatttggccatcattaatagcagaatgcagcttcccttcgcttaggagtctgggttccagggcttacatctatcttcccatgtccttggagaatcccctgcagatgactgtaagaggtgtttcttcctagggcagagaaagatggcactatcagaaggaatacattcatatgtctaaagtcttgccagagctggcctgcctttccatgtgctccgagtggccttctaaggtagcacaatcttcagtaaatagactttgcaaaaactgcttttctggttgacttccagggcagccccaggaagcagcagagaataaaagtactgtctgcccctctcccacctcctccaaatccgatcccatttaacttccctggccaatgttgcacagtgagtccgaaccatataggagagctggagttcgagaggatctaaagacaagtcaccatcctgcttgaaggcaacaaaaagcctctgtccagctggtcgcagctgatctcccccagtatctccgcagtccttcccgaggccttctgcgtccgccccgccccctcgggctgcacaactcccaaagcccaccccaggcaaaaatcacgtccagaatctcgggtctttgttttccccgcgtagtagtagccgctcagcaaggattagggagctacctgtcggaaaacctcgcgcaaggagagaagctggttttggctccaaagcgaggaccatgggggcttggggagagtcacattgggcaggagagacggaatccgaggagcagtagtaacgggcttcctgaggacgggctcgggtgtcggccagaggctccaggtgctgccggttcgcggacgcagagctctcagcccaaggagcagcggctgcgggattctggcctcttttgtctccgctccctccggccgggtaacccggagccgtcgtgcggtccctccagaggcctctgacccggctaaggcgccctgagggcgccctccagcccacccctgggagcgtctccctctcgagctgcccctcaaccccctcgcatccttgcctccgggccagcctcacccactcggggtccgaccctgaccccggccccggccccggccccggccccggctctccagcctcccaagtacagctcccaaaccggaagtccgagcgggcggctcggggcaccgagggcgcatgcgcgagggcagcgaccgcgactcagtctccgcagagcccgggcgggagtagctggtggaccccgttgagctgccgaacttccgggactcccccgcgaccccttcccagcttcccgtccgctccgccgcagcgattgtctcggtgggttgattcggcacaaaccgcccgacccaggggccggtgcgcgtgtggaaggggaagcactcccctcgtggtcgcctggaggtgcgctggaggagggggtgacataaccagggactcgaggtccgccgtgggaatgatccacgaactgctcttggctctgagcgggtaccctgggtccattttcacctggaacaagcggagtggcctgcaggtactgtccggcgcagagcgcgggaaccagggagcgcaggaggggggacctgagccagcgcctgggggagtaggctgagggacctagcgagcggggcttccagggctgggggcgtatccctggacaggtgactggagggcagccccttagggtcaaggctgatgcgacacctagagaggccgggcctaggctagaaaacggagggcagacctcgaagagccccacctgtggcggggcgaggaaagggcctgaggtccaggtgtctgacagttgctggggaatgatatagaagtgtgggaggcactttctcctatttattttcacacgtgcattgtttgagttttgaagtactgggccaaatacacagctcccaaacacatggtaagcgctcagtaaagtttgttgaaggaaataaatgaaatcgagagcgtgtggtgtttccctcattactcctttaccagaaaatttctgcactaggtaaagcacttggtagggggcctttgtgtaaccaggaatgtatgatgttccgtatgcattatcttatttaatcctcacaaccaccttatccattttacagattaagctaggtttagaatagttaaataactatcggggtcatagctagtaat

SEQ ID NO: 1242554 - DNA, 4001 bp, Homo sapiens
tgagaccatcctggccaacatggtgaaacctcttctctactaaaaataaaaatacaaaaatcagctaggcgtggtggcatgcgcctgtagtcccagctactcgggaggctgaggcaggagaatcgcttgagcccgggaggcagaggttgcagtgagccaaaatcgcaccactgcactccagcctggcaacacagcgagactccatctcaaaaaaaaaaaaaagggtctaaataaagttgtatcaatagaggacttatttatttatttatttttagagacgggttctcactacgctgcccaggctggcctccaactcctgggctcaagcagtcctattgcctcagcctccagagtagctaggattacaggtatgcaccaccatgcctagttaataggagatttttatttttatttatttatttattttagagacagagccttgctctgttgcccaggctggagtgcactggcacgatctcggctcactgcaacctctgcctcccgagttcaagcaattctcccaagtagctgggattacaggtgcccgccaccatgcccggctaatttttgtatttttagtagagacggggtcttgccatgttggccaggctggtctagaactcctgacctcaagtgatccgcccgcctcggcctcccaaagtgctgggattacaggcgtgaaccatcgcgcccggccttatcttaaataaagatgaaacagccatagagtgaaatactatatagcagctaaaaacaatgagatagatctataaggagtcacaatgaaagatgtccaagacatgccagttttttttaaaagctagtgctctttctattcaaaacgtttacaagcgtcactacttttgtaagcaggaaaaaaagcaatgaagataaacaatgaaaaattataacatttaggaaatcatgggctagattacacagcggttctcaaagtgtgatgcccaaccagccgtatccgttacacctagcatttatcaggagggcaaattaattggccccatctcagacctactaaatcagaaaccctggaagtggggcccagcaatctgtgttttgacaatcccccggtgattctgatgcatgctaaatttgagaactatggattagatttttacataggatgcagaacttgatggaatccccttggtagtagtacttcaccataagaataaaatgaagtcttggagcacagtgaaaaaataaaggtgttttcaaaatgcaacacaccaatctgctatcattacaattgtagctgatgtggcaactacctcgaataatagagattaacagactaacaccacatttcattcttaggagtcaacaaggctttaaacaggggaaggatgccaacacctagttttccgtatcccgggtggtgcctctacttatggcaagtgtgtccatcagcagaaagaataaatcgcctcttggaacacttgccaccttccatctcgtttgatgacgtacacgttttctcctgagacaagcaagctcccacacggtcaaccccacaccggagccgagaaccggcctctccccaactcctggaccccaggaaagctggcaaagcgctgatccccagagtggcaagaggcttagggcggggatccagacacccagggaaagaagtgctgtcccaggaccccagccaaaagaagagactagactcactgaaggagacgagaataaaagtcctctgctgcgcagttcagccgctcccacatcccgccccaatgtgagagcggtaccggaaccgccaaactgaactgcgcgccggaccggcgacgtcaggggtcatggccccgccccgccgggactattttgaccaccccctacaataagtcctgtttgtccgcaaagttaaactttcgtttcaagccacccagagctatttactatgtcaatagtcttcaacttccgtctgcaataattaaaataagagcagtggttggggagaagatacctcgactcgcgagagttggcctcgccccctatggattattccgcaaaaaggagtccctattttctaagaattattattacgtttggaagaaaatagataccgtaatttcccacaaataaagaaataacactctcgtttttacttttgtagtgtggtagagagatattttttgtatccgtgttggttcttaggcggggcaaggtggggcggtcaaggggaaggtgacatatacagcgggagtggtaagcacttccttttcctgtggcagcagccgggctgagaggagcgtggctgtctcctctctccgccatggtgagtggaagttctcttggctggccttaccccgtatctcggggccagtaaggaaggatttggggttcggagcatagaatctgtaggagatagagcgaggagagggagatgaggaccaaaggcgtctttttctggtgtggaactgggatgtgcggcgatacggcagccatcttagaggcaacgtggggttcccagcacaggacgcgccgggaagcagtagtggaaagcactgggtcgttctcaggagcagtgggaccttctgttagaatatttgcttatttagcctttttctggatgcttgtctctgcctagcttgggaatcatttctattaaaagctttctggttctcttcgcctaaaaattgttcggtgttatcaaaatctttgaatccttagccaactcgtaataagaccagtgttatatgtgtactgcttttccacaaatagtgttcgtatatactatgtagtgttgtgtgccgggggagttaagcgaacaaaacagacactgtcctgactgggatggtagttgcgttggactaaatacgtagtaatattctatggtagtaagagatgaaaacatagggaataggagtggtttggctttaaacagtgatcagagaaagcttaaagtggcctgaaggatgtgagaaagctggcaaagaggagctttagagtgaacacttggaaagtctgaggcaagtgctgggtggtcctgagaccgaaaaatatctggaagagtgtatgggagttgagatcagaagtagagaagatggtgtaggtcagcctcaggattttcagtttactcacagttgggaagacttggaggtttaaacaaaaagtaatatcaccagtctttccactggtgagctttggaaacacgtgtttagtagagggtgagggtgagtgggacagggatggaagttgggatgagtagagcccgggtagacaggatttgctgattaattggcattaaacagcatctccaaaccttacaatatggttttgatttagctattgtgctttataaggcttgctttgaaagttttatgataaacaattctttttgaaaataaaattgtgcagtagaggttgagattctaagggttctagtcatttactgctattttggtttaagggttgtttgcctcaccataccagtctcttctgcaattgagtatttaatggtattgttggcgtatgagaagagtttgcttcaaacattacttgtcaataaaaataatccttgtctttttctttaggcgtgtgctcgcccactgatatcggtgtactccgaaaagggggagtcatctggcaaaaatgtcactttgcctgctgtattcaaggctcctattcgaccagatattgtgaactttgttcacaccaacttgcgcaaaaacaacagacagccctatgctgtcagtgaattagcaggtatggatttatatcttctgcagatattttagggactgctttacagtagtgatgaaattccacttcattggtccgtgtttctgaaccacatgattttctcggatgttctgatgctgtttgctaccatgcataatagtcatgggttggtatgtatgatgaagcagctacaacttttatctcttctcaattttaggtcatcagactagtgctgagtcttggggtactggcagagctgtggctcgaattcccagagttcgaggtggtgggactcaccg

SEQ ID NO: 1242555 - DNA, 4001 bp, Homo sapiens
ggaggattgcttgaggccaggaattcaagaccagcctgggcaacatgggaacacctgagcctgggaggtcaattttttttttaattggccaggtgtggtggtgtgcacctgcagacccagctactcgggaggctgagtccaaagggtcgcttgagcacataagtttgaggctgcagtgagctatggtcacaccaaaacattccagcctaggtaacagggtgagaccctgactcaaacaacaacaaacgtaaagacactttttcttttttttgagacggtgtttcgctcttgtagcccaggctggagtgcaatggtgcgcaacctcggctcaccgcaatctccacctcccggcttcaagcgattctcctgcctcagcctcctgagtagctgggaatacaggcatgtgccaccacacctagctaattttgtatttttagtagagacggggtttctccatgttggtcaggctggtctcgacctcctgacctcaggcgatctgcccgcctcggcctcccaaagtgctgggattacaggggtgagctaccgcgcccggccaagacacttatttaagacagccttccccttcttcttttttttttttttttttttttgagacggagtctcgctctgttgcgcaggctggagtgcagtggcgcgatctcagctcactgcaagctccgcctcccgggttcacgccattctcctgcctcagcctcccgagtagctgggactactgggactacgggcgccagtcaccacgcccggctatttttgtatatttggtagagatggggtttcaccgtgttagccaggatggtctcaatctcctgacctcgtgatctgcccacctcggcctccccaagtgctgggattacaggcgtgagccaccgcgcccggccgccttccccttcttgataaggctccccctcttttactgtctcacagcctcaagtgtttcccttcataatttccatacgcgcttcatggattgtttaatgtgcgcctcccccatcaggctgtcagttccatcccagcagcaacgactgttctgggctctttttttttttttttttttgaaacggagtctccctctgtcacccaggctggagtgcaatggtgtgatctcagctcactgcaacctccgcctgccgggttcaagcgattctcatgcctcagcctccggagtggctgagagtacaggcgcgcgccgccacgctcggctaatttttgtatttttagtaaagacggggtttcaccatgttggccaggctagtctcgaacccctgacctcaggtgatccgcccgcctcgacctcccaaagcgctgggattacaggcgtgagcctccgcgcctggccctgggctattacagcacatcctcagcatctagtacagtggctgctaaatacgtatttcgtgatcaggtatactaatcctttaacaccaagttcggaattaactcacatgcttcaaagcacaccgagaaatacaaactgttttacagaacagcttaagatgacggtctcggtgcgcctggaccggcatcagctgtttagttaattttaagaaatcaaggaatggctggcttacagcaggattgcacccagctggcccatccttcctcccgtgcccccacccgcccctaggggattaaaaccaagggagctaaaaccccaggttggcaaccgtgaggtattggtgctcagcaaatccacccgaggccgcgacactcgcagcgctcccgggggcgaacgcaaggccacactgtccagctcccgctccagcccagactgggcttctccaggccacgcggggcctgatcctggggcccactgcggctgcggagctttccccccagtctgcgggcccagccgctctcctagcaccgcagagctctccgagggcggcctacctctcctagggtcgccgtccccagctcctccctcagagtcccccgccaagggcccgctgcacctattcccgcagacgcgcagctgtaccggcctcagaccacgacctaccacaacccgccacgctccgtccaatcagagcgcgccgacggaaagtgccccgccgcgccttacctcatgagatattattggtcaaccaacatgccagtcaaactgaggacgaatccgttcattagtggattcctgggaaggcggctctaacttggctgatgcaactgcgagaaaaggtgggatggggtgcgtcacatgatcgagttagacccccccccgccccccccgcccccccccgcccccggctcccggaggtcgacattttggtttccataggcaaagtcctaacaccacaattgacatagttaaaaaggggagacggtaacgtgtttggtagaggttacatatcttgctatagttgtttattttagttgctgagtgatacacagccctcaaagagtctgacattgtgcccatggttacacttgtccgggggagaccttgaatttggtgtggaagaaataacatcagtagttcaggtacgattggatcagcatctggtcctcgatttgcctttggaaaaaaaaaagttaatatttataggcctgggggaggagggtgaatatatatatatacatatacatatatacatgccaggtgcggtggctcacgcctataattgcaacactttgggaggccaaggtgggaagatcacctgaacccaggagttggagaccagcctggtcaacataactagaccctgtctctacgaaaaattttttaaaaggccgggcgcggtggcccacacctgtaatcctagcactttgggaggctgaggccaacggatgacgaggtcaggagaccgagagcatcctggccaacatggtgaaaccccgtctctactaaaaacacaaaattagccgggcgcgcatctgtagtcccagccactcgggaggctgaggcaagggaatcccttgacctcgggaggcggaagttgcggtgagccgagatggcgccactgcactccagcctggctacggagcaagactccgtctcaaaaaaaaaaataaaaaataaaaattagccaggcatagtggcgcatgcttgtagtcccagctacttgggaggttgaagtgggaggatcacttgagcctaggaagttgaggctgcagtgagccctgatcgtgacactgcattccttgggcgacagagcgaggccctgtctgaaaaatatgtatgtatttatacgtgaggcattgcatcaaacatttcacatgcttatttcatttgatttttaaactgtgtatgaggtcagctggagtcccctttttacaaatgaggaaattaccttgcacaagttcacacccaatagtaagttgtggagacaggatccaaacctgtgtctatttaactccaaagcccatgctcttaaccactgcactattacctccatcatctgatatatccaaatacacgggtaataaattgtgctgctggtcataactcaagttacagacaatacagaaaaatactactttttatgcaaaaagagcatcctacacaaaaagaaggtcaagcccaaaagccagtaaaaacataaatcatttgatttactttcccacttcatagctgctcacaaatagtaatcatcaaacctaccatttattgagcacttagtatacagcaggcaccaatctaagcttttaatcctcacaaccttatcatgagttactactactatctgcttttaacagagtaaaataaggcagagagagaggttaagtaacacagctgagggcaaaaccaggagacacaagtgtttattctgatccacagtgccctaaataacatatatttagcttaaacaatctgggaaatgagtcagacttctaagccaccacacttaaaatagaaagccaaaaggtatgtatgaattgtactttcagaataaaataatacaggttgtaatctcaataatttagttctgctgccagagttgttactaggatagtaccttcattaataaaataattataaacag

SEQ ID NO: 1242556 - DNA, 4001 bp, Homo sapiens
gagcttggcaggtagacaagggcagtcgtggcagacagaggccagggtaggggaagggggatggcagcccggaggaaatgcaggcagcagcaatgtgtctgagggtgagcgtatcgcgtgtgatcgggtctgttcctatttgaactggaaactccctgaggccagtccttgtctccggctctgtcctctccgccagggtgcccagtgcctactccagagtcagggttcacttagagcaaccggctgccaagtttcccaaatacccagggacatgcaaagcacagaggacccccttcctccggcagcggcctggctgccagcttgcacacaccaactgcaggatcttcagcgccaacctttcaggattcccacatcttgccctgcaaatgaaattgcattttctaaaattgctttcttctggttgcctcttggggcataggctgcttctgggaaaaaattcaaaatgaacttctaatcagccacaagatgtgaagagagcggctgtccagagcttcctgacatctactcttggcgtgagccgccctggctgtcaactgagattctcactgcaaactctatctgaaatgcccagtgacagcgccccctgagccttccattcccctgagtttcaaagagaaaggggtgtgtgtgtttgtgctgttcttgtccttagaacgaagggaaaggatttatttagcggcttgaacaaaaatgccttttcaaggtgaccctcacttcatttcctaggaccagatgcaggcggactgtggtgttgcaagcctattgataagagcaattccttatctcatcatttctatatccatctttcattattttgtccccactttaaagggtctcctcctgctgtgttcacaaagtgtccttgaaaaatctgttaagtacatttgtgtgtcctacacacagagagccaggcacatgtgcacgcatgtacacagatgcacaagggtgtgtgcccccccgacctgcacaccccaacaccacagataacaggcactgacagacactggcaccacctccccatggcagcaaatacatacacatgtaaggatgcacacagagacacacatacacatttgcactcacggtgcctggtagtcggagtcctgcggcgagctcagctcgcttgcttaaaatgccttctgtatgccattctgcagaggccaggaacgcagctggctgggttcatcctaagaggtgccgttgggcaccagctccctcctcaggagggtgtcccggatttccaggcagtccccaaaacatggggacaggtggaggagacagaaaagggccccttggaagcagagcaggtttgggaaaaggatgcactcagctggtacccggcaagtgcgcaagggagagggacggagggaaggtgaaggaggaggggaaagacagaatgtgagagactgaaagatggattcagaaagacaagggttttcagacagaaacaggatgcaactacacagaaacaaagattaacagaggcagaaggagagcgataaacagagagaaaaaaatagaatacagattttttttaaaagatgttttaagcccagcttggtttaagccagaaggataagacacatcatttcagaccttgtaaaataggctatctccctcccctttttccttccagggcctcttcctagatttttttttttttttaacaggctcaggaacccctgaagggacaaagcagaaatcccgggcttcagattcctaaatggcttccccaggactctgctgatgcagtgttgtggacgcagccacagccatgacggggctccggggggcgccaagtcatctccaagacacccaaggcagaggggctgctctggcgcccacgctccacctgaccccgcctcgggggttggggaggaacctaccgggagcgattacccaactcccccattgtagcccatgctgggtcaacgcaggtccacagggggcccagaagaggtaatgagggtgatcacaagatggggagggggtatggggttgggggggcagagagctttcggtcacatgctgctcatcagttaccatgacgacggcaagggggtggaggcacccagaatggaggctgcaggagagacacactggttctaaatcaccgtgacagcgcttcggttgagctattacgccgttgccgaggcaaccaatgggatcaaatcgcagaggaaatctataattattacaagccagataccggcatcctcggtgcagtaatcagcacgttagggcaattcaacctgaactttgagagggagaaacgtcagcccccagcccccagcccccaaatcggggcagaacaagggccaaaggggactccacaaagcagatctgttgatgctacagattgggaacctggaaggatctttttgaccaaataaaacataaattgaggggaaccacatgaaattgacaatattcaccagtgagccacggcgcctagaccatttcccatgattttttatgaaactttccaatgcacagcaaagccgaaagaattttacggtaaatacctatatacccactactagcctctaccattaacatgattaccacatgtgctttatcacatcctgtttttgatgcatttcaaagttaactgtagacatcagtatccttccccccaaaatatttcaacctgcataaaagtaagcacttggtaatttttaaaacaaaaatagtaatttctttcttttctttttttatgagatggagtcttgctctgtcatccaggctggagtgcagtggtaccatcgtggctcactgcaacctcagcctcccgggttcaagtgattctcctgcctcagcctcccaagtagctgggattacaggtacaagcaaccacgcccagctaatttttgtatttttagtagagacggtgtttcaccatgttggccaggctgatcctcaagtgatctgcccctcccccccgacctcccaaagtgctaggattacaggcatgagccaccgcacctggccaaaaatagtaatttcatatggttcaatctaaagacaataaagtctaggtttctgttttttgtctgtctgttcattcatccatctatccttctctccctccatctctccatccatcttcccatccatttttccatccatccatccatccatccatccatccatccatccatcttcccatccatccatccatccatcttcccatccatccacccatccatccacccatccatcttcccatccatccatccatccatccaatcatccatccatccatccttccacccacccatctctgggagagctcatggacactcacggtttccacaaatgattcactatccccaaatcctctccctggttcagcagggtgtcctgcatatcaagtgcaatacgttctcacagtcatcatcttctcttcactacacctatctcctttcctatgttgagcatctccattaacagacccactgcctactcatttgttcaagccagaaactcaagaaatctgattcctccttcctgttatcttccttcaccaccacgccacggaatttgacttccacggtagctctgggctccaccctctccctccttactttgtccttgttcaggtacccatcgtttcctacctggacagttgcccccacctcctgacggcctcccagctgctatctcacctttcctctgctttctccacactgaatttttatcatgaaatatttggccatattcacgatgcaggggaactggcacttcattcattgctggcaggagaggaaattcatacaaatggcttggagagcaatttgtcaaaatctgtaaaattgtaaatgcgcaaaccattgatccctagcataattctacttgaaggaatttgtctcattgatataaattgaaaataacctaattgtccatgagtgggaactggttaaaataaacttgggtatatccatcatgcagaataacctgcattcaacaaaaagaatgcg

SEQ ID NO: 1242557 - DNA, 4001 bp, Homo sapiens
agagcactggcacgccatgaaattgtgaccaaggaggttggagaaatctgaaaatctgaagttacagcaggctggttgttggccctcctggtctctgagacccccaatctcccccatgcatttcccgaacctcagttcttggcatactacccttcctttgagctcttatgtctcatatgacttgtgttgacttaacatttttcttgaaatcaacttgctttttcaatttaaaaaagtaattttcctaggatcctttccaattgctaccttctggccaggtgtggtggctcatgcctgtaatcccagaattttgggatgccgaggcagatggatcagctgaggccaggcgtttgagactagcctggctaacatagtgaaacccctgtctctacaaagaaaaatataacaaataaaaaaacctaattgctatcttcccccgtcaagttttatttgctacgaaggcaactaggaaaagaacataataaaatcaaagcaagttattcaattaaaagccggacagagtggaccgcccaaggctatagccccaggcctggccccctcctttccctagagactggcagagagcagacaggtgttaaaggcaggctggcatcacatggggaccttttccttgacatgatcagaactgaaagagaaatttaaatccatcagtaaatcaaacagaataggaattgtcagggtacatagcaaatgctggtaatttttgtttcagctgtgcagtgggcctgaagtaagttctattccttactgtgtgtctcagtcaaaacaagtcaaaaccctggtctagccagatagtgagctcttcagtcccacccacctctcctcgtcctttttcttttgattaaaatgcaaattagctctctctgcttccttcgtgtgtctggtgcattgcggggaggggcgagatgagctaagaggccgagttcaatgtttaaatcagtaaaagtgagaggaattcaggtgaaagtggaaacaaactcttccaatttgctctggagaaagaataatcatagtaaaagtaccagctcccatttatttacttactgttcacctaccacatgcaatagaccttccatagatcctttcggtaatctgcaggattggctggcgttataaaaccggttcagaagcctaaaaggcttgttcaaggtcttagagctcaaaagccagaaatttctagcgttggctgcacctgacgctcgctcaccagaagcttacacttgtgtcaaagccccacccagactaagtaggtctgagtctcacaggtgtgacctgggcaccgggggaagctctggaggctcggaggctgagaactactgttaattaccataaagagtggacggtgggccctgcatatgaccacaggacttcatgatcctcaaatccctggaactggaggtcaaacatcccatggatacagggagaaaaaagcctgtggaggcagagtgtgaggtgctggatatgaaactgcttcttccctgcatctccccaatcttgcatccttcaaaatgatcttacccccagactagacatccctggcctctcactgacccgccgtataacctcaggcacattaagtaacgtctctgtgcctcagtttcctgatctgtaaaatgggagtaatagcaattggaactattttgtgggctggcagaagtccttactgtttccccagccccagagcagtgcctgcctgcaaacaatcattgaataaacagtaaatgctcaacaagcagcctatgaagatggcgtctgactcacctttctactccgctgcttcccaggtcctgtgaacacgaactctttgcatgcatcatcggctagaaatggaccccccagatctctctagaaaagaccctgcctctcattttcctatcagccgttgggaccaagacaaaagtgctggcagacgctgaggacattcctttcccgtctgcagccccagctgctggcttctctgcagactcaaagggacacaaagacacactcagccaagtgcacttcagttgtcaaggccaggggttgccatagcaacccataaagccggagccgtgggcctgtgcagatggggttaacagggccccattcaggggcagtggcacagggacagaggctttatctcacatccacttttctcctccgacttcagctgcaacagcctcttctgactttcccctccgcatgggccccagccctctctccctgcaggcatgacttcctatcacctgcctcttgggcatcataaaattatcagtgacttgtatagggagacagaaatactgttcttggaaacaggcaaatgtccattcctaagaaagactgagaatgatgtggggaaagtaacaagagccagaaattgggtctaaagtgtggctgggccatatatattacctaggcaagttgctgaactcatcagtgccttagtttctgcatctgtaaaatgggaagaatgaaatctatttgtggggtcaggaggcactcaactggcttagggtcaattgaagaaagtacataggatgtggaagagatgcctgttgcaggccattttctgtttccaaagagctctttaaaattgtgcattttggctgggcgcgatggctcacgcctgtaatcctagcactttgggaggccgaggcaggcagatcacctgaggtcaaaagttcgagaccagcctggctaaaatggtgaagtcccaactctacaaaaaaatacagaaatcagctgggcgtggtggcaggtgcctgtagttccagctacttgggaggctgaggcaggagaattgcttaaacctgagaaccgaatgttgcagtgagtagaggtcgtgccactgctctccaacctggcgacaagagtgaaactccatctcaaaaataagtaaacgagtaaacaaaaattgtgaacaacttctttttttccttctccttctcctcctcctcctccttctttcttcttctttttttagacagggagagacaaggtctcactacgtttcccaggctggacttgaagttagtaaaggcacttcttctatggcctgatgagctgctaaagactattggcacatgcggtggtcctgctaccagcctcaacatccagatttcatgagaaagaagctgatctgcctcatcctcatgctcctgtctcagagtcctctctgcccacctcaatcaggaatccagggagaacgaacacatcgttgctagcaggcaggtagttacccagcctgtgaaaaaactggagagaaaaatgaacagacagggcttcacatccaagcctccgaatgtgagacacagatagcctttgttctggaggtaggaaataatatggaaagaaacatctgcaaaaggataagctagctttggatttctgatcctacaagggaggaggagtgaaagaatggaattggcttagaaaggatgcttggacccatgctgaagtagctacccgggccaacgccacagaaggtccggcttgtaaaatctgtttgttcagttcaataaatgctttctgcacacctgtgccgagccccagagattcctcagtaaacaaggacacgtcctgctgtgttctgtgggatctcgtgttcccgtggggaggcccaacaagcaacaaacaaatcaggtcggtgtgattggaggaaacgcacttcccgttcagagaaaacaaaccactttcacggactccagaaaccgctaagtacgcaaaaatcacagcgtataacaagtgaaacatttatatttccttcaaggaccacacagctccagacttggaaacactttgttggtggctggagtcacgctgtgtgcctggcagcattcctacatgcacttgcaaagaccttaacttttctgtaattcaaagtatctttcatttatgcctgtgtgtgcaggtatctgctctgattttacgaatgaatgccaatcgtgtcaaggtttcacatacaccgtcttatctactcctgggaggcaaatacttctatt

SEQ ID NO: 1242558 - DNA, 4001 bp, Homo sapiens
tcgcacggggtaagcagggatgcgctgacacccaggaatggattccacgaggcagcctgctgggggatggcattgagttccagctctgccccttcctggcttcatgacctttgcagagccttggcgcttcctctgacaagtggggacttgggacccagcagtccccaagtccccattgtaaatgtgaggactggggcttgtgtcagggatcctagcaccttaagggtcctggaggggttggggccagctgtctcccacaggctgggtgaccttgagcaagtctcttccccttttgtgcctctgtgtgtttaactgtcaaatgaaggggccacgtctttaatgcagaagcccttttaggtcttaggactccagactggaccatttacctctccccgtggctaacctctttgggcctcgagaaaacacatttctctatgactccacgccgcaacacaggctccaaagagcaagacacaactcactgcctccctctctcctgcctcccaacctgacccaccagagaagagctcttcccaccccctccccacccccaggtcaccaacatcctgtcccttagtctagcttcatcaaagcagcaaagccaacactgtctcctccccagtggatgggcccagcagcacccatttctcttggctgagtgcccagggaattccaccaggcaatgtccacaggcgcttgcgggggtgcacactttaggggggaaatgcgggccctcttggaagagggccagctgtcctcccagactgcaagagagaatgcattgaacacagcctttgtgcgtgtgttggggcagggagcgggggagaggtggcgggtggtctctgctggtcctgctgcctcagaggccatctctgttgtcagagtttgaagactcctggaagggcctctaggccccagatcccagttttaagagctccagtcttactaaatctcgctgaaccccctctagtcttaccttggccagggtgggtgaggaaaggtgagaggatgtgaaataggtggggcagccaggtgtgggagtggagttggggtgaggtggagaaggatgggattgggagcggtgggaggatggtgcagggggttactaggatggggtttgtgtgaaagggcttgggtggagtggagggaggtggatgacttggaggggtggccagacctttgccctgctcctgagtatgaaggtccctcattttacatctttactggggaggagaggggaaatccccaaaagcctttaatgtggtggtgtcagaggccaccctgcctctctgacgggtagggaggggtctccggcagggctaagggtgaatcatctatctctccagagcccagtatctggggtgggagggtgacttgcagagtctctgctccgggatttccttgtcttatgatggggggagagcttccatttgtcatggagggggaggtcactgtaatttataagctgagaagacccccattattccgaaagagaggggagaaggaagacacccaaacttagttttctaaggatggggaaggggcatcagtctcccaagaggtgagggggctctagagacctggagaccactttttggggccgcattctatttcaagcggtaaaagggagaggacttctgtctagagctggagccaggaggaagggcccatttctgaaggagaaaggaaggtattttgctctctggggggtgggagcccctgtcttttcgggggagggccccgcgtcttgggaagatgagggctccgtttccaggagaagatgcccaggttttgctcctgggggcagggcagaaggacctcctctcggctcccctcggaagggcccgtcccaagccacccggcgcctcgcgctcacctccaggccccgtctccgatctgcgggatccgatccgccgggttccgacttgcgggatgcgcgccccgagttccggcagcgctgggtgtctgctcgacttcccccagcgactcgccggactccctggctccgccgagcgtcccggccaatcagcgccgccagccccggccctcgctttcgccacagccaatgggtgcgcccgccacgggccaccgcccccaggagggaggtggcaggcggggcgggggcagagtccagcctccgggggcgggggagacgggggctggggcgggacccaccagagggaccgcgagggctgggagggagtcctgggactggggaggagacggctgaggacccccgtcaagttgtggggaccctgaccctctggggggcagctccataggttgatttaacctggatcttaatgggccatttacaccctcagggctgcaggcgagtgtaactccacctccacccgcgtctcggatccggtctctggagctccagagtcggaatcagaaggggttcctttgcggagaagggaaggagcatcccgccctccccacctcactccccatctcggcgctcagggccctgccagcccttcttgctcccagctactttcctccgcctggccccagcgctccggaagacaaacagggcgctgggagtcagaggtggttccttctgcatgacctggagcaggtcactgcgcctcctgatcctcaatttcctgaaattgggacaacagagattgtacctccttcgtgggtataaacgagaccctagatatgatgaaggtgcctttctaccgttgtataaaatgctgtgtggaagataattaatactcaggtgtgacggatggatagcccccccacagctttctagaggtatttggaaagaggatgcaatctttcagtgacaaaatcaaagacacaaagaactgctcatcaagacaacaggcgatcaccaagtcctcataatgaatgaatggatggatggagagtacagaccttaaaggcagagaaagagttcagcttggttctccccactcaccctgatcactgataacttggtctgtggagtcttgtagaaccctgaggtctctcctcctgctgtccaggaatccaggctgccctatctctgattacacaagcgctatagtccttgcaattaaagaattaagataaagtaaacacatagataaatagaaagctgccaaacaaatcattcacctcctagtgtcacctctggggaccctcccccccaacacacacacacacacacacacacacacacacacacacacacagagcagtaaataagaataattgaggcctggcacagtggcttacgcctgtaattccagcactttgggaggccgaggcaggcagatcacttgatgcccagagctcgagaccagcctggccatcatggggaaaccccctttctattaaaaatacaaaaattagcctggcatggtggcacctgcctgtaatcccagctacctgggaggctgagacatgagaatcgcttgaatggagaggcagtggttgcactgaggtgagatggcaccactgcactctagcctgggtgattgtcaccttgcttgaggaacttgatgaggcctgtgctgaaaatctagcaattttttcttaaaaccaaagccatgaacataatcccctttactacccttgacctgcccaaagaaatacaacggccaataaacatgggagatgacactttgaaaaggaaaggcaagttaaaaccaaaagagggaaagagtttacctaccaaaatgaccttgtttttattattataattactattctttgcaaagacttcaaggagtttcatgtattgatgatggcagtagaaagatcacagcctttctggagggaaattgggtatttctattttaaaaatcttaaaagtaagttgaccctttgatctagcaatccaatccctatgaacttatctgaaaacatttaaaggtacaaagatttaatgataaagtagcttactaccattttgtttatcacagggaaaaactgggaacaacttgaatgcacaacagcagggactcagagggaaattgttgcatgaaattgaacaataaaca

SEQ ID NO: 1242559 - DNA, 4001 bp, Homo sapiens
tcatctttttttttttttttttttttgagacagagtcttgctctgtcgcccaggctggagggcagtggtgccatctcagctcactgtaacctccacctaatatgttcaagcgattcttctgcctcagcctcctgagtagctgggattacaggcacgtgccaccatgcccggctaattttttatatttttggtaaagatgaggtttcgccatgttggccaggctggtctcgaactcctgaactcaagtgatccgcccgcctctgcctcccaaagtgctgggattacaggtgtgagccacttagcccggcttccaattcatctttccattgtgcacaaggccttccccgtcagagccgtccccaaagttccagaatgcttcccctcaatagattccacagtctccggaagcagggctggggaagaaatggcaaactagggatcttacctgggccttcccagttgagactacgtcaaaatgggctcccatgagactgcctggctcatgcagatggaaggctaacatctttttagaaacaactcgtgctaccctctcctgttccaaaagcctgtctggtcagaatggtggtaagtcactttaggaagggagagacgtcgtcctgtttttcaggtagagttagcaaaggttcaatttaaaagaaaaattatctaagaagttaaaaatgaaagtgtgggggagattcccatgacatccatttttatctatttttccctttctcttacatttctcatgaggcaaactttctaaaacagtcttagtcttttcaagtttacaaaaggcagcgcccagactatctgaataaaatgacgggatgcccaggagaagagtgaacctctcccacgtgctccctgcctgggctccatgctgtcgcggggtctcggctactcactcagcgggcatttctggagttccaggaacacaaaccccaacaagatccaatcgacgccttcccggagtgcacagtccaggacgtaacccggagaacaagcggcaattaccccctgaggacatggcttcatctgtgcgacagacaccaagcgccttccccacgcccctgaccataaggccgtcccggcccttctgaagcgtggagccggcttggaacagagccaagacacacggacgcgatgcacacaggcgtcctgaccgagggcgccgagaacgcggcctccggcgactgccacaagcccctccgcctggactagcggctcccctttcccgttcccacacagtggagggcgcagcaaacgcccgccgcggaccgtgggccttggattcggatttggaggctcctcggaaccagagggtgggagcaggcggaatccaacccgggcggctttgccaccgcgcgcccggcatccctgcggccggaaagcggcgccatctccgcaagtgcgcggcggacgcctgcatccctcggggccggggctgtcggtcgctacatatccaccttctgggcgcacacagagggcccgggccgtgccgagtctccgcagggtcgagcttccccgcgcggcgcgggctcaggcactgcccgcagtgcgggacacgcccaaggctcggatgggagccgacgctgagggagcggcacctgcagggagcgcccggagccgaggccgcggcaggaggggcgggcgcgggcgcggccggaggggatgcggggtcgcgggaggggcccgcaggccaggccggagctggggggggcccgaggcccgagctggccggcgagggtgggaagggcggacccgggtggggaccgcaagccccgggaacgagcgcgcgagcggcgggtcccggcggcactcaccgagcctgggcgccggggcggcggcggccggcgcgcggccctctcgcggggtcccctccctcggccacccgggctccgctccagcctcgcagtggcggcggcactgacagctgcgtggccgccctggaggggagggtgcgcctgcaacccgctactggcggacgcagcggccgctccggctcctgcagggggcgccgcggatggcgcgtgcgcagtcggccgcccctgcaggtgcccggtccacccccggccgcctcggccgctccggccagcccaaccccgcgcctgcgcggtgccccctgcatgtcgcccatgcccggcagagggcgctctgacttgcgcgtgcgcagtcagccaccctgcgagtacgcggttcgcacccggccgcgcggcagcccgtgcttgcgcactgctctgtgcccgcgcctatgtccagcagggggcgcgcagcggcggtagccgagcgagggcgcggtggcctctgacaggaatgactctgcgcacgtgcgtttcgcagcagtggaagtcttcacacccggaaactcgactttggccgtttctccatttctcctcacgcactgtctttccttgggccctcgtcactcctggcaccgggggaagggcttccccgcctctggccgggcgctggggcgcgaccgaaggcgaggcggcggcgaggaaccttctggaattcggccgtcggggcaggcgtcgagtttacaggagaaggcgcggtgtcccgggatgagcggagtcgccctcacttaaggagcgagggaggcctcgggggtccccagccgggtaggagtcacctcaggcaggagggcccggccttgtcggggtcacctggcgggagggtcccggggtggggcggggccgcctgtgaggagggtccagagagggtcggggtcacctgaggggagggtgggggggttcggggatggttggggtcacccgacgggatggtccggggagggtcgggttcacctgaggggagggtcggggagggtccggagagggtcggggtcacctgaggaggtggtccggagagggtcggggtcacctcacggagcgagcggaacggggtcacctggagggagtgtccagggcgggggccctgcagggagtcgcctgcagggagggtcccgggcgtgtcacattaggcggtcccagggacgggtcgcggtctaacgggacgggagtggggaggtgggtcggggtgtccctgggccggaccgggtcgtgggactgggtcgccccaggcaggagagcctgggaggggcgggcccccttggcgtggcagggagaggtggagtgagggactcccgggctccagcatgagggcgggcgccgcgcggggccgacagttgccgcgggccggggccaatgggtccccgagcgccgccagcggccggaccacagtgaggtgcgtccgtggtcccggcgccccgggtgagggagggctgctgccggtcctgccgctgggagccgcctgcgacccgcaccgccagccccgcgcccagccagccgccggcaccacgacccgacggccccgacctaatgcaacgccccgggccgggggcggaaatcgcccacccccaagagtcctgatggagtagggtttgagcggctcgttccccattttactgtgtacatagcacctttcactctgatgatgttctggatagcccattccgcgagcaaagggacttcgtcaggttcatgcctagatccagggtcctagagtgcctggggcggaggaggctcatgctaaataatttgttcagtggaatcacagagacctggcttcagatcttgacccaccaattaatgtagacatgtcattttatctttctgagtctcaatttcctatccctaaaattgaaattataataatagtaattaataataatagcaaactcaaaggttttttgttggtgtattcttttcttttttgggtcaaatgagaaaatgcatgtttaagtgcttactacaatacctgacacataaatgccaaataaatggtagtatataatgtgagtatagctagggatttacatagcctagtctccgtaatgagcatacagggggaaaaaaaaccccaaacaattgaatgcagttacaggatgggtgggggagtggattattaatgcgctgcaaacatcctaaaaaccc

SEQ ID NO: 1242560 - DNA, 4001 bp, Homo sapiens
cctccaacaagtcttggaatccagacagcagaaatacgcaaggtcaaacacggggatggggtacctaccagaggcagagatcagctacaattacccccaagcaaaacccaaccacctggcaatttctgtggcagaaagtccttaacgaaggaaaaaataaaaagaaaaaagaaaataaaaattttaaaaaatattacaactggacttcgtgaatgagtttcttaagataaacaaagcgcaccccaaacatactcattagccatcaactaccaattgccatcaataaaatacgtcctgatacaaaacctcatggatgttcaccctgttttgccccctcctcaattcagaagaaaataaacaagagaatattctggaattcacagcaacacaaacccagatcaccatgtgaatctttgcaaaaaataatcttgctgttactacacctggcaacaaggaagccacaggttttcccctgctaaagaaagtccatctgcaaagaggctccaatcacccccagaccctcaaggcaaagtctgtgttctatttccacccctggggttactctccaaccccactggcttaaaatgggagatatatcaaagtgtggtaggttattaaacacaatgataccctactaaaaaaaacaaacaaacaaaaccaaaccctccaatggggccctggaggatgacttttcaacactccaaatgcaaccctcgaggaaaggccggcaaaacaggacaagaaagtatttttggaagctgatcaccagctcctaagaaccaaggctgtttctcctgattcctaaacaaaagaggagagagaaacagtcgtgtccagatttgcctactgcgttcaccaacaatcaagacagcacgagacagaagtgcctgccttcctggaacaaagaggcaaatcgcattacggagaagctgaagcccaaaagactggggcttaaaccacagcaagtggactccagacacccagtcaggctccgcaggccacgttacagaagaaaacttgccggggttaaatctaaggggcatccccagagaggagctccacgtgttgcagggaagggagggcaggaccacagctaccagggtcctgggcgtcctcagctgcaccccaagtctgccccgagccgagggtcaggtagggcacatcaagggtggacatcccccttcttccctggttcccccaaacttcccccgcagtatctaagtagaaagaacaaaaaaaacaaagctaggtaaccacagaagagtaatgtggcttgtacgacaactttggggagacaatgaaagtccctttctacaatctaagcccctccccagctcaccccgttggtcacggagtatttttcgtgaaaaggggggaccctaaccacaaaaaagatgggaaaacagaagcagagagacacccctcttcccgccccccatctctagcgtccccttccctggaaggttgtttttacagacgggaaccccaaaacaggaaggcctcctcacggcggctctgacccgacccgaccctccaaaaccccagggctgggcacgcggccccccacgctctgctccgcaggaactgagtcacccaagtttcccccatgccttgcacccccgaaaggggctgggccgcgggcgacgtgagggtcccgggcccccgaggccggcagcagagcggggagcggggtgccccgggcggctgcgggcccggtgctttccctccccgccggcctccctccgtcccgccggcctcacgcggcccccggcacgtacccagagcgggtcggagccatcggcgctgcagaagccccggagcgccatgccggtggcgcgggcggcggcgggcaccgggcggcgggtgatcgggcccggttgctggcgcgggcggcggcgggcaccgggcggcgggtgatcgggcccggctgctggcgctagcgctggcggcggcggcggcggcggcgcagggagccggggccggggccgcaacgccgcctggttggcccgcgcgtcacggggatgcggcggccccgccccaccccgccccgccccggcgcccgctcacctcgcgcgtctcggcgtgggcagccggaccagccacctctcggcgccccgggcctggaccccgcgccacccccaccccagatcctccaaggcttaggcccacccgctcgcggacgggcctggggagcgttggctcgccttccggaagcgcctgggatctttggggccacacaccctgcgaccacttttcaaatgctgtttaaggacagtatccgtcaccaggggaaaataacgtgaacggagccccctacctgcctggagtgtaccgggcgccttaactgtgccctcatttcatcctgtaaagtctccacgttcatgaaggaagaaacccaggtgcagagaggttgagtgattccctctgcccagggtcacctggctaatcacttgcagggctgggatttgaacccggtccgctgactccaaagctgagtcacacagaaggaggtgaatactgttattcacctaccttttacagatggggaaactgaggttcagaaaggcgaagtgacttgcccgaggtcacacagttaataaggagtgaaagtggaagtgagattcaaacccgtgagcagcctgattccggagcactgatgacccagacggcgccagtctccatcactaacagctgttgacctcacctgtgtgcagagcgcctttgcttcttctcaacctctttaagcatcacttagaaataaccaggttattgatcctcacctcagaggtaaggaaactgaagcctggagacatgataatcgtaggccaggcatggtggctcgtgcttgtaatcaagcactttgggaagccgaggcgggccgatcacataaggtcaggagttcaagaccagcctagccaacatagcaaaaccctgtctctactaaaaacacaaaaattagccgggcatggtggcgggcacctgtagtcccagctacttgagaagctgaaacaggagaatcacttgaacctgggaggcggaggttgaaatgagcttagatcacaccactgcactccagcctgggcaacagagcaagactctgtctcaaaaaataataataaaaaaaattaatatgcattcacagtgacaaggcttcctaaggctgtgttcttagcaatttacacaaattaacttgtgcaatcctcacaaccccatgaggtaagaagtagtattatccccattttgcagatgaggccactaaggcccagaaagacagagtacattgtcagggattatttagatggtaagtgattaagccaaactttgaacccaagaagtctggccagggaggtgggaagtctataataccatccattgcgccatattagttttgaactgtttcataggcagacaggtagagacagaggagctagggcgaggccgcagagtgtaaatttcactgtgataccagcgatgcctttcttttctcctctcctccttaatctcctgcctgatgtgggtttccataacacatgcacacaacagctgcaccaaataaaacagaaacagtgtgtgcatttgagacctccccccaatcaaaggacctagcgagggaaggaggaaggaggaaggtagataggattgttttctgtgatttttttattggcccgggtcccccaagggtgaatgagtttctaagggataattactttcatgtaataatgccagttatgctgttgcttgacctttatactgtcaacaaatatttattgagcatttactatatgccagatgtcttgctaggaacaagataaaattgctactcttatatagcttaaaggattggaatttttttggattgggatttttttaagtgtttcttatggtaagatggcagatgttaatcaaatattatatttttgaaagggtatttacaggccagaagtagtgactcacgcatgtaatctcagtgctttgggaggccgaggtgggaggctcatttg

SEQ ID NO: 1242561 - DNA, 4001 bp, Homo sapiens
gcaacagagcaagaccccatctcaaaaaacaaaacaaaacaaacattcaaatattggattgtacttcaagcaaatagactgcaagctaacccattactttgtgagaagttactctagatttctttgtcccactccttcccatcccacttccttttaccaaatcacaaccagatctggtagagtcagttgctggaattttcctacagaccatataagataggcttcccagccagggcaccaggccataggcttacttgccatgtagtggtagaatgtggacacttcagggatgatagaaaagagaaaagagagagaaggaggtgtattagataagagagagtgacacacactctttacagctctgggaggaagactggctgccatgaaccagcctagaatatagctgcattaaattaaaactggcatgattccctagaatgaggccctgtggatggggccacggtatattgctgtatgatttattcacacacaaagatccccagtaaagggaatagagcaaggggtggaggcagcaaatttcagagtgcaagtctcatatccttgcaaagggctgcctcagtgctgtgctcataaacgtttatatctgtaacaaacctgtggttgcaattggtgattaagtatagttccaatgctacttgacattttgctctatgttaacaagtaagaggaaagtgcaataccagagatatatgttggttgaatcttcactcatttgccaatgacctgagtaactttgctgaatagttttcaaatgctgaaagaatattcccttattttattttactactcacaatgtaatggctacaggcaccacacacttgtacatttaatctgcattattaacatttcctacatttctttcttaagactagacaatcaacaaaatgataaatccagccctgatatgtagcctttgcctatttctgtggtgtaaacacacccatcatggccgatttcgtgatgtgataccaacataactccactgaatgcagagctgggaagagatgcgcagcacggcatcatcatatactgtttctaccatagagatataatagatgtaagtaacctcagaagtataaataacagcaaaaggtagcaaaataagtaggaaatgatacattttgagtattatctttgtttttgatgtaatttatttaattgtaagtttatataattttttttttattaatgtttgtgtttagcagctatgctctcaaagttcatgaaaatttgaccgatgattgtcatgaggcagtatgaacaggtactagccgaccactgtggcatccatcttgcgagagtgctgccttttcctaaatcctcgtcttgccgggcacatcattttccaattcacttctaagtgctctatgggctgtggctggctgtgcctggtggttagctttcttggcttccctgtggtatagatgggaacaagaagttgctaaaagtctgggtgaagggcttcccagaagtgtcatagtggacaacccaggttgcaaacagctgagagtcatggagagatcttggagggggttatgctgccaacagaagtgggacaggggaggcctagcaactcagagaacatccccaggtgagtgagccaaaaaaggattactgtgcaagccaagatccagctggcttgcaaagacagcaggacaggcagtgagcaagtagacaaaagacctcccctgggaaagcctaggagcagaggtcactgtgcccaggttcctgattctttctctgccaggtgacaactcctagacagagcctttagtgagaattatttgataaaatgacttaaattattggctcaaacaaggtcttaaaatggtaagccaaaacatttatttttccctcattaaccagcaagtgggggatcatgaggaagaccagatttataaagaccaagtaaagaaattagattttctctcacctttcagctatagtatgatttgccaacctggtttattcaaatacacctgcaaagagaggtaacgaaggtttcacaactagagatgcaaagagatgcaaagagatgcaatgagggttactcatcacattctgaaattaccatttctttccttgttggcttatttgttttctgcatacctcattagaatgtaagctctttgaaaccagggaccttgtctgtcctgttcacaaatgtgtctttggatctagaagagtgcccagcacatagtgtgactctttcctattcaagattcatccaggaaactaacgacatggaaaatgaaacccaacgaaaattaagaaaatgcaaacattgtaatagttatgtttgcagaacatcagtcgctcatcccaagcaaacgagctcgagctcagccacacattagcttgggcctccttccagttccatggggcccatctccacttcctggactgaccaggggaattccctccagaaccttccttggcagtcccggaagcattccctggactcccaattctctttccggaagaaaatggagctggagtttattcactctaattggtgtaagaccatcattgtagtcaggatggaaaccaggacatgactgggaataaaatagagaggaaacagcagatgcttccagccctgtgttttcccaatccccagaggcaaaggtcaggatgacaaatttggtttggacgtgggttgtttgcgtatggtgaaacagactgtgaacaggaggggagccactggagcggggtaacctgtatcatgggctttctggaggagctgatttatttccatgttcttatgcagcagggtctagtgtccaagatcagaaggtacatcagtggttaaggaagtgtccagggcaaggagccagaagcacctgccagctgggccctaaagaagtttaagtgattagatcttactcctcctgtacctcgccctgtgctatttaactttctctgctcttaggtttatttccttctgttagtttcagtagcttcaggagggcatcttgttgcctgaagaatccccacatctcagtacctggccttctcctcaatttcagaagctaggatgatcctctcaccttgatctttgcattagtcctaatatctgacaagaatattctcctcccacctccttgcagagctggttcattcttgacattcaggactctactcaaatgccacctcctcagagtaaccttcccagatcccctctctccataccaccttctgcatattttcctaatctacttcctttactcatcacattctgaaattgccatttctttccttgttggcttatttgttttctgcatacctcattgaatgtaagctctttgaaaccagggaccttgtctgtcatgttcacagatgtgtccttgggtctagaagagtgcccagcacatagtatatgcataacaaatattcaatggatcaatgaatgaagtacatgcagagtctgtcaaaaaaggagctaggaaagccacacagtcacgaaagacttcacatttaaattcttggtgttctccaaagtaggctgacacatcccatcacagagatacagtgacaggattgaaagagggttttcatcaagcaggcaggttaaacttgggcctattcccacaccacaccacatcttctatagagcagcattaatttgtgttttaaaaactaaatccagccattattatgtgaacagaacatttatatagtattgtttattgtggttgttggggcacatgtatgtattaggccattgatgcctagtgttccattatgggaatgctaagcatgtgaaagttatttatatcctactgctcaaggtcatcaccgaggtctgattgcaaaaatccaaaaaaattgcaacctccggcataagtgggttaaaattattaaacattagtgttttaaaaatataccataaagtttgtaagctggttttagaagttctttgttaaaactctggaagcctgaatgaatgcagcccctcccctcttacccttggagagacc

SEQ ID NO: 1242562 - DNA, 4001 bp, Homo sapiens
atggctatgacgatgtgcctccctggtgtgcctcaggctgctctgaagggatttggctgtgtagggatgtagttatgcaaccttcgtgagaggtctagttgggagggttggggatcattgccctggtggatacagctctctcccaccacccccatcaggactcacctcggcttgggacggaagggaatcatggttctcaaggcagcatcatacttcccccacggtgggacagctgccctccctggagcctcaggatttctctcttgctgactccaggggccatcttggagagtataggttttcttggaaaagaaaaacaaaagagcatcagtttcaaatctcgtaaattctgtcctgagggaatgttggaccagctgcccatggagaaatggatttttccatatcctgcttcctaaagaaaggcttccataccgagaataagcaggggaccgagagtcagggcaactggatcccagcactcgctctgacccacatttgctgagtgagtctggcccagtcactctacctctttggatttttatctgacagtaaacaatttagacaggaataaagggtgccatagttagttacctgcagaatgagggaccaagtcactctttgagggtaaatctactaaaaagaaaccaacaagtaaaaaagcaaatcctaaaatattatatgtttcccttttgacaactaaaataaaaggacaggtaatttttaggacttcatatagaataaataatatattctatataaaataatactttttaaaagcacagcaaggattgacagaaagagattcagaatagtggttacatcaggtaggaagggttggggaatgacatgggggaagaccaattgctgcgtgtgattgccaaggtccaagctgatgtattggtgatgggtttgcagatgcttattattattattattaatatgagtaaatgcatagataaataggtaataggtgatagagagatagatacaatctaatctctatataatattatgcatagagatatgcataaaccatgaaggtatgccatgatgatggattataattgatctcattgtggaagcctgaggtctatttgaaaaaaatcaagagtagctgggtggggtggctcatgcttgtaatcccagtgctttgggaggccaagacaggaggatggaggccaggagttcatgacaagcctgggcaacatagggagacccccatttctgtgaaaaatttaaaaattagctgggcgtagtggtatgtgcctatagtcccagctagctactcaggaggctgaggtgggaggatcatttgaacccaggaggtgtcagtgagctatgattgtgccactgtactctagcctgggtgacaaagcaagaccctgagtcaaaaaaaaaaaaaaaagagagagagagagagcaaaaagagaaaagaaaaaaaattcaagggtaaataagtatgggaagaaattgtttgacgtaatttatgaccgtggagaatattctgccaactcagtttcctggtgtgctgatgctaagagatctacttacataaataagtcctgaaaccatgtcatcgcctatgtcgatgccacgattcacgaggccaccagaagagttgggcacccagtatgtcctcttcctagtcattttcagttcctgccaattcttcgtttcccagaatcagagaatatgaaaagacagcaggagttagaagaagcttagatctcgccttgagcagccagaagagggggcactaccctgcagggagcatattggggccatgcagaggtttgggtgcctgctctttcctctccttagcctgtgcttgatccctctttttaaacatcttctcaggcctcaggcccaaatcacttagtgaaaccttctctaaccaccctccccaacccacccccaacaccgcacccttgatcctgggcaatctcctttgatgtatcaaacccctgctcataaaatcagtcttcttgctttatcccagtctttaactgtgtatttgtttgaatcattatttgttcagacttcatttatgcactacacagagagcctcatgagcacagggacatgtctgctttcctcgctgttgaatttcctgggcctggaacgtgctgggaggagagcaggtgctcaataaatgaagaatgaatggacacatatgtgaatgaaagaaacatcattttccctgctttcactcttggttttcacagaccccagaaggaatctggggacaagttaggagacttaaataatcagggttctttttttaaaaaaaaaatatgactttcatatttgtttttctgagtatgtgactcactccctgcttgactcagaatattcatgtgcctgggacaggagagaaggtagtaattaggaatattctgaagagatggaaagagaaagtgtgcagcagagccagggccatgagggtgcagcctgtgccccccagggccccacactcagaagggccccaggctcagttgaatgcttttctgttgccatcctgaaattcttaataaatttgaacaagaagacccacattttcattttcattttcattttgcactgttacccacaaattatgtagttggtcctggtgttcagatatagcttttaccattcaaatactgaggctgggtatgatggcatgcacctgtaattctagcactttgggaggctgaggcgggaggactgcttgagctcaggagtttgagaccagcctgggcaacatggcgaaaccctgtctctaccaaaaatataaaaaattagctagacgtagtggtgcacgcttgtggtctcagctacttaagaggctgaggcagaagtataacttgatcctggaaggtggaagttgcaatgaactgagattgtgccactgtactccagcctgggcaacagagcaagaccccatctcaaaaaacaaaacaaaacaaacattcaaatattggattgtacttcaagcaaatagactgcaagctaacccattactttgtgagaagttactctagatttctttgtcccactccttcccatcccacttccttttaccaaatcacaaccagatctggtagagtcagttgctggaattttcctacagaccatataagataggcttcccagccagggcaccaggccataggcttacttgccatgtagtggtagaatgtggacacttcagggatgatagaaaagagaaaagagagagaaggaggtgtattagataagagagagtgacacacactctttacagctctgggaggaagactggctgccatgaaccagcctagaatatagctgcattaaattaaaactggcatgattccctagaatgaggccctgtggatggggccacggtatattgctgtatgatttattcacacacaaagatccccagtaaagggaatagagcaaggggtggaggcagcaaatttcagagtgcaagtctcatatccttgcaaagggctgcctcagtgctgtgctcataaacgtttatatctgtaacaaacctgtggttgcaattggtgattaagtatagttccaatgctacttgacattttgctctatgttaacaagtaagaggaaagtgcaataccagagatatatgttggttgaatcttcactcatttgccaatgacctgagtaactttgctgaatagttttcaaatgctgaaagaatattcccttattttattttactactcacaatgtaatggctacaggcaccacacacttgtacatttaatctgcattattaacatttcctacatttctttcttaagactagacaatcaacaaaatgataaatccagccctgatatgtagcctttgcctatttctgtggtgtaaacacacccatcatggccgatttcgtgatgtgataccaacataactccactgaatgcagagctgggaagagatgcgcagcacggcatcatcatatactgtttctaccatagagatataatagatgtaagtaacctcagaag

SEQ ID NO: 1242563 - DNA, 4001 bp, Homo sapiens
attcaagctaaaatcatgtgaataaggtactacgagctcagcacatagtaaaaattccctaaaaggtgactttcatgatacagtcatgcattacttcatatattcctcacaacaactcagtaagatgggtggcagggtcatattatatgcctatttcatagacaaaaacatcaaggcacagagagtttagagtatttgcccaaggtcttactgctggaaagtggtgagatgggaattcaaacccactgcttgttgactccagtgtcctgtcattcccttcagcacctccccacattgcctctccacaaagcgattataaactggttgaaaaagtggacagttagagatctcctggggctaggaataatagcccacgtcctcaccttccaacctccacctctcaccttggagggcttaaatgtgtgtgtccttggcccagacagagatgctgggagaagataacgcagtgtccgcttattatagagttgccacttggccttctgctgctcagagaacaaaccacagggcctcgttccatgtagaaaaggcagcatttcataatgttatggttagcataatgctaataatatatataataatacaatatgctgcaaggttgagcatgtgagctcagaaatcagactacctgagtttctatcctggatttcaaaaatgaccccgttttctctccccatctgttcccaattccttggaatgtgacctggcagctcattccatcaaaaagtcgagtctgtttcctcacactttgaatataagctggcttgtgatctgctttggccaatagaatacagtgaaaaaagtggtgtgccagttgcaaacctgaatctcaagaagccctgcatgctgtcactcattcccttggaagcctgccacattactgtgtgaccgagcctgggctagcctgctggaggttgagcacacgcggggtccagttgccccattgccccagccaacagccggcccacctccagcagcacagccaccttgctgtacaggagtaagcctggtcaagaccaaatgaaccacccagctgagctcagcccaagttgctttattttatgggtcacccatcaaactgtaagctaaatgagtggcaattgttttaagctgctaagtgttgagacagtctgttacaaagcaaaagctacctggtaaaccttaggcaagtcacttaacctctctgtgcctgtttcctcacctatcagataaagatagtaacagtacctccagggagtttgtgaggagtgaatgagaagatatttgtaaagcacttggacaggtctggatcatggaaagctctccttaaacctgagctactgcctccttttcaccaaaggacaggaggaggcaaggaagtgagtgactgataaatgaatgaacgtgtgcatgggtggacggacaaaaggacgagcagatagagcagcagatgggttgcaggagcagtgcccactctcctgatggacattcctggaggtcctgccctggccctcccttctgtccttcttctgacttaccttgcacagggtcgcactgggatcatggtcttcaggctggggtcatatctttctgcaaaggatctccgccggcctcgctggtccagatctgagataaggtagggtccttcacccaccatcctgatggcagcctggagccctgggcttttggcctggggacactttcactctatggcagagaaatggcaaaggttattgagaggtgaggatgtctgattgggatcaggcagcctctactttacccagatcagttcctttgctttgacccctgagaactgttttcaccaatgagctttccacatttgtaggggagtgtggccagaagacctgctacgtcccttaatgctacgctgaggctttcttattagtaggaccatttaattcctcttttctcatgttgggttggccaagagcagaaaaccctatggtgtggttttggttgggagccggtccaatgaccaaggctgagtcccagcccagggaaagagccccaagaaaatgggttttcttagtattactcagagttaagtttggctgacacacacacacatgcacatgcacacatgcacacacatgcacacacacatccacacagatgcacacatgcacacacatccacaaacatgcacacacaccgccatgcgcatacacccacacacacccacgcacacacatgcacacaccccttcttctttcagattctctcagatccccaggagtttttgcatccacatcccctccatcctgatacccactggtcagagaacttcaacaacaccacccctcaggaccagccacatctggacaggcccacattccccacacttctgtgactgctgccccaaatgaaaaccaacaacccaggtggagaggacactttttgcaatgtctgttcagtccccaagccagccaccccatcctccagccacctaaatccaatccatagagcatgatccctgaaggtttcccatgcctagtcttagtcctttcctgaggcctccctctattcctgccctagggtcccatgacagccacttccccataccctatagataaattctccttttttacctaaggtatgttgagttggtctctgccacttgcaaacaaaggccttattattatatataaacggggtcacattcccatgagttctttctggaagttttcatagctagaagcagtagataaaccaactcccatcaagttgttagtggctgataaaaccatggcatggcagagctggaagtgtcctcagatgcaatcttttacacatttctcattatacagaagaggaaacaaaggcccagagagaggaaggacttactcaagagtatatagagaatgagtagcatctatctcatctggggcactctggatacaggaaactgatgttccctccctcctccaataaccctacaataacccttgcttatattatataacaagaggcactcctctggaataatatacgtactttttacaacagaatttgaaaatcataatgtcttcatctcaaaaagataaatcccccaacgtggaaactgaagactcgtagtcagatggagaagcccacatgttttagagctagtagttgatgaaaagctctttaatcattgttaatgaatttaaagtttttgttgttattgtggttgttgtggagacggagtctcactctgtcgcccaggtgggaatgcagtggtgcgatcttggctaactgcaacctctgcctcccgggttcaagcaattatccagcctcagcctactgagtagccgggactagaggtgcacgccactgcgtctggctaatttttgtatttttagtagagacagggttttgccatattggccaggttgatatcgaactcctgacctcaggtaatccacctgtctcagcctcccaaagtgctgggattacaggcgtgagtcaccaaaaaaaaaaaaaaaattgagacaggatctcactctgtcgccaggctggagtgcagtggcaccatctcagctcatcataacctctgcctcctgggctcaagtgatcctccctcctcagcttcccaagtagcagggactacaggcgtgcaccaccatgtccagctaatttttgtatttctagtagagacgaggtcttgccatgttgcccaggctggtctcaaactcctgggctcaagcaatctgcctgcttcagcctcccaaaagtgctgggattacaggcatgagctactgtgcccagtgcagttaatgaatattaatgacataaatatcatagacccagctgtagattcctaattcaatgagagtattagcagctaccagagactccctaaacctctggccaaactgcatactctactctccaccttctatttgtaccattgaatactgcactccagccatgtggaatatcttactactccctggacaaactgtttattcctcctgctttttagtttttgtatttactactgg

SEQ ID NO: 1242564 - DNA, 4001 bp, Homo sapiens
gaaccgtgttccactgagttgacctctgtagcctttctaatattgctctgtttgattaacagattcccttctacaccccgataggaggagtctactttaagacttcaccaggttccagcctgtcccctgcctcccccgaacattgcctggttccaggctcccagggatggcagctaccatcttggctttgaagagtggggacatccggaggtagccccggccatggtggtggatgaagaggaggtagatgggaccaaggacccagaggtacatggggggtacccagacccctgctgttctcaggaagcacaggctcagcaggctggtggcggcaggttcaggctctgtctggttccagacctgagggaacacaaagaggacccttaggatggtacaaggcaggggtccccagctcacctgcccagggggccaggcaactttttggatctttaacatttacacaaaaatgtaccaagtactctttggaatacctactaattctcaattcctttcatcctgacattaaccctaggtagttgcaattatattgatttgcagatgaagaagctgaggaccagagaggttgagtaactttgctgactttacccagctgaggagtggaagggctgggatttgaacccagggaactgggccatgtggtctaggagacctgggctccataatcattgctaggcatggactgtcagttaatccttataacaactccaggacgcagacagtactgtctccatttcagaaaccagcagactgaggcaccagtcggggaactgcctcccccagggacacacaaatgggaagtggcaaagctgactctgacccaggcttatctgaccccaaacctcgttcgactggtggtcttgatgtatgatttgtttttattttttattattaattaatttatgttttagagacagggtctcactctgttgcccaggctgaagtggcacaatcaaagctcaacaaagcttcgaatttcctgggctcaagcaatcctcccacctcggcctcccagagtgctgggattacaggcataagcagcctcaccaggcctggctaattttttttttttatgttttgtagagatgggggtctctctatgctggtctcgaactcctggtctcaagcaatcctcctgcctcagcctcctaggtactgggattacaggcaagagccaccggcccagcttgatctgttattttcatctcagcaggtctgctggtcctatctaaccctagaagaaatttgaagtttagtggacgtggcctcttcaattctctctccgctgtctttttactcctcctggtttcacaactcaccggctgtgcaaactttaacctctctgtatctcagtttccttccctgtaaaagggggaaaacgagactctacctctatgagttgtattaaatggattaatagcagcaaagttcatagcagcatggcacaaggttgggcacaaggctaggcacagagaaagccctcagttcattgccagtttattgcttcaactccctggccctcgaaatgctggcagtttgcaacccccacccccactccatgaactccactccctggagtcctttgctaagagcaatggaaaaagaaaccagagaggtaagggctctccgggggtaggagggcttgggggacccactagctttatgcaaagaagagtcaaagcccctagtagctgggaggtctggtggccccttaaatagagctgggctctcggctgctggcttggtgaaagaaatccaacccgctgcagtgagggggccggagtaagtctcctcgcttcccgggtccaggaatttgggggtctctcctctccccagtatcgcagcccgagagatctgcagccaaaccaagcctggaaaaggagagtggggcgcgatggggggcactcaccccctgccccgcgcagggctcagcaggcgcggccatcggcgccttctgtcgtcgtgggtcccagcgtctgtctgtcgctaagtctctgggcagactgctcggccgcgatcctgccggagaagaggcggggctgggctggtcgggctgggctggtccggctgggattcgagctccgggatcgggaggccccgggcaaggtccagctgcgcggcgggagtgaggccacgggaggtgaaaacaggcgaggtgggggatgggggaagagaggcgctcggggagctgggacgggcaccgggttggggggtcccggaacccctgaaagttcagtgacacctccatagttccctcttccccctgcaacaagaatcactccagacttcctaaacactttggacccagcaatttccaggagttcatcctgatgagagaactgaaaggtgtgcacacgttagtaacaaggaggcctggtgaccgcctaagcgtccaatcgcggggaccaccgggtcgaggccgagaggatggagaccgcgtcacaggcacctcgctgctggaatggagggtggtggggagaacttagaagattatgcaatgggctggcagggctatacccagccgccctggtaagcagaaactcaagaaacctctagggtcctgttttctggtcgtatgatcccaggagtgcacatgggcccctcgggtgtctgaacagaagggcataggagggagggccgcagccctgcagtcttactctgctggtgtagcggtcacctgccaactcccaccccaccctgcaccgcgggctcctgagtcggcagattaagcattttataaattctattttaaatacgtgttttaaacttgtcagatatttgtcttcatttcagtccctgcgcctctacctcttgctgtggtcgcttatttaacactggggggctacgttctgctaagtcccagggagagactgttcctaatatccgagggagatattattcctaatatcacgctgggtgaacaccacgtgtgtacagcctctgatacgattggtaatatccaagggagatattatcctaacatcccagtgggtgaacaccatgtgtgtaaacgctgtggtattattagaaatatccaagggagatattactcctaatatcacagtgggtgtacatcctgtgatattattcgtaatatctgaaggagattttactcctaatatcacagtgggagtacacactgtgatattatttgtaatatccgagggagattttactcctaatatcacagtaggtgtacaacctgtgatattattcataatatgctagagatatattactccaaatctcatggtgggtgtacactctgtcatagaattcgtgatatcctagggagttattaccgctaatatcacagtgagagtacaccctgtgatattattcatactatcctagaaagatattacttttaatatcacagagggtgtacaccctgtgatattattcataatattctatgaagatataactcctgatataaccgtaggtgtataccctgtgatattatttgttatatcctagggagatactacacctaataccacagtgggtgtacaccctgtgatatgatttgtaatatcctagggagatataactcctaatatcacagagggagtacaccctgtaatattattcataatatcctagaaagataatactttcaatatcacagtgggtgtacactctgtgataatattcgtaatttcctagggagatactactcctaatatcaccttgagtgtacactgcgtgatattattcgtaatatcgtagggagctattgcttttaatttcacagtgggtgtataccctatgatattattcataatatcttaagaaggtagtactcctaaaatcacagtgcctgtacacactgtgatattattcataatattctagggagatgttactcctaatctcatagtgggtgtacaccttgtgatactatttgtaatgttctagaaagatattccttttaatatcacagtgggtgtacaccctgtgatatgattcgaaatattcta

SEQ ID NO: 1242565 - DNA, 4001 bp, Homo sapiens
cctgtgggacatgaactctgtaggacaggcccgtttactctcatgtcctgtgggatatgacccttgcccaactcctcaccctgacatctcccaagcaaatccccagactgaccgtggccttgcatcgtgaggcagcccagtgggtgacagggggtgctgtgcaagggccctccagtgtcaggcagctttcagccaggcacacgagtgccccctgatgctcctggtcctcccgcatttcatccagaagctgggacagtgataggcctggggacaggggaccatgggatgagtcaaggcttaaaggggaggaccaggagggtgagggggaagacagcttattgaggaagcataaggttaaggctggagagatcactgcacagcgtgttaggatcactggtcaagctctacagtacctgcattggacgaggtggactctgaaaggtgctccctacaggaagagagtggccaggactcaggaaccatgctgaggcctgtctacctagatacaccatcccctcaccaaacaacacgtggcccccgagcccaaccccagactcactcaaggcagtcatagagctttttctgaacatctaagtcttggttgctaagaaaaagagaagggtagttaatgggggcccaagccctcctaccccataggcgtctgccagcgccggccaggctggggtggggagagctgctggagggcggaggcatcacttaccaaccaggcacccgtagccggggctgctccgtgggcagcaggctgaagcggtccacctggagatagaactctgcgggctggaggagttcggggggaagggggggtctcagaatcgtcacgaagagtcatgcccggtaacccgcccaaggcagtctcaccactcaccgcgccgccctcagcgacctggacatgaaccccgcagtcctgcagcagcagcagccggccctctgtcccgcggaagccgaactccttctcctccctgcaacaagcaggatcctcactgccgggcccacctgaacacaaggcccgcccacctcgcgctctcctgccggactccgacctccagagccgcgcggggcctctcaccagtccgaggtgtccagggcctcccgcgtcaccaggcatcggacactgtgggtcccgtcagacacaagcagcgtggccccgacgtcggacgtatcaggggcgtgggatgggcccgcgaccgcggcctcggcgtcctgtagtacctgacggcggcgagcggcgtcaatcccaccaccccgggcctccgcctcggtctccgggccctgaatgggggctcacctcaagcagctgcccggctcgtggactggagggtgtctctgaccccagaatcagctcccgaatccagggccgtaggaccagcctccccgaacctgccatccccacggctacacccagcggatgcaacgggcccgggtttcccgcgggcgcccaggccccgcctttcctcggaagaggaagctccttcgctgggcggggccggaggaggaggccccgcccacgtacaccccgcgcctgcgcacgagggcgtcctgctcgggggcctgtgtgcagactcccgctggtccaccccgctggtgcacgggatgctggcccgtttactctcatcgcggcgtcactctgacagcggccaggcatttgggccgttcgtcaagattcctgtggtaccggtagggaacagaacaagggctggtcccgtccctggagagggttccagggccggaggctgaggccgagtgccgtccgagcgagttgactcgaaaccatttcagcaccgtgtgacccccgaacggttcagcacatatttattatgactcagtttcctcatctacacagtgcacggtcttgtaaggccagtggaaataagagcacacacacagcgctaaataaatggtacttccttcgccctcccctcggattggcggagccctgctccccagactccgggggcgcgcggacctcagcgtgatgacgcaagagcggaggacggctcctctccatccacggctccgtttcctaggaaacgtggactccgcgttccactctgcgtcgctgcccccttgacgtcacgctccggatgggaaggcggggcgtgtgctaccgccaggggcggggcggcgcgggcgggccggccgggctgtgcacctgcgcctcggcgggccgcctggggcaccgtccccggcccgcccggccccgccatggcccggccgcagaggactccggcgcgcagtcccgatagcatcgtcgaggtgaagagcaaagtaagggctcctccggcctcggccctaggcgctcccaattccctctttctccccttcccagctccttggtccccgccacctcttccctctatcctccaagtcccattctgcttttctgctcgccttcccccatccgtcttccttcctccactgctggtctccagctctctgtggcctgagtacctggagggcggtaagaagaccttggacagcgtccctggtactggagctgaggtctgggcttaaggctgccgcaaaagcggcagccgcatctttcccattcctgccagcctgcggtgagaaaggggcgcaggctgtcctgactcctcctctcccccaaccccgacttccagtttgacgccgagttccgacgcttcgcgctgcctcgcgcttcggtgagcggcttccaggagttctcgcggttgctgcgggcggtgcaccagatcccgggcctggacgtgctacttggctatacggatgctcatggcgacctgctgcccctcaccaacgacgacagcctgcaccgggccctggccagcgggcccccgccactgcgcctactggtgcagaagcggggtgaggaggggtacagtgggcagcctctgtggggtaaggtgtctgtggggcaggtctacaagggttagtccatgcccagggtacccaagcgtcaccctctgcagtccctgcccttggcttgacctctaagtggtaggaaatagctacagtgccccctgtaaacagcccaagtcggggagcaggtctctgatctcaacatcccccctcttctgcagcagaagctgactccagcggcctggcttttgcctccaactctctgcagcggcgcaagaaagggctcttgctgcggccagtggcacccctgcgcacccggccacccttgctaatcagcctgccccaagatttccgccaggtttcctcagtcatagacgtggacctactgcctgagacccaccgacgggtgcggctgcacaagcatggttcagaccgccccctgggcttctacatccgagatggcatgagcgtgcgtgtggctccccagggcctggagcgggttccaggaatcttcatctcccgcctggtacgtgggggtctggctgagagtacagggctgctggcggtcagtgatgagatcctcgaggtcaatggcattgaagtagccgggaagaccttggaccaagtgacggacatgatggttgccaacagccataacctcattgtcactgtcaagcccgccaaccagcgcaataacgtggtgcgaggggcatctgggcgtttgacaggtcctccctctgcagggcctgggcctgctgagcctgatagtgacgatgacagcagtgacctggtcattgagaaccgccagcctcccagttccaatgggctgtctcaggggcccccgtgctgggacctgcaccctggctgccgacatcctggtacccgcagctctctgccctccctggatgaccaggagcaggccagttctggctgggggagtcgcattcgaggagatggtagtggcttcagcctctgacagtcaggatgaagccccatgccactccacactgctgggacatggcagggacttcacagtgggggtttttagctggctcacagggctccctcagcctggggaacattaaaggttttctacaaatacagtcatggtccttgtgtgtcccagttccagcctcctccctggt

SEQ ID NO: 1242566 - DNA, 4001 bp, Homo sapiens
aggcttcacgtgagaatgtacgaatggcccggcacaggccaggcagaagacaaacggccgcgccgtgctcagcagggtgctccccatggagcctcgcaacaaaaattactagatgagaatgacactcgcattcaaatgaagggctgctttcaacatgaataaaacgacacctgacctgttcaccaccacacctgacacccccgcccccccagaccttgtgtttgaagtggatgccggcacttcctcctgtcggctgccccgatgagagcgtggggcagaggagggctgtgctcggcctgcggggcaggatgcgtttcagcatcacacctgtggtttggagggttattttcaaaattacatttttaagtaacagacattcacattgcattcatgagcagtacattcaaataaaaaaaaccaaaaaggaaaaatacacttgaaacccatatccattttaggaagaaaaatactattttaaaaatgccatctggaaaggtgacacttacaactatcccaagcccacagtttaatccgccatttctgtctgccttgaggagatggttcagagccaaaggagcaagagcaagggaagcctcatcttatgtcctccaacacctgcggagaggacaccagcctgagccaggcttcacgctacaaagctcgcagggtccccagggtccaccggtagtaacacccgtgctcctgggtccaccatgtgaaccccctcctcaacaaggtctcagccttgggccctaacacgaatgtctgtcctcccaggatgggaaagcaacaactatgccccagacacaattcgtgttcctatctctaaacgtgttccctttctagcaaattcctaatcattcttccaagcccagttcaaatatcacctcttctttttcagttttattatttattgagacagtgtcttgctctgccacctaggctggagtgcaatggtgctgtcatggctcactgcagcctccgattcctgggctcaagaaatcctcgtgcctcagcctaaccagtagctggaagtgcaggtgtacgccaccacacccagctaatttttacatttttttgtagagataggggtctcaccatgttgcccaggctggctttgaactcctggccacaagtgatcctcctgcctctgctgcccaaagcgctgggattacaggcatgagccactgcacctggcctgcctggtggaatttagactcaggacagcaacatcaactcctgactgcaccgggcctcacccctttaaaccttccctctctccagggaatgggctgcctgcagtaccttccaaatacttcacggccggccgcacgtctccattgcttgctcatagatctacatgccctcaggggctaggccggctgtgaacctgtgccccacgcgcccagcaaggtgcacgcagcaaacaactaaaacggggagtacttcaagggtgacttctgaagcccaatgagaaatggaagtgaatttattccaaacacaaccaaagacgattcgttctgaggatgcctgaacacggaccccgccggctcgacggtatcaccgggcccggcgtccgcacagcttctctccccgcaccccgcgcgggggccccgctccccaccggacacgagaggctcggcgtcccgggaaggccgacgcccggccccaggcggctcgcggggaagcgaccgcgccacgggccacggctcaagcccagctgcgacccaggggcgggcgccggagcccgcgcccccgagagctctgcgcccggccgaccccgccgcggtcccgtgggccccgccgcccgcacctacgagacggccgcggccacggggcaggatctgcctcgccacaactcttcctcgtcctccgccgcgcgcgcgccggggtcgggccgggttccggccgggtcccgcggggtcgtgagtcgggccggaccagttccggcgcccaacagcttccccggcgcggcgcgtccgtcgcccaagcgcgtccccccggcgcggcgccgtggcggcgggttccgggcgcgcgtgttcccctgtcccgcccgtcccgtcgtggcggggtcggggccgcgggcgtctcgtgagccgtggccgaggcaaggcgccgtggtctccgctagcccagggctgcccagatcagaacggcgcgcgggaccactcccaacgcggattgctgggcctcgccccgtcctcccaaaaggggctctctgggctttgcggctgggggtctgcacgctgagctcctgggtgattttattattattattattgttgttactttttcttattattattattattttgagatggagtctcgctctgtcgcccagactagagtgcagtggtgtgatctcggctcaccgcaacctccgcctcccgggttcaagtgattctcctgcctcaacctcccaattagctgggactacaggcgcccgccatcatgcctgtctaatttttgtatttcttgggtgattttaaacggaccgcatttgagaatctctcctcgaagggacttgggaaccaggatacgaatatgaagcgagactgttggatggacagtggcggaaaacatttaaagccaaacacaaagtccagttggctgaaatttgagggtttttcccctaaaatgaatactaataacacaaagacatgtactggcaaacagtagtacaaattatctgcagaaccgtcctggtgtgatggctcacgcctgtaatcccagcactttgggaggccgaggtaggcagatcacgaggtcaggagttcaagaccagcctgaccaacatggtgaaaccctgtctctcctaaaaatacaaaaattagccgggagtggtggcaggtgcctgtaatcccagttactcgggaggctgaggcaggagaatctcttgagcctgggaggtggcgactgcagtgagctgagattgcgccactgcactccagcctgggcagcagagtgagactgtctcaaaaaaaaaaaaaaattatctgcagaaccttgcacagtttttttgtaagtgtattattttccatgcccatcttcctctcttgtgatgattgctggggcagcagttgtgtccttggaaagctcaggaaagggcacttcaggagcccgaggatggttttcctgggaggaaggagctggatctgggggaagtttgtaacacagagcgtgggagaacaaacccaaacttctagtgcctctggttgccaccctgctaggtatcatgcagaaaaagcaagtccaaccctctgccactgggacaggcttgatctggtgtcagaattctgtctgcttccaggactcagcaggctgaatggtgtttccgacgagggcagtaggaagagtaaggagggcgtctaacatcaggattcagccccaggacgtgtgtgcgcaaatttctatccctgggaagttgaagagctcaggctgcgtcacccacctagagacaggacttgggacagggtgacagctcccgtggtccttggccatggctctgtgagggtggcagtggggggagggtgcagtctccgagaaatggcccagtcatcctatgagcaggggtcccatctgtgcctcggctctggtcagcatcatagtggcaggtgggaagcaggagcagtcagggattagcagacattggaggacagcctctagccagagagacgtgggctgaaacaaccagcagaacaactgcaggcagccaggctgtgcagagtgaagagacccccaaaaccaccccctgttaataccctcagggagacaagggaagcgacagcccccatgagtccagagcgagatgccccgagaaagagcgttccagtaacataaaggggggctggaggggtcagaatacaacagcctgagtaaaaaccctaagggaagggctaaaggacgtctcctagaaatagaacagaaagaccgagagatgaaaaacaggagaggaaagataaaaaaatcagtgggctcaggcaggcatccaatatgctaaa

SEQ ID NO: 1242567 - DNA, 4001 bp, Homo sapiens
atcatatttaattcccatggtaaccacaaggcaaatatttattgaatatacacaaaaggaaatgagaagaaaatcaaagtgtgtcactacaaaaactcaagtaaacacaaaagatgtcagtaagagaggaaatgagagacagaaaagctataagacatcaagaaaacaattaccaaaatggcaatagtaaatccttgcctgtcagtagttactttaaatgtaagtggactaaactccccagtcaaaagacatagattggcagaatggataaaaaaaaaatccaactacatgctgtctgcaaaaattaagctacttctatgtgattgaatatgataaaatcaatgaaaaacttttagaattgtttttataataaaatgcttatagtttaatattaattttgaaaaacaaaattgcatttatattactcaaatttatatagtaatgttcacccattcacctcctccttttacttccttcctctccaacccatcttgtttcaaaaattctcaaccagatttccagtctgggcaatgaaaaaaatgaatttatactcttaaggcagagatattttggcatcatcagattgggagactaggttaaataatggattgtgaaatcagacagcctggacccaaaccctgctctcccacttattagacatgtgatttcagtatattcattaaatccttggaacctcagtttcttcattaaggaaatagagacaataacagtacacatctaattagatgattaaatgcaaggtgattgccaaggcacataacaatgctctctgtaactgagggttttatttttcttgaggttactatgcaaattcagagaaaagaaaaagaaggtggtggggaggaagatgccataaaggcatgtaggctttggatagtaatacatgaatacatattcatggaacacttaaaaattatattaactctccaattccatctcagggggattctctcttctgtacaaagacagtgctgggtgactttttacactaccatattggcagctgggagttagtggctataaataccatccattgtctacctgactcctaatgtcactactgcttctctcttggtctgtgtcttgtgagaagacaaaccaagcacttggggttttctgcagaaacacataacctctggaagacacagggcttggtttttcttgacataccttaaagccacagtcaagtaggtagttgacaaggaggaatctaattagacttgccatcctcatgggaagatggatggcctaacataggtaaatgtgtcagacactcatgtgcacattcaggtggtctatcccctcctctgcatgcagtctcaagtcaagcccaagtttgatgacatgaataccagttaagacacattgtcccattcactgaagatgagaactcagactaatacgaatttgctgaccttgtgactagaactttgcacctggtcacaattatagtaccctgattgaataaaagatatatttacctattttcttgtttttaaaggagttaattcctcatttcatagatgaaaccactgaggctcaatgaagtaaggaaatggccaggctgggaatagaaccttgaaatataagcttcttccacaacactgataagttgaggcagaagtaactttggttccatacctttcagcctagtaggagcaagataaggaaagtgaggccacccttgttcttatatcgccatcacggcagatctcttaccttctccttttgagcccagtagtccagtacataacttgcaaagttaaattcctccggtacttcatagtcattccatcttggggctccaaattctgataaagaccggcagcgcagctgtgaaggggcagggtggatgttgtggaaggatttgtggatgccccagagggtccggaacctcattagccactgcatggtgaaacagtcctcagaaaccaggcacagagttctcaagtcaccacctgccttgggaagagatggctaatagattggctgtgtatccaaaactttctccctaaattgggtgcatgtttttggttaattgctacagttatagctttgtttcaggtcaccagaatttggaaggcacccctgattgattttggtggggatttatcttcccagctgaggaaccacatggcagaaaacgctggggaggttatatagctactattatgggtttggtgcgcgttcctaggggtcttctccttcaacctgctaagatgtcagcccaggatggaagccatatggtcatcccttttgtggtagagcaactcgccttttggaaagttctgtaccttatagtgtctttactttagaaacttccctttctgccaagccaaatcatgttgttgccatggaagctgtgatatctttatatgatcccatcccatgactaaagttgattggtccagggttgagcagtcatttctcatgactttgtaacctaagctgggccaatcataatacctctccaatgtgtgtgtgtgtgtgtgtgtgtgtgtgtgtgtgtgtgtgtgtgtgtgtgtgtgtttctaaacagatttaaatatatcaggctgtctccctctggtggaatgcacattttgtgtgctgtttgtggttatgattcctatcatgtggagacagcccccctacaggcgagaatgaaactgatgtacagaaacaatgagatgaggtggagtaagaatcctgcagtcattcaagtccctggttcaaattgttcctctgcatgtctgcccctgtcttgttaatattctctggattctgtaagccaaaagattctcctttgcctgagactgggtttctgtcacttgagactataaagatactgaaaaatatacaccatcatcctcagagcagatgctgctgttgacaaaaagagttaaactctgtaaaatatttgaagagatttattctgagccaaatatgagtgaacctggcccgtgacacagccctcaggaaatcctgagactatgtggccaaggtggttggggtacggcttggttttatatactttaggaaggcatgagacattaattaaatacatttaagaactgtgttggcttggttcagaaaggtgggaaaacctaaagtgggggcttccaggctataggtaaatttaaacattttgtggctgacaattgggtgagtttatttgaagacctgggattaatggcaaggaatgttcaggttaaggtaaagctttgtggagaccaagttttattgtgcaccggtatctctcagacaccagacgtcagagagagagcaggttgtaaaatatgtcttagacctaaaagggtatgtggctcttagttgattgtctcctggatctgggaaggaaggaaagaaaacaaagaggaaatggggttctttatagaatgtggatttttcctacaagagactttgcagggcaatttcaaggtatggcaaggaaatatatttttgggtaaaacattttgattttcttcttgttatgccagagtctgattggaaagtaagtcttgatatacagggttaaataaaacccatctgatgagaatttatggtttgtagggcataactccctaagccccttagataggaatttcagcaagataaaaaattagagcttaggccaggcacagtggctcatgcctataatcccagccctttgggaggctgaggcaggtggatcatgaggtcaggagtttgagaccatcctggctaacatgatgaaaccctgtctctactaaaaatttgaaaaattagccaggcatggaagtgcctgcctgtagtcccagctactggtgaggctgaggcaggagaatcacttgaacctgggagtcggaggttgcagtgagccgagatcatgccactgcactgaagcctgggcaacagagcaaaattccgtctcaaaaaaaaaaaaaaaaattcagatcttagtcctcactgctaatgtcactgcactttccaatggactgggatgtggcattgagttcttc

SEQ ID NO: 1242568 - DNA, 4001 bp, Homo sapiens
caatccatttgtgcaatagtagtcctgaggtgaattacattctgagcttatgaagataacaggattaagagattaaagtaaagataggcataagaaactataagagtgttaattggggacgtgataaatgtccatgaaatcttcacaatttatgttcagagattgcagtaaagacaggcataagaaattataaaagtattaattttgggaagtgataaatatccatgaaatcttcacaatttatgttcttctgcctcagctctggccgatccctccattcagggtccctgacttcctgcaaaacaatcaatgccctcactttaacagtagatacttggtgaggctgtgcatggtgaggctgtgcatgcacctttcattgcaggtcagccactaacatgataagagcttatgtctatttttccacaatttcagttctttctctacaggagattagactctcactcagggcaatcttggcagatttgaggctcagtatctgcttctgaagcggtgagatagaatccccgagttcatcattttctttcatcactttatccactgaacttaggagcaaccaaccagcttcattatgttccttggttctccacatatggtcaaaggtatgatgtatagggtcactaaactccttgcctctcatgagcaatgaatcaggagtgtcaaatgcatttattttgtataactctttaaacagttcacaccaagggctatcagtcttctccatactattagaagtagagtccttagtattttggggtctaatcatattaaggcaccaactccagaaaccccaaaaccaacaaaagaactccatccttaatattcttttcctctagaaccacttctggtaccaaaatctgtattagtcagggttctctagagaaacagaactaatggaatatatatattttataaactcatatgtataagtaatacttataaactcatatatataagcatatatatgagtttactaagtattaacatatgtatgtgtgtatatatatatacacaactgtatatatatatacagtttattcagtattaactcacatgatcacaaggtcccacaataggccatctgcaggctgaggtgcaaggagagccagtttgagttccaaaactgaagaacctggagtctgatgttcaagtgcaggaagcatccagtacggaagaaagatctaggctgggaagctaggccagtctctcttttcatatttttctgcctgcttatattctagtcatgctggattaggtggttcctacccagattaagggtgggtctgcctctcccagcccaccgactcaaatgttaatctcttttgacaacaccctcacagacacatccaggatcaacactttgtatccttcaattcaatcaattgacactcagtattaaccatcacagtgtctgacatttctgtctcctttttttctatggaataagaattgaagattactgtaccagctcctgagcagaactacacattgcctttgtacctgctggtccctctctttttccataataagctcttcttcattcttctggtctcacctcctctgagattcatccttctctgaccaccacccaactaccagccccctgttaccacctttttccagctgccctcgtctctccctgttgctgccataaaggtgccttttcctctgcccagtgtttcctcctaagacttggcaggtactgtctttcatggtccctaggaatttctgcttttctgtgaggatttttgctcttctcaccagctgtgactctaaaagattggtgaggttatcatggattatgaccccatcagcccattccttgaaacagtgctcacctgccaagtcctctcaggatgtctttctagagagagcttcgtccaccctcctctccagccagcagctccagaactcctacagccttggaagagagcacagtaactcaagcagacagcttcagaatccctgcactgtcagaaagagagctcagctaatcattgacagtggataactttggagtcttacaaagggtaacagcagtcctcctagccaagtttatggacattacaacattagagcatttgaggtcaactggacttgcactttcaatccaaggggcatgaagcaggtttatgcccaggactgacagaaaattattgcttcaacccaagagagagaaatggagctcacataggcttgatgaacactcctttaattctttgttttgcttggttccagcataccacttttgcctggttttcctcttgctttccttctcttttgctgattcctcctcatctttatccacgttcactctgtacattatctcatcaaatgtcatagcttggataccatgtggcttgccaatggcccccacacgtgtgtatccaacctggttttctctcctgcatcctcatcttcctgacttctccacctggatatctaacaggcatctcaaacatactttgtccaaagctaagaggttgatcacatccttccctggccactctcattccaggtatggttttatccatctcagcaaatgtcacccctattcctctagttcttccaacatcaaatcttagagattgccctgactcttttctttctcacatggatgtgaaaaagccatcagatccacctgcaggctacactcagagtctgacccattctcttccctgttccaacccaacccaacactgtccaagtaagcccaaaactcaacagggaaaaaaactctttatatctcttcatatttattttattttgaaatagcgtctcactttattgcccaggctggagtgcagtagtctgatcacagcttattgcaacctcaatctatcgtgctcaagcaaccatcccacctcagcctcctgagcagctgggattacaggcacatgccattatgcccagctaattttttaacgttttatagagacgtggtctcactatgttctccaggctggtcttgaactcctgaacttaagtgatcctcccatcatggcctcccaaagattacaggcatgagccaccatgcatggccaacattgtcttatagctggtatcagcccatgcttcagctctctcaggctagagttgcaaattggtgatcctacagttctgtgtcttgggggtggccccactcccatggcttcatgaggcatttccctagagggaattctttgtagaggatcttaccaccaagcatctatggcccctacattctgggtgcctgcagaattaataccattctgtctttgttagtcttctgggcctgtgatgggaggagcagccccaaagatttctgaaatgcctttggaaccttcttcctattatcctattagcaccaggcccccttttggtcatgctttagcagagttgttctgacactttcttggactcctctcctgaaaattctcttttcttctctaccactatgtgcaggctgataattatccaaattttaatgctcttcttcccctttaattataaacacaggctttaggtcattcctttgctgtcacaatttaacataagctgttaaaagtaaccacatcacttcttgagcactttgctgcttagatatctcttgcatctgacaccgtaggtcatcactcttagttcagccttccacaaagccttagggcatggacacagtgcacccaagttctttgctacagagtaacatgggtgaattttgctccagcttccaatgagtttctcatttctatctgagattttttggcatggcctgtactgtctatatttctatcagcattgtaaaaaatttaaatttaggaccttccaaatttatcatgcaaaagggaaaacttaaggcctgaaagctgactgaggtaacacaacttcccctgattctggtgcatgaccgttgctttctgacctttgtgttgagatgttatacattaaccagactcttctttattcaaaactgcgctaaacaaagtgaagatagagacccttgt

SEQ ID NO: 1242569 - DNA, 4001 bp, Homo sapiens
cctgaggtgaattacattctgagcttatgaagataacaggattaagagattaaagtaaagataggcataagaaactataagagtgttaattgggaacgtgataaatgtccatgaaatcttcacaatttatgttcagagattgcagtaaagacaggcataagaaattataaaagtattaattttgggaagtgataaatatccatgaaatcttcacaatttatgttcttctgcctcagctctggccgatccctccattcagggtccctgacttcctgcaaaacaatcaatgccctcactttaacagtagatacttggcgaggctgtgcatggtgaggctgtgcatgcacctttcattgcaggtcagccactaacatgataagagcttatgtctatttttccacaatttcagttctttctctacaggagattagactctcactcagggcaatcttggcagatttgaggctcagtatctgcttctgaagctgggagatagaatccccgagttcatcattttctttcatcactttatccactgaacttaggagcaaccaaccagcttcattatgttccttagttctccacatatggtcaaaggtatgatgtatagggtcactaaactccttgcctctcatgagcaatgaatcaggagtgtcaaatgcatttattttgtataactctttaaacagttcacaccaagggctatcagtcttctccatactattagaattagagtccttagtattttggggtctaatcatattaaggcaccaactccagaaaccccaaaaccaacaaaagaactccatccttaatattcttttcctctagaaccacttctggtaccaaaatctgtattagtcagggttctctagagaaacagaactaatggaatatatatattttataaactcatatgtataagtaatacatataaactcatatatataagtatatatatgagtttactaagtattaacatatgtatgtgtgtatatatatatacacaactgtatatatatatacagtttattcagtattaactcacatgatcacaaggtcccacaataggccatctgcaggctgaggtgcaaggagagccagtttgagttccaaaactgaagaacctggagtctgatgttcaagggcaggaagcatccagtacggaagaaagatctaggctgggaagctaggccagtctctcttttcatatttttctgcctccttatattctagtcatgctggattaggtggtgcctacccagattaagggtgggtctgcctctcccagcccaccgactcaaatgttaatctcttttgacaacaccctcacagacacacccaggatcaacactttgtatccttcaattcaatcaattgacactcagtattaaccatcacagtgtctgacatttctgtctcctttttttctatggaataagaattgaagattactgtaccagctcctgagcagaactacacattgcctttgtacctgctggtccctctctttttccataataagctcttcttcattcttctggtctcacctcctctgggattcatccttctctgaccaccacccaactaccagccccctgttaccacctttttccagctgccctcgtctctccctgttgctgccataaacgtgccttttcctctgcccagtgtttcctcctaagacttggcaggtactgtctttcatggtccctaggaatttctgcttttctgtgaggatttttgctcttctcaccagctgtgactctaaaagattggtgaggttatcatggattatgaccccatcagcccattccttgaaacagtgctcacctgccaagtcctctcaggatgtctttctggagagagcttcgtccaccctcctctccagccagcagctccagaactcctacagccttggaagagagcacagtaactcaagcagacagcttcagaatccctgcactgtcggaaagagagctcagctaatcattgacagtggataactttggagtcttacaaagggtaacagcagtcctcctagccaagtttatggacattacaacattagagcatttgaggtcaactggacttgcactttcaatccaaggggcatgaagcaggtttatgcccaggactgacagaaaattattgcttcaacccaagagagagaaatggagctcacataggcttgatgaacactcctttaattctttgttttgcttggttccagcataccacttttgcctggttttcctcttgctttccttctcttttgctgattcctcctcatctttatccacgttcactctgtacattatctcatcaaatgtcatagcttggataccatgtggcttgccaatggcccccacacgtgtgtatccaacctggttttctctcctgcatcctcatcttcctgacttctccacctggatatctaacaggcatctcaaacatactttgtccaaagctaagaggttgatcacatccttccctggccactctcattccaggtatggttttatccatctcagcaaatgtcacccctattcctctagttcttccaacatcaaatcttagagactgccctgactcttttctttctcacatggatgtgaaaaagccatcagatccacctgcaggctacactcagagtctgacccattctcttccctgttccaacccaacccaacactgtccaagtaagcccaaaactcaacagggaaaaaaactctttatatctcttcatatttattttattttgaaatagtgtctcactttgttgcccaggctggagtgcagtagtctgatcacagcttattgcaacctcaatctatcgtgctcaagcaaccatcccacctcagcctcctgagcagctgggattacaggcacatgccattatgcccagctaattttttaacgttttatagagacgtggtctcactatgttctccaggctggtcttgaactcctgaacttaagtgatcctcccatcatggcctcccaaagattacaggcatgagccaccatgcatggccaacattgtcttatagctggtatcagcccatgcttcagctctctcaggctagagttgcaaattggtgatcctacagttctgtgtcttgggggtggccccactcccatggcttcatgaggcatttccctagagggaattctttgtagaggatcttaccaccaagcatctatggcccctacattctgggtgcctgcagaattaataccattctgtctttgttagtcttctgggcctgtgatgggaggagcagccccaaagatttctgaaatgcctttggaaccttcttcctattatcctattagcaccaggcccccttttggtcatgctttagcagagttgttctgacactttcttggactcctctcctgaaaattctcttttcttctctaccactatgtgcaggctgataattatccaaattttaatgctcttcttcccctttaattataaacacaggctttaggtcattcctttgctgtcacaatttaacataagctgttaaaagtaaccacatcacttcttgagcactttgctgcttagatatctcttgcatctgacaccgtaggtcatcactcttagttcagccttccacaaagccttagggcatggacacagtgcacccaagttctttgctacagagtaacatgggtgaattttgctccagcttccaatgagtttctcatttctatctgagattttttggcatggcctgtactgtctatatttctatcagcattgtaaaaaatttaaatttaggaccttccaaatttatcatgcaaaagggaaaacttaaggcctgaaagctgactgaggtaacacaacttcccctgattctggtgcatgaccgttgctttctgacctttgtgttgagatgttatacattaaccagactcttctttattcaaaactgcgctaaacaaagtgaagatagagacccttgtgactgtctccttttaatagaatg

SEQ ID NO: 1242570 - DNA, 4001 bp, Homo sapiens
gcaagagacaaggtcctccttgctctcatagaaagacacatatagtaaacaagggaataaataaatgtgatgttacgcaagaaaacaaagagagtaatgggagaaaagggaccttttaggaggtctctctagggacgtaacatttttgctgagatctggcaagtggttgtactgttaagcattttgcagttatttattagtattttcattttacagacaaggaagtatacacaaacagacacacatatttaaattggacaacgcatttattcattacccgtgtatttattgaacacttggtatatgccagacctgtactaaatgctgaaaatatagctgtgaacaagacacggctggtcttgctcccatgaagcttatagactattaaggaagacattaaataattatgtaaatattaatatgattggagataaatatatcatacttagcttgctgattctgaatagaatcagagtttagtatgatttgttccctagctcccatacaatactctacaccacattcagaatccttcaaacgtatgttgaaaagaaaattgatcagtcatttggagcttaaaatgaacctaaccattctgttctaccaaaaagcaaatatcgacatcctcttcatcaaaaccataagattaccttctcctcaacaaagttcttttcctcccttttcatcgatcttagcattttacaacttctatttcccaggtttataaaattatttgtaggtaaaattgctgagataactttcccagggtgactccagatttttatactgagccacagaaacattggtaaggaaaactcttctaagaaagacagtaccacccctggtcagataggcttctgaaagtatttaaggtctcatctgaaatgcaagctctttgtccctacagccaagggggctttagcctccccacagctccctaaacatccctccctctaagtatccaagtaataacagtagtttaacatatacagcctcaacgcaaggtaaattcactgctgttgtctccaaacccaaccagaccctgcctgaagcccctcctatacagaacttttgcagctgcccttgaccacctaaaggagaaaactggctgctcttaggtttgcatctgtgtttcccaaagtttcctggaagtaatttacatactttctggatgatgcagaagatggattcccatctgtcactgagcaaggtggggagctaagcagacagtacaatgaaaatctcagccactacctggtcttttttttgagatggagtcttgttctgtcacccaggctggagtgcagtgatgcaatctcagcttactgcaaactccacctcccaggttcaagtgactctactgcctcaggctcccaagtagctggggttacaggcacctgccaccacacctggctaattttttattttcagtagagatagggtttcaccatgttggccaagctggtctcgaactcctggcctcaagtgatctgcatctgcccaccatagcctcctaaagtggtgggattacaggcttgagccaccgcatctggttcaattaaaattaaaaaaaaaatttatcaacttaatacatgtacatagtttttcaaaaaatcaaatagcaccaaaaggctcaacatgaaaactcagctgctacatttatagccttttgtgtgtgcatactcctcatcacttaatagatagtatcacacaactgagaaattctgagagaaactttggctgcccaagactttaatgacagcatttttgattgttggttttgttcatctgtttgttatctttgctcaaaaaacagatgtgccagttcaggaaatcttacacaggaggggagatgaggtactcactagttaacagattccaacacagatggagattatggcagacttgtttcttagaagagcagccctgaaccttgagttctcacatctgctttttcctcgtggcagtctaaagaagagggaggagcagtctgacaatccggaggagcaagactggcccaaaacactttccttgattggtggagacattctggaggaggagccaagctctgggctaaagtttacaggactcccagcggttcctcttacaggtaatgatttacagaaacagcaagcttttgaggggcggagaaagcaaattattaacaagaaggaaagtgtccaaggagttgccgaagtggttagttctgtaaaggggcagagagagcacttctcagaaggaagaacagatggaggaagccatagaggagttttgaaattgaaaggaaagaagttgaggggcggttatgggttggcctaaatctcatcaagcccattggtgcgtttatctgtcgaagtggcaggactaaacataaacgctatcaggttactcccctgctcaaatctttcagtgcttctttttccactccaggtaaaatccgagtccttacatgaactgcaaggagttgtatgatctggcacagggtcctctgatccacagcccattctccttcctctgcctcactctgcacagccaccggcctccttgctttttctcaaacacacttgcctgtttcagcctcaggctttctgaattcacagtttccactgactggaactctttcctcagatatccccctggccaaattcctcattttctgaggtgtcttattaaataactcttcccttacctcattttctaaagtagcactcttcattttttctcttttaccattttttaactttttacatctcttactatcacccttgagggtaagaactctttttgtttgatggtgtatctattgcctggaatagctactggcaaattttaggcattcaataaatagttgatggatatgtgaataaataaaggactctttcaattacatgtgagagacccaactttacttaaagaggaatttgttggtcacttttgagttctaggagtcttttgttgttgattccttgggattttctgtgtaatcacattacctgtaaataagtaaacagatcttacttctttctttcagatctatatgcgttttatttccttttcttgccttattgcgcaggctagagtgtctagctctacgttgaataagagtgatgagagcagacatccttgccttgcttttgatcttagagggaaaacattcagtctttcatggttaggtacaatattagtagtaggttttgtgtagatgccctttatcaagttgaggaaattctcctctatttctatttttttctgagtgtttttatcatgaataggtgttgaattttggcaagtgttttttctgcatcagttactataagcatgtggtgtttttcttctttagcctgttaataagatagattacactgatcttctaatattgaaccagccttgcctccctggaataaaccttgcttggtcctgttgtatatttctttttctgtattgctgaattctatagttatgtctcttgacaaatttgagaacttttcagctattatttcttggagtaaatttttagcccccatgttagatcttttatgatagtttcacaggtccctgaggctctgttcttttttttcttttttttcccattctagtttctttcttttgttcaggttgagtaaattctggcttccagttctttgatttttttcttctattatttctattctgatgttaagctcattattagagacagggaaaaaacagtgtttttttttctactctcacataccattcagcataatgttagcagtggtgaatccatacggatctacaataacttgattcttgcctcttcaaaggaaagaattcatccaagaggcataaggcagagtgagagactgaggcaagtttttgagcaggagtgagagtttattagaaagttttagagcaggaaccaaaggaagaggggcaagcaggcaacttgagagatccaggtgccctgtttgacttttgactttgcgttttatacattggcatgcttccgaggttttgtatct

SEQ ID NO: 1242571 - DNA, 4001 bp, Homo sapiens
ctggagttcctcagtgcctggaggactaggtgtctcagccatggtctcatgcagtcgcctcctgtctgtcaccaaagagaggaaagagggcattgtcataaattctgggctttggggacaacacataggttaggagaaacctgtggttagtgctgatggtgactgtgatccttactgacttgtagaataaactctccaccttcagtctcagttctgctgtgtgatggtcatttctctcctctgaccccgaggtctgtccttttgacctctcactgacttgtgggtatctgggtctgaggtcagaactcagatcccacttctcaaacctcaatacttcaaaaggaatccctcaaaaaggctttggccaatcctgaactgaccttgcaaagctgaagacagctctagggcagcactgtccaacagaaatagaacgtgagccacctgtgcaatttacaatgttctagtacttccattaagaaaagtagaagcaggtgagatttattataataaaacattttatttaaccagatagagccaaagtatgaccatttcaattcctagtcaatagaagaataaattgttaaagagatattttacatacttttatttattttttgttttttttggtactaagtcctcacaatctgaaatagactttacccttacaaacacatgtcaatttggactagccacacttcaagtgctcaaaagccacaagtggctgctgtatggcatgatgggcttttagtgtctttttaatttttttatttaattttattatttttaaaatttttattattgttgtttttgagacagagtctcactctgctgcccaggctagagtacggtggtgccatcatagctcactgcagcctcaaactcaagcagtccttccaccccaggcttcctagtagctgggactacaggcactagccaccatgtgtggctaacttttaaaaagtttttttgtagaaacaggatctcactatgttgcccaggcagggcttgaacccctggcctcaagtgatcctcccaactcggcctcccaagtgctgggattacagatgtgagccactgtgcccagcccagttttagtgtcttgctactcaaagtgtgatcttgggaccagcagatgggaccccaccctacatatgtagaattagaatctgcaagttaacgggatcttcagatgagtcatatgcatgttaaagtttgagaggcactggcccgggagctgcgtgtgacctcagtttcagtttccttgcattaaattcctcttagtaataataataacaaaatatggtaataacaaccaacaataataacgtggcacaacaagaaaaaccataacagcttcagtctattgaaggcctactgtgtaccaagcattttaagagtgcttagaggcattatttcatgaaatctttataacaactctatgctgtaaatgttattttctccatttaaagataaagaaaatgaggcttaaaggggaaaagtgactttcaggtttcacttcctggaaaaacataggccccagcctctgcagtggccaccaggcctaggcctgcagcctcagagacttcctttctctgacccacctctcccgcccctcacctctcccgcccctcacctctcccgcccctcacctctcccgcccctcacctctcctgaactgagctctgccccagtccttttcctcagtctcccacccctggattcctcagccacctaaacagctgataatttagaatccccaggcctccttcccattccccgacaccatttcagatgtcacttcttgatttaatcagcaaaggcctcagaggcagctgataccttcgtctgaaaaatttctttccaaattaccttgctcttgaaccaaagtaatgcaaaaggtctctgttttctgcttcagctgagcagagcagggctgagtggctgtaaacactcagctccctcagaaaacagcctcccacagggaacttcagccccaaatgcagccaagagtgggcagagccagaacccagcagctgacacagtggcttccagtggtcagggtgcattgagccagtgagagtggccccctgccaagttttctcagtactcacagtggctggaagatcagacctcaactgtcgtgcctggtgggtgtgcccaaactggtggatgtattccctaaaaattcaagtcgccatctaatcggaaaaagcaacaggaagattatgacgggtttttttttttgtttgtttgtttgttttgagacggagtctccctctgtggcccaggctggagtgcagtggcgcgatcttggctcaccccaagctctacctcccgggtttgcgccattctcctgcctcaggctcccgagtagctgggactacaggcgcccaccaccatgcccggctaattttttgtattttttagtagagacggggtttcaccgtgttagccaggacggtctcgatctcctgacctcgtgatccgcccgcctcggcctcccaaagtgctgggattatgatgttttaacagaaaaggtgcaatagtgataataatataagtcagactttgtttcttttctgcttagaaccctccagtagatacagagagaacagaggagtggttccagggaacggctctaaggcatccctttgaagtcatagaattgttctaaatttggattgtggtcatgactgcagatctctgtaaatttactacaaaaaatagtaataataattgtacactgccaaaagaagttttttgggtttttttgtttgtttttggagacaggctcttgctctgtcgcccaggctggagtgcagtggcgcaatcttggctcactgcaacctccacctcccgggttcaagcgatcctcccacctcaacctcccgagtagcggggaatataggcatgcaccaccatgcctggctaatttttgtatttttttggtagagatggggtttcaacatgttggccaggttggtctcaaattcctgaccttaagtgatctgcctgctttggcctcccaaagtgctgggattataggtgggagccactgcacctggcccaaaggtggtttttcgaaaaagcttcctgcaactccctatctcactcacagtccaagccaaagtcctgacgattgccgggtgggatggctcacgcctgtaatcccaacactttgggaggccaaggcgggcggatcacgaggtctgaagattgagaccatcctgactaacacggcgaaaccctgtctctactaaaaatacaaaaattagtcaggcgtggtggcgcctgtagtcccagctactctggtgggcgcctgtagtcccagctactctggaggctgaggcaggagaatggcatgaacctgggaggcacaggttgcagtgagccgagatcgtgccactgcactccagcctgggagacagagtgagactccgtctcaaaaaaaaaaaaaaagtcctggcaattgcctacagggccccacaggaattcctgtgagcctttcgcctcaaacctcctgtctcagtctgctccagccataccggtctttttgttgtttgttctctgaagttctttttaaattatttttaatttttgtgggtacatagtaggtatatacatttatgggttacatgagatattttgatacaggcatgcaatgcgttagaatcacatcagggtaaatggggtgtccatcacctcaaacatttatcctttgtgttacaaacaatccatttatactattgtagttattttaggtgtatggttacattatttttgaagatagtcatcctattgtgctaggaaatactaggccttattcattcactcttactacttttttgtacccattaaccatccccacttctcctccaactccctgcaacactttccagcctctggtaaccgtccttctactgtctccatgagttcatttgttttcctgtttagctcccacaggtaagcgagaatgtgcaatgtttgctttctatgcctgg

SEQ ID NO: 1242572 - DNA, 4001 bp, Homo sapiens
agtggctcactcctgtaatcccagcactttgtggggctgaggacaggaactcaagaccagcatggccaacacggtgaaaccccatctctattaaaacacaaaaaaattagctgggcacgggggcacaagtctgtcattccagctactcgggaggctgaggcgcaagaatcgtttgaattcgaaaggcaaaggttgcagtgagttgagatctcaccactgcactccagcctgggccacagagcgagactctgtctcaaaggaaaaaaaaaaagagggctgggcaaggtggctctaacctataatcccagcactttgggaggccaaggcgggcggatcactagaggtcaggagtttgagaccagcctggccaacatggtgaaaccccatctgtactaaaaatacaaaaataaattagccgggcttggtgtggacacctgtaatcccagctactcaggaggctgaggtaggagaatcacttgaacttgggaggcagaggttgcagtgggctgagatagtgccactgaactccagcctgggccacaagagtgaaactccatctcaaaaagaaagaaaaaagaaaaacaaacaaacaaacaaacaaaaaacacgtgaatgtatttacaggtaaggagcataatgtctgcaattaacttttaaattaaaactctgggccaagtgtggtggctcacacctgtaatctcagcactttggaggcccaggaggtcagatagctggagcccaggacttcaagaacaatcttggcaacatggtaaaaccacataatctctacaaaaaaaatacaaaaattagccaggtgtagtggagtccacctgtagtcccagctcctcgggaggctgaggcgggagtatcacttgagcccaggaggcggacgctgcagtgaggcaagcttgttccaccgcattccagtctgggcaacagagtaagaccctgtctcaaaaaaaatccaaaacacaaaacaaccactctgagttaagggatttaaggggtatgtattgaagaagaggaaataacggtttacctctgtatcatgtacacggtattacccttaccaaactgtgcttaataatgtcttttaagtcaggggagtggctcccatttcggtatctccaatgctagcacggcaacttaaattgcatgtaagtggctctaaaaacgtatacagaaataccagggggccttaacctccctggaagtcaggtgggaagaatgttcacctgccatgactctttcacagttgagcatctggtgtggctggtgatccttggagatcgctgctcacagcagggtccaccccaaggtcccaagctcaggccaggtcctgctccggcggtgtctctgagcatagggaccaaggtccaccttccccagaccccctgctccccacgtcctgggacccagccctccgtggctctgccctctggcacagccatgccccggcccggcctcacctggtggctggtcctcccggaagagcaggaagatgcccaggctggccgcgtactccgtgagcaaggacacggcctggctggcaggtgggtctttgagcggcaggctgagccctgctgggggcacagggaccctcggggccttccccatctgttcccccaagttttcccacgcccgggctgcccccagttccccgactccggcccctgccccaggcccactgtccctcaacaccgagacctggggccacccgccctccgcgcgatacgtcgcgggcgcgggcgcgggcccccaggcactttgggcctgggcgggtagcggtcgccaggggcggggctgggggctgatctgcaacgatgcagccaggcggggcttcctacgactgccgtcgtcgtcagcgccctgagaagccgaagccatggccgccaacgaagatctgaggcgctaggccctatctcgcgctgctctcgccctttcacacgcgcagggcgggtgccttcacgtggggagcacgcggacgaagcgtggtgagctccacccctgccatacgatggccaatgagagccctgagatctgtgatggacagtgcaccctgccaatgggaaggccagtctcccaacgacggcggcttggatgcttatggctgaggccaaggtcccactgcctggacggaagttccggctgagaccaacgtcccatggcctggagggaagttccggtgggtgggtgaggggttgctctagcagctgcttctttaaccgtgggtggtcgcggagcctgcaaggcgggggaggagcatctgggggcgtcaggtccagtttcacactctagctcctgccctaggcccctaggcacctccacatcacaggctgctcagctgcttcactggctgagcctggagacttcaacacaggaattaggggttcacactgtcagcaggatcattggatataaaatttcactgcaggcctttctgaagccaaacataagtgttccccagccaagaattagccatttgatgcaaaatgtaggtgggcgtggtggcgcacacctgtagtcccagctactcaggaggctgaggcaggagaatcgcttgaacctgggaggaagaggctgcagtgaactgagattgcgccactgcactccagcctgggcaacagagcgagactctgcctcaaaaaataaataaataattttttttaagaaaatagccatttgatactctgcctttttcccccctaagaagggattttgagttaattcatacaaataagacaagataacaattgtttaaagtgaagagctagagatcaagagacataggaaaaataagataaagacagggatgaagacaatttacacaaggcttactgtgatgcaacgcgtatttgcttgaaggaggctgcaagtttaacggagtcttacagtagccactaacttgggaaagcatgaccagtgtctgtaagatttgtcacagtgcttgctgctgctgctgctgaagctgggcctggcagctctctccaggattgtgacagtgaggatgctggggcatatgaggaccaggtggtggagtcctcccagaacctttgacttggaagaagcaggtgtggtgggctgggtagtcagcctccccaacatgtcaagaattgacatcaggaagaacaattccattttgtgtgtgtgtgcagcccagagagtgggatgaggcccaggagagtgaagggacagcacagcagatgtccagaaatggactgagggctgcacatatccacagagagacttccacaaagtcatcaaacccagtaacgccccaaacgctcaccaacaggaggttgcgtgaacaaatcaatggtatattcatacaatggaacacgactcactaatttaaaaaggaaacaacagctgcgtacacaacacaggtgaatctattaggcacatggcgtggaagaagccagacacatcctctccatgattccacttatgtaaagttcttgaactggcaaaactaatctgtggtgataagagtccaaatagtggttccttcttgaaggaagtattgactgggaagtggcaccagggaattttctttttagaaaaaaattttgtagagatgggggttttgctctgttgaccagtctggtcttgaactcctggactcaagcaaccctcccacctcggcctcccaaagtgctggaattataggcatgagccactgtgcctggctggaactttcttgagtgatagaaatgttctctgtcttgatctgggtggtgttcatgtgggtttctatgtatgaataaaaattcaatgagctgtacatttaagactcgtgtgctttactgcatgttgagtatatgtcagttacaaaagcaaattgataatggcttattcagagaaaggaggaaaggaagaaatggaactggcctcgcagtgccaaagctggataggcgttttacaagggtaatgtagaatattagtgtggtaggcaaaataatggttcccccaaagatgtctacagcctaatccccagaacc

SEQ ID NO: 1242573 - DNA, 4001 bp, Homo sapiens
ctttaaagggatgtggctcttgattatgtgcaatttcttagagaaagtctaccttctccttctgtcaaactaaaacttaactatgaaaaagattcctgacatatgcaggaagtctgtgtctcaccttcttgtcccaaatcatctgaaactctgcctgctcttacttggaaggctctgtaggaacgttatccagccagccttctatggaaccagccatcaaacggccccagacacctgctaccagcttgtttccaaggggagaataacaggctgtcggttacattcggttcttgatggaagaagggcagtcagtgtcccctgtaaagagtgatctctgattgaccacttcaggaggtgagtaagggtgaggtccttacaaggttgtggctgggtcggacgtggcctccagccatctgatcctgatataagaatgaggggtggttttagaaactgcagcctctctgtttggacaaaaggtgaatcccttctccatgactccatcctgccccactccccattcccctgacaagaaaaggagataaccttgcaaaactaaaaattacagaattctaaagaatccaggttgagctgtaaggttttcctagacaccttgcgtcaggaatcagctgttctcctgtagctgatgggaaacaatcaaaacaaggatttccctctgggctccactgggaagttaataaatgtcagaagtgagggattttctggaagtttgtggctggcgaacgtcagaaaagatagataaaggactcagagacctgaagtcacctgctttcctctctctaaaagcagccttagacatccgtaaaacaagggaagcagaaatgaaaaaaaaagaagagatagaaaaggaacagaagtcgagagaaaaatgaggaaagatggagagaggaaagaggctcacattctttcatctcccactaagaattagcttcccccaacaagagttaggagagggaggaaataagtaattccttagttaatgtccacttcccttcgaatttctcactgcagttaggatttttttttttttcttgttcttcttaacaagccacctgtgaaggagggagagtatttgcttttatgtgacttgcagctcggggcgttgattcttttgataagttcagtccttgccaaccttcccccctctccaaacaggaaccatttccaagacagcgcacacctgccaggttagggggtgcgcttttccatcttttctctctttgggggaaggaagggtcaaagtgctgcgaaaggcccttcttggggatggggggcaaatacgaaccatcatttaatccgctggcgccgctgctgctgtcactggctaaggccgcggcgaccgacgcacagcagaggcagcacagctggagcgcctgcaagagaaaaggtgacatcgcgcgtgaggggcgcggcggggctggcgtcgggcgccccctgccacccgctctcggagctccgctcggcggcacctgccttggccacgcgccccagtcccgccaggcccctcggcgggcccgaacccgcagccgggaaggcacacgcgagcaggagggcgcactccatggtcaggtgcggacgcggcggctgcgggtggccagacgcggcaggcggagcgcacgggcggcgcgcattctttccgcggccccggagctcggcgccccaggtgcggctccaggtgagagccgccgccgttcacatcgcagcgggggcgcgctgggacctcccctcctccggccgcctgcgcgccctcccttctcccggcgcgggcctgccgagctgcagtttgcggcaccccagagggtacggggggctccctgggccgggactggagcgcaaacggttgggagactgtcggtgtctgcccgcccgtctgtgcgtctgtctgtgtcggtgtgagcgtctgaggcgatggggaagacagcgccagctggctcccccagcgcgccggagccgagcgcccgcctctccaccgcgcggtgattggcgaccagcggctcccgggctcgtccgagcccccgggctggtgcaagggcgtgggattcccggctccagctctgagggagggggcgaagggggcggggaggctgggtgggagtgatagggagggagggaccgaccgccatgagaaggaggggagcgcccagggtcaggcttggaaaacgtaatttaagcgcactgggagatgagttcggaagacgaaaggctcaggtgagtggcgcgactttttcgctgcctgtgcagacttctcattttcaactcttctggcaaagagtcaagatagcgtcctcaacacctcctaagtgctgggagctatcccctgctgtatcgcatttgcctcaggccctacctttttcaggtgggaattattaattccttgataaagatgaggaaaaggaggctcagatgcgcacaagctgacctagcttcccagagtcagcaaatctgaggcagccgggaggaccagaacaatgagctgtcactgtctgcagcatgtaaaaactcatggcacgcgggggcctccctcttctcccggatctctctctctcttcttgacgtgaccgtgcttcccactcttcgagattgaatcttggccccagatacccaaacccacagaaatcagttataacaaacagcgcacgccatcactaggaatgtgcatccagtttgctgtgtgcctgttcgtttactcaagacatttatttgatcctttgatccctgtttgcagaggtgaacaaaatacagtctcacgggccagtggaaacgaatctgattggatagctcgacaacggtaatagaagcaaaatgaacacaaatactaaaaaggaaaagaatagtctcctaaattagatggcagcagaatctaatttagatgggataagatgtgtgtgtgtgtgtgtgtgtgtgtgtgtgtgtgtgggtgtatatatacacacacacatatatatacacacacacacgcatacatacacgtgcaaggcatctgttaggagctgacacttaaaataaggccagagagagtggatcggttttataagggaagaggggagtaggatcttgcatgttaggacagggggcacagcataagtgaaggtctcaaggtagttaagtgattgccacgtgaaaagtgttacaggccagaggaagaagcaaacacagcagttgctgggtcagctggaccttgtaagctggggcgaagcatgttggaaaccattagatttaaatgaatgtgggtttgtgtatgtgtaggaggcaacatcatatccaataataaaaaaatgtgaaccattttttgagcgagtgtagggattggacgagctgaggcagggtcagagagaaacaaaccacgcagctgttgctggcatgaaggggtacaatgacagtgtcttgcttggaccagggtagtggtagtggaagtagatgtattactctgctcagtcctgtgggtactgaagtagttaacatgaggtctatgtcaagcctcgattaagtgatagctcaatacacatagtcggttttatggaatgcagctgggaagaggtaaacccaggctgtagcggcagagaaggtgatgtgtctgcctaaggaacatgaagctaagcctcacagaacatcagggctaaacaaatcatttgggtttccctacttaatctggttaagctctgtggcctctgttttataatctgtaaaataggaatcaacatgctacatcaaaaggatagcctgaggggtaagtgaatatatttttcaaagcacattataagtggactttaagaagtgatggtgtatttctgttatttcatacatcctgtgtcaaacttgaatatacgtcaaaatcacctgtaatgctagcttaaaaatgcagatttccaggccatgaagcactgtgattctgattccatggatttggtgtagggcccaagcatgcatttgtagtaagcacttgtgggtgattcagacacaagtgacttaagtgcttcatatga

SEQ ID NO: 1242574 - DNA, 4001 bp, Homo sapiens
tgaaatgtttctcagcagttacgtgttctcatagagctctacttaagggtgtggactttggattcaccctttctgggttctaattttggctttgccacaaattaactgtgatgctgaatagactacttaaccttgctgggtctgtttcctcatctgtcaaaatagtgataacaatagtatctaacctatttagattattgtgaagattaaataatacttagggttactgtgagggttaaataagtaatacttataaaaagcaattgctactatgttgagcataattaaggtcaactgtgattactattacaaaaaataacatttgatgattttcctggttaatttgccttgagctacctggtggtgggggtgaaagggggagggctgtaatgggcatagaaagccatgaattaaaaaaccatcaagcagatccctaggatactttgcagggaaatctctcactcttggccctatcaatgctcactaggcacatcctgatctcatttggactcaattatacaaaaagcttcccagtagaagatgagcttgtgatagacatagctaagcactgtaaaaccaaactgaaggccgggcgcggtggctcacctgaggtcaggagttcgaggccagcctggccaacgtggtgaaaccctgtctctactgaaaatacaaaaaaattagccgggcgtgatggcgcgtgcctgtagtcccagctactcgggaggctgaggcaggagaatcgcttgaacccgggaggcggaggtcgcaatgagccgagattgtgccactgcactccaggctgggtgacagagcgagactccctctcaaaaaaacaaaaaaggctttcctgagctccagtgcatgcagcttttgaaagatggtattgttatgaatcccctgcagcgcaacgtgcaggctcgctactgtagtgaatgctactggtaaatcagaccacagtgatttaaaacaaaaatctgcaggaagtgagaccctgtgacttgaaagtcagagggccagggcaagccttgtcaagaaaagaaagcatgagatcctagaatcctcgtttggaagggactcacctctcatttctagggaggcatcacaaggcagtatagtttatgaagaccacctggccatcgacctgaaattaaaccagaggtgcaattcacaaacctcgataggcaaggcaggtagaagttgccagaagaaacagtgactctctttaagatgaagcagcccagaacggcatcatctcactcaggtagtgcgtctgaatgagcatgcacaattgtttaaatgaataaatgttttgctacactgggtccattataattcgagcctacaccccctcctagatcttgaaaacttgaagaacttcttagctgaaaataacagctcagctaaacaggcatttatttgcccacaagaccgcatctctgaacagtttcaacaagctaaaaaaactgacgtcctttccaaagaaaaggaagtcggctgccaggggagaaaaggcttcagcgatgcttggaggaagggactctggtttacgctggctcccttcctaaacacttccggaagcagagccccttcccggccgctggagaagcctgggtgggaccccgagtcggccagttacaggataggaggtgccaggcaaggcactgaagccatgcagtgagaacagcgtgagcgcctgatccattgggtcctgcggctgccaggccagaggccccgcgccaggagctcttcaggcgccggctgctgacagttccaggcgtggagcgccttcccacgtgaaacgcgtcccggaagatacgatcctcacaacctcttccctcaaaaacagactcggcaaagttagcccggataaacctgccccgtcgccccagcgcctcgcggacgctcccctcccaccttcaggaaacgcgcctagaagaaagcgagcttaatccgccggtaaggcggacgtgacgtcacaaagcgccggttcctttcggctcccgctcccagaggcgcgcagtgcatgccgggccctgtagtttttccggggagtcggtgccagggccgagattcccgcgcttcaagtcccgcagccctggctgcgtcttagagaggcgtgaaaccggatgatgggagccgcttgttggcttagatattccttcaactagaatgacgtatcttgcagcactcggctgaatttttttctttttcttttttttttttgagacggagtcttgctctgttgctcaggctggagtgtagaggcgcgatctcggctcactgcaaccttcgcctcccggttcaagcgattctcctgactatgctgtatttctatctgtaacatcactgtccaatagatatataattcgaaccatatacgtaatttaaaaatttccagtagcctcattaaaagtcaaaatagaaacaatcatatatattttatttaacccatacatcccaaatagtattatttcaacatataatcaaaaaattttttgagatggagtctcgctttgtcgcccaggctggaagcggcgcaatttcggcgcactgcaacctccgtctcctggcttcaagcgattctcctgcctcagcctcccaagtagctgggattacaggcgcccgccatcacacccggctcatttttgttatttttagtagagacggggtttcgccatgttaccaggctggtctcgaactcctgacctcaagtgatccgcccgcctcaacctcccagagtgctgggattacaggcgtgagtcacgatgcccggggtcggtctgtctgtctcatatatatatatatatatattttttttttttttttttttttttttgagacggagtctcgctctgtcacccaggctggagtgcagtggcgcaatctctgctcactgcaagctccgcctcccaggttcacgccattctcctgcctcagcctcgcgagtagctgggactacaggtgcctgccaccacgtcaggctaatttttgtatttttagtagatacggggtttcaccatgttagccaggatggtctcgatctcctgacctcgtgatctgcccgcctcggcctcccaaagtgctggattacaggcgtgagccaccgcacctggctgccgagtctcaatattttaaaaaatacttatgttctgttctgtttttaatgcgaagtttaagaaatctggtgtgtgttacacttagaatacatcccaatttggatcagccacatttcagatgctggatagtcacatgtggctactggctactgtagtacagtactactacagtgtagtgggcagaacaggtctaaaaacctttggattgccgggaataagtaatatagctgcctggatacttcaggggcctttgtcacccagtaactgaatgctctattactaaaaatgaaagaattcatttttctttgttacccctcaaaaatttatgcaacttgctcaaccccatccttctctctagttcaaaggaaatgggacatggccctcctccaaggccaaagactttgctcctcattcctctccaatatctttaatctgcaagtgactgcctcttctgtcttttaagaaatattccagtgggggtaaggggtatcaaagaccttcttctagggttctttatctcagggattggtattactagcaatctagttgcgtaactaaaaagtgagtcatgttccttgttatctcccttcccttaatccccttagtgcaatccattaccaagtcctgttgatcttacttcctatctcttgaatccatccatttctctccacttgcatgccaatacgctagtaaaagccactatcgtattcctcttggattgctacactcatctctgaatttccaccttttcttgcttaactccaattcattttccacagagcagcaagactaatcttttcaaactgcaaatctggtgtcagatttgtgactactacacatttactgcttaaataatacttcagtgaatgccttctcggtactttt

SEQ ID NO: 1242575 - DNA, 4001 bp, Homo sapiens
agcatcctgtggttggtagccacatggatccaggctgcactggcagctgctaggtcctggccacttcactcacataaacaccctggagtttctgagtgttcttctagaactcagctaatcaaatttacattcactaaaaagaaaatgggctgggcatggtggctcacgcctataatcccagcactttgggaggccgaggcaggtggatcagctgaggtcaggaatttgagaccagcctggccaacatggtgaaaccctgtctttactaaaaatacaaaaattagccaggcgtggtggcatgggcctgtaatcccagctactcgggaggctgaggcaggagaatcacttgaacctaggaggtggaggctgcagcgagccaagttggtgccattgcactccagcctgggcaataagagcaaaactcttttttttgaaaaatgcagttcctcagtcacattacccactttttaaatgctcaatagctaaacacagctagtggctgtaccaaggcaagtgcctgggccggaaatgacataggtggtgccagcctggagagctgtgttaaaaaggattctgaggccgggcacagtggttcacacctgtaatcccaacactttgggaggccaaggcaggaggattacttgaggccaggagttcaagaccagcctgggcaacatagcgaggccatgtctctacaaaaacaaacaaacaaaaaaaaaacaaaaggaggattctgagaatgtagacaggctcagtgtggaatgtagggattgattaatgatgtctgcatgggtacaggaagtgagggcagtgatacacaggccatccctgacccaggtcttcagtagaatcgaatttcatcatggagaaaaatgagagtagtttatctggacaagttaatgtaatgtctgaaaccactccagacttcaaaactgaattaaagttagagaggctgggcatggtcgtgcatgcttgtactcccagctactcaggaggataagccaggatgattacttgaacccaggagttcaaggccaacctgggcaacaaaacaaggcccagtctcaaaaaaaatttttttaaattagaaacttgtcttctaccagtctaaatgtgctgtaaaagacagagcattggccgggcatggtggctcacgtctataatcccagcactttggggggccgaagcaggtggatcacctgaggttgggagttcgagaccagcctggccaacatggtgaaagcccatctctactaaaaatacaaaaattagctgggcatggtggcatgcacctgtcatcctagctactcggaaggctgaggcaggagaattgcttgagcccaggagatggaggttgcagtgagccgagatcatgccactgtactccagcctgggtgacagagtgagactctgtctcaaaaaaacccaaaaacaaaacaaaacaaacaaaaaagcatagcattttacagaagataagcattttacagaagaggctaagagaagatagcagcttggccaaggttggggccgagacgtgaagcccaggggctgccctcactcaccccctggctgaaggcaatgatgatgagggccacgcaggcagtggcggccaccagcaggagcgtgagcagcagcggcccatgctggctggtgagctggtacttctcgtagagcgcatcttggtcagggccctcctcgccctcgttgaggaagtagcgccccttggctggcatcctccacccttggcacgcgtgtcgttaaggggccgttaaggaggccccagggcctggagggcatctgtctgccaacaccctcccccgtgggcctaggcctctgtcctctccgaggcaggcaagcagggctggggagagggcctctgggcctgctgctccatggccaacaaggggtccgcacagctctggcaccaggcctcactcactgtgccgccagcatcctcctgtgcatccagactgggctgactccacacgcagttcctcagctctgcggagacgaagcagacaggaacttgacctaatggtccaagtcaggggagggctagcatcagggagagcggggcccaggcctcacagcaccaagtctgatttatccatcttaaccctaacctaacttttatgtcctgttgtcgtaaagctagtcccctgtgtcttctaggactgcactgtccaagatagtagccactagccacatgtggctgcttttttttttttttttcaagacagggcctcactctgttgcccaggctggagtgcagtggcacgatcatagctcactgcagcctcaaactcccgggctcaagtgattctcccacctcagcctcctacgtagctgggactacaggtgtgcagctaatttttaaattctcttttgtagagatgggcgtctccccctgctgcccagggtggttttgaactcgtgggctcaagcaatcctcctgcctcagcctcccaaagtgctgggataacaggcatgagccaccatgcccagccactattttaaattaaatttaaattaatttaaaataaaattagaaattcagtccctcagtcacactagccacatttcaaatactcaacagccagccaggcatggtggctcatgcctgtaatcccagcactttgagaggtcgaggcaggcagatcacctgaggtcaggagttcgagaccagcctggcccacgtggtaaaacccccctccactaaaaatacaaaaattagccggacatggtgacgtgtgcctgtaatcccagctactcgggaagctgaggcaggagaatggcttgaacctgggaggcaaattttgcagtaagctgagatcgtgccattgcatccagcctgggcaacagagtgagactccatctcaaaaaaaaaaaaaaatcaaatacccaatggctacatgcagctgctgtactggacagcacagataaacagagaatgtctatcatcacagaagcttctacaggccagctctgctctgcatgtttcactgttttgctttcacacaaaggtctctgatccatttcgattcactctgggtatggtgtgaggtagggatcaaggttcacttcttttttccatatggatattgaattatcccagcagtgttcagtgaaccggccatcctctctctgaatttcagtggagccacctctgtcataagtcaggtgatcacacacagatggtgtctgtttccaggctctgctctgtccccatggtcctggtgcaatcaccacattcacttcattttccagtgagtctcatgcctccaggcacagagggttccaagctgtgatcctaggagccctgagatttggggacatgcatcaggcccccaatgggaagggaaggtgggggggcataggctcaggcccccatgcctgcttcagccagggtagccccctgcatctgtgttacagtaagctccacataaaactgcattttctttctctctttttttttttttttttgagatggggtctcactctgtcacccaggctggagtgaagtggtgtgatcatagcccgctgcagcctcaacctcccagggctcaggcaatcctcccacctcagactcctgcgtagctgggacctcagctatgcaggaggctaaggtgggagaattacctgagcctggggagacttaggctgcagtaggccatgtattttttgtagagatggggttttgccatgttgcccaggctagtcttgaactcctaagctcaagcaatctaccctcctcagcctccgaagtgttaagctttcaggcactgtacccagcaaaaatcttgtttatttttttaaatagcccactgatacaaatttcagatgtctgcaagccgtgcttcacagaaaagggagctgagtctcagagagggacacagtggcccctttgtgacaacactgtgagctgaccccacacttgccatgctcagcccatatgggttccttctttccccagcaccattcattccttagcatattcattg

SEQ ID NO: 1242576 - DNA, 4001 bp, Homo sapiens
taatcccagcactttagaaggctgaggcggtaagattgcctgagctcatgagttcaaggttgcagtgagctatgaccactccactgcactccagcatgggtgacagagtgagatcctgtcttaaaaaaagaaaagaggctgggggtggtggctcacacctataatcccagcactttgggaggtcgaggtggatggatcatttgaggtcaggagtttgagaccagcctggccaccatggtgaaaccccgtctttactttactaaaaatacaaaaattagccaggtgtagtggtgtggtaactgtagtcccagctactcaggaggctgagggaggaggacggcttaagcccaggaggcaaaggttacagtgacccaagagggtcactactgcactccagcctgggcaacagacagagactccatctcaaaaaataataataaataaaaataagaaagaaagaaaataccaccggagacgctacctccacaaagctcacacctgcccttctgagggccacagaatctggaacaatctgagagcctcccctcccccacactctgcaccaggagctgcaggtaaaccttgggaacccagggcctctggaggtgggaagacagacaactgggtgggaagcgaaggctgtgcagcaaacgccttcctgagctgcagccccctcagcctcctgcacttcctgcagggctggcacttggcacttcctctcaaattggctggcttgtcacttttatgtctcctttggcctcgtctaagacaataatacagtcatgatgtcacaatggcaatgtcctatttacagatttttttttccccaagacaaatacttagattttaaacatgtccttccacacacaggctagaaccccctgtgattccctgggcagcccggtcctcactccgagaaacactggtgttgagtccacccctcacagcctccatctgcaagatggtgatgctagtgaaggcccacggtcacatagcccttccagacacatccagcccacactggctgcccgtccaggccttggacccagggcccctgtcgtaggtggctcggcctggcccctacctccaggcccttggcttccccctcccggccctcccttctcctctccagcaatggctgtccagggaggaagcccccagccacagatgtccctgcccttgaccctgatgtgatgacacagagaagaggcaactgcctcaccctctgtacatacatgtttagatgaatgcatagaaagctccagaaagacccgctccagaaagacccactccagatggcccatgcggtccctgggggatagaggagaggcattgcagggaaagggaaaccagtctgctttttggaggcatcttggtttcctgaccctcaggcatgcactcctttcagaggttttgtttgttttttgttttataatttcataaaattagttgaattggccttcccttgccaatgtttcctttcattgagaaaagtcatgtgtgcttgtaaatgtaaaattacaccctcgagaaggagtgtggacatttgagagtctgtggttcctagaattccagatggaacgggccacatgtacaacattgtggtcacaaccgcactttcttgtcaggctgggaaaagccagtgacaagtcgcctctggtcccctgttgaagggccgcctctcccagccatctgcccagtaggctcacggagcctcctactcccccagcccagaccctgcccagtgcactcccaggccaggctgccgggtgagctgcttcccacccactgtccagccccgtcccctggggctcaagccactaggactggtgacactccatccccacaccccacttttacctggctctcctccccggccccagcagccggccagggtctgcagggaggtggcccggcccccgcctgcccttcctcagacgcgcccaggctcacccatccgaaggctccttccacgctacctaatgagagtgagtcacatctgggacccaccacttcctgctccggcagcggcagcagcggcggcggcggcagcaaggctaaggcacagcccacagcccagcctctcggggtgtgcagggccccctcccccagccacagtgctgctctccgcagcctgggagctgccaggcctgggagctgtcgggctccaatgacttcatggaaatttgaagcttgaagctggaacaattttgaaaaaataataataaaacaagcaccaaaaacctccattagaagccccaagacaactgttcaaagtggggagcaaatgcatccttagtgagcaattagcaattagcggcctggcctgagcctcctgtgggctctgacgctcacagacaggccccccgcgccttcctgggactcaatttccctatctatgtagtaaggtggccccgtccacctctgagaggggcccaggagaggtcaaagatcttccagcccagcccactgcctctccatctcacctacgctcccatgctgggagcagggcaggggcaggcccatccttggggctcctattccaaaatcagagtccctggagagcccccaacatccctgggcaccatgaggctgggaatcaaaccccagcaccccttctgctatgccaggcctcagtttccccactgggatcatggggcgctcagtggcgagggagcagatcaggagaggctaagaggagagagtggagactcccaaaacagagggggaggcctccagcccgctggccacagcagcacctggtcctcagggagcccttctgagcatgtgactggcatcctgggattacgagctcctcaaagcaatggtgtacctcctccacctcccacatccagggtcagacacccctcttctggtcttctaacccctgcaccttcctccatcacagcacctctgtgctgtgaccactggttgctggtctgtctttcctaggttatatccttgaggagggcagagatgggagggcagctgtaatatcaacagctgtgtccccagcgtccagccccagctggtcacagagtagacatcccacacatactgatcaggaggaactgaacatgttaggtgctgtctctgtgccaggccccatgcagggaactagcaggtgatctaaggtctgccatctggtggagacaggcataggactcacacagggttccaggctgctccagaggccacaggagggagtgggagacctcaggggatcctccccatcagggtcgccctcctatcagcaaatgtctccctagcaaatgtcccagagcagagaaggaacagacatcatcatcatcaaaagaggggaaagacaagccactgactaggagaaagtcacatcctatatgactgacaaaagactcctccctagcatatataaagatctcccaggcttggcatggtggctcatgcctgtaatcccagcactttgggaggctaaggtgggcggatcacctgatgtcaggagtttgaaaccagcctggctaacatggcaaaatcccgtttctactaaaagcacaaaaattagccaggcgtggtggcatgagcctgtaatcccagctacttgggaggctgaggcaggagaatcacttgaacctgggaggcagaggttgcagtgagccgagatcacaccactgcactccagcctgggcaacagagtgagactctgtctcagaaaaaaaaaaaaaaaaaaagacctcccacaaaccaataagaaaaagacaaatggcccaattaaaagatgaacaagagacttacacaggtacttcaacaaagaggatgccaaaatgaccaataagcacatgaaaaagatactcaacatcattagccaccagcaaattaaaaccatatagagattccactgtaccactagaatggctaaaattaaaatgaaaataccaagtgttgacaaggaggagaagcagctcttcactctcatgtactgctagtgggaatgtaaaatggagccaccatgatgaaaactgcct

SEQ ID NO: 1242577 - DNA, 4001 bp, Homo sapiens
caggagacccaccagggcgtgggcagacttgttggcactcatcttggtgaagcccacgatatctgcaaataaaatactgacttcttcgatctgctgcatcttaaaagggcggaaggctataggagctttttggatggaagactttttcttcctgttcttggggctcgaggtggcatgcctcttgacagaattctcactctcctcatctccctgcttcattaagtcatcggctatgattcttggcatcacggaatgaatcatcctctctttgagggctttttccacttccaggtccttcccgtgcataatggattgccccaccttgaggaaggtgctcctggacctcacctgggacatgacgaacaggtggaccccgatggcgtggatgcagccgtggagcagccccctgctcagcagctcccagtgcagggccccggctccgggcgaggggaagcaggcttcatcccggaaatggtagccaaaggtctcgaaaaggacagagtaggccacccccagacacaaactcaggtacaaaggtaagtgcatgacggtatagagcaaaaagagcacttcgatgcacatggagaagctccccacttgagataagcaagtatctgtgggccgggctgtggccgtaaggttggagctgtcgccgcgtcctgagacaggcgtcaagacctggaactgcgcagccagggtcagggcgaacaccagcagggtgagagccagcgaggtccacgcgtaatgccgggcgtacagcttggtgaaggtaaacagaaagaagcccacacacaccaggaggaagcacagcgcgggggcgaccatgacgatcagtctggatctcatgtggaccgcaaaatagatgctccacagaaggcaggcgaagccgatgtagaagagcgcataccggaaccggcgctgggtctgcgggaagcagcgctccaggcaggcctcctccaggttcaccgagtcgaacttggggtcccaccagcggctggaggccctctcgaacagctggggcagcttcttctgcctgcgcagccggcctccgccgcccactcgccgggggacgcccccggagtccccagagctgctgcagctagaggagatgctgtatttgcagtgcttggggtggctgttggaggacagctgcttggggttgatcttgacgcgcacgctgttgctgtccccgctggagtcgcagctcacctcggtgctgtggtgatgcagcagctgctggtggggtggggaagccatgttgtcgagtcccggggcctgccccggccggggtcaccagtacctgccagcaaaacggggagagttagcggcgctcccacctaggcatgcacgcctagaggcccgggacctgctcctgtcctaaggggcggctccagcacgcgacctggacaggcaccatctgttcctgtggttcccggctcagcggtgctcccaccgcccccaccgcccccaccttcgaggcgcacgagaaccgctcgggacggacctagaacgcccgggggtccccgccgcgtggccgccgtggctccgggaccgctttgctcgctcgccttccgcgcctctcgccccgagggtggcctccgcgccgcgcggcttctcctcctcgcgcgctcgcctcctccagctgcggctccggagggaagttcagaccttgagcgctcccagccccgcgagccgcctgcgcacaaacaactccgctggcggcgcggagccctccatcctgcaggagccgcgctccgatgcgtcaaaggcggcgcgcggccggccccgggcccggaccccgacccggagcagcgagcttcggcgggcgcccccggctcgcgctccccggccgccccccgcgctccgggccggccctgcccgcggcggcgggcgctgggggtgggggcgccccgggctgcgagtgcgcggagcccgtcggcgcggcccgtctagtggggcctgcttccccccgagtgcgccgccgctcccgccgcggccgcagctgtcccgggaccgagcgcgtggaaccacggacgcgggcccctcgccgggcggcggtgcagacgctgccgcagagccgggctcccgcgacgccggccgggacgcccgcccgcccgcgcccacgccgggggccgcctccccgagctagagatgcggccgccgccgcgcccgccgccgtgtcccccgcggccgctgcctcatgtcggaagagctgccgccgccaccatctccggcccctgccccgcccgctgtcactgacagacgcgcgcccgcgccgcccctcgcccagccgcagcgcgcacgcgcggcccgcgctcgccgccaccgcctcctggccccggacacgcgcacgggccgcgcgccgccccgccttggtgcgcgcgctgggctggggctgcggggcggggcggggcggggcggggcgcgcgctcggctccgccccccgccccgggcggcgccgcttctaggcggcgggctgtggccgctgtccgcgctccgggcgctgtgggcccgccctccctcggcgtcccagaggccgcgcgccgcccggggtcccgaccctgcggagagacctgaaggcgcctgccgtggaagaagccgctggccgcaacgtttgggaaatcaaaatgttgccttcccactcggcacgcctttgggataaatcgaagtttccaaccgttggatttccctcccgggaggctccccttgctctgtaagcaatgaatgcgggccccggggcactcggcctgccctggacctgctcacggggcgaccttcacgggcctagcctccaaagctgggcccaccgacgaccacgttcccccgccccaggggtagtttaccttgctgtccttgagcccttctccccctcctcatgaactactgcttttccttttacacaaatgagactttcaaaggagtccgcgtcccataatggcagttgtgcattggcctccataaacattgccacgtgtaaataaaatcctattctctctagcatgcagatcccgaccccttctccccacactccacagtgcctcctgccagtcacggggctctcttccatcccctccctcgcctcccaggcccagcgccggggcccacaccaggtctcactgttgaattagaaaataaaagtaaaatgtgatctgtccatgcaatggaatattattcggctacaaaaaggaatggagcaccgatgcatgctgcagtgtggaggaacccgggaaacgttatgctagtgaaagaagccaaacaaaaaaggccacatagcgtatgattccatccagatgaaatgtctcgaattggcaaatccgtagaggcgacacagattggaggttgccaggtgctaggggaggaagataagcagcttggggtttcgttttaggatgatgaaaaagtctagaaatgatccaacaggatgaatctacatactgcccttgaatcatacactttaaagtggtttaggccgggagcggtggctcacgcctgtaatcccagcactttgggaggccgaggtgggcggatcacctgaggtcgggagttcgagaccagcctgaccaacacggagaaaccccatctctactaaaaatacaaaaattagccggacgtggtggcacatgcctgtaatcccagctactcgagaggccgaggcaggagaattgcttgaacccgggaggcggaggttgtggtgagctgagttcgcaccattacactccagcctgggcaacaagagtgaaactccatctcaaaaaataataataaaataaaataaagtggtttaaatggtaaatgttatgttgagtgtattttaccacaataaaggaggaaaaaactaaaagcaacatattgtggtggtattcctgcagaagtgtgtaatctcaatccaatcgcaagaaaacaccagacaaacccagattgagacctgttctacaaagtgattaaccagtacccatcaaaagtgtccttggacactttgggtcttgaaagacaaagactga

SEQ ID NO: 1242578 - DNA, 4001 bp, Homo sapiens
caattcaccttagccccatttatgccttgtgttccattattggaacgctaagcatatgggagttatttatatcctactgctcaaggtcatggccaaggtctgattgcaaaaattcaaaaagattgcaacctcaggcataaatggattaattagccatggaccaaacccttcatccagataaggggtaacggacagggaccgcaaaaggagtacttaaaacccggaaaactttgtaactgagccccttcagcctcttgctcaggcccactcccaccctgcgtagtgctttctcgctttaacaaatcccagctgtctgcttccttcctgtgtgtcattcgtttgttactttctgggttttgttcaattctttgttcgaaacgctaaggacctgaacaacgcacactcctggccttccctctggtaacaggatgaggggcaggctttgcgtggaagtagcagcaagccctggagcctaaggcttatttgttagccaggagtgatagcccctgtgccacgctgcgtcctgcgttccccgcacttgctgtacaagattttcgaaagctggagtgcggctcttctctatttttcccaggggcaccaggacccctaaaagcgcccgtgtatgtgcctcctatgatagggtagcccaggccctgggataagagtatgtgtggtttcttggcttggtgacactcccaccccctccatgaaccctccctcctttgacggccacgtttgaaataaccacagccttggggttggtcccatcctttattcgagtttccttgcccctaccctagccccgaccctgacgttggccagctaggtgcggctgcagggattcatggcagtacccagcttgcggcagtagcagaaggcattgaagaagcggcagtagcacgtggcacatgggtcacagcaaggcacctgctgtcccaggcaggactcatgcagccttacgcagcgacgtgaggagcggggctcgcggtcctgcaggtctagtacctgcaggggtggggaaccagcacaggcctctaaagacagatccagggatcttacctgtcccaacctgtgcaggatggcagtggagcatgggaaggggtggtcggtagtgtcgtcgctggtgagggagtttggagctggggagaggagctaatacccaatgccccctcccaagggccaccaccttacccttttccctgagcagttacctctgccaaggcctgagcctcctgcaacagatcctcttctgcctgttctgcagttgtcttcttcagtggggcccgcaggcccaggcctggggcagaggatgtgagggcaggaacccccatgcacaaagcacccacctcccaggggagggtttgggaagggagaaagagggtttatgccaggggagactatttgtggccagagggtattcaggccccgcccagtcccacccttgctcacactgacctgggagctctgggagcagggcctggtcaggccttctgatgccctccatgggggccaagcccatctgggctcctcgcgtggcaggcagtgccagcagcagggcacagctcagcaccgctgcggtcagcatggcctggctcagcaggaagatgtaccacttagtccctccttatccttggagtcccctctaggtgcccagatagagaccccacagagaggaggagtccctgcccaacctgaggactcacctctgcctccgggattcttgcctagagagttcccggccaccccgtgcccttggcttatatggcagggcctaatgaagggccacacgtgactgatccctgcagccaggccgtgaaggacccttcctggagggtgggggcacagttcaggccctcactccctgaacctgagccttttgttctacaagaggagtgcctatctccaatttggggtgaggtttccaggagccgattaaaatttgggagcaagagagggtgcccagggtccacaaatttccacaggacagggacctaggagctgagcagggctagaaccattagcaataacaaggcaggcggccctgaaagcttaatttaatttgtggccccagagatgcttactcaacccctatgtggcatgttgtttcctgtgcttccaagaattcgggtcaaggacattggagcgggtgatgggccaatggccactgttgggcaggggtaggtgcagaaccagaacctgggtttctttggagggaaaggggaaggaaaagcccacctaaccaatcctaggccctcctgactacatttctggtcctcccctccctttctccctccaggtttctccaagaccgcccactcctgctcctgtccccaaacccctttctgcctagggttcctggaagccaaggaaacagaacgaactgttccctgggtgggcgagccactgcagagtacaaagctttcaggccgcctgcctcattagcactaatggctgctcccttccgccctgtgtcgtcaggactgtctatgcctggtctcatcagcacaaggctggggtaaggactgcccttttgtggagatggcaggacatacaggaccctgctgcccctgccttccctcaccccactgcagagctgtttatcacacacgtgtccatctgggaaaggaatgcaggctgaatcagctttgagaggatcgcaaggccccagtgcacaaactgggttggcacaaggcagtggaaaaaagatgaagggggccaggtatggtggctcacacctgtaattccagcattttgagaggccaaggtgggaggatcacaaggccaggggtttaagaccagcctgggtatcatggtgagaccccgttgctacaaaaaataaaaaaatagctgggtgtagtggtgcatgcctgtagtagaggctgaggtgggaggatggcttgagcacagggattcaagagtgcagtgagctatgactgcatcaccacactccaggctgagcgacagagcaagatcctgtctcaaaaagaaaagaagataaagggtggccaggcacggtggctcacgcctgtaatcccagcattttgggaggccaaggtgggcggatcactggaggtcaggagttcaaaccagcttggccaatatggtgaaaccctatctctactaaaaatacaaaagttattcaggcatggtggcacatgcctgtaatcccacctacccgggaggctgaggcaggagaatcacttgtaacacgggaggcagagactgcagtgagcagagatcgcaccactgcactccaacctgggtgacagagtgagactccatcttaaaaaaaaaatgctatttaaaatgaaatgaagcaatccatactcccaacatttatatatactgggacatccaagaaattaaaatcacacctcattatgtctttttctttgagtcagggtctcactctgtcacccaggctgggcctggtcagcacccatgctatggagagctcttcatggtctggtgtggacagagtgggagtggaagatctcctcccacacaggtgctcagtgtcttacctcacctacgggcagcagctgtcttcacctgagtgtgtgcacacaggtgtatcagccccatgggcagtgatggacgagggctgaggcactcacagggcagcccatgccccggtcaggtccagtgggggagatatcaagaaaacccagcgccaaaatgcaatgagctgtgatcgcgctactgcactccagcctgggcgacaaagcaagttgccgtctcaaaaaacaaaaacaaaactaaacaaaaaaaaaaaaacggccaggtgtagtgattcacaccttcttgagcccaggagtggcaacatagtgagactctgtctctaccaaaaaaaaaaaatttaattagctgaatgtggtgatgcacacctgtagtcccagctactcaggagacagggaggaggatagcttcggcccaggagattgaggctgcagtgagccatggtggtggtggctcacgcctataatcccagcactttggga

SEQ ID NO: 1242579 - DNA, 4001 bp, Homo sapiens
cctttccaccctgatccaggctgcagagacctacaaaacaacagtcggttcacaagtcccagaggaaagcttgctggaggttggaacgaggagcaatccctctgggccccaaacttttcccgcgttagagagaacaccgaaaaggtccagaactgcgccctccagctccccgcgcgcaccctgagccgcgtctgattgctgtgcggcgcctcctagccgcgcccccgccccgcgcacccccgcccccgctcagcaccccgggaaccccctccccccgcgcgcccccgccccgcgcaccctcccccggagggccctcccctctgcgcgtggaggcttttcctggagactgcgccgcgggtctaacaccttcatttcgtttttaaaaagctcttgagtctggcccgtccctggttccgcccagagccctaaaatagaggcttcgagtctggaggtctgggagaaagggagctagaccgggaattgatctgagaagcttggggtggggggaaggcggattcctctgcttcccaatcctggcatctgcgcccagggatgttggagccaaagggaagtggcttcccctcctgaaatataaggggcgcgctaaagggttcccaggatcccttccaactctaaattcctgcgatgcctggggctccggggaggtattttgcggtagtcagagtccgaagatcctagaatgtagtttgagctggggctaaggacaggggattgaaaagtcgaggcggtggacctggcgcaggatgaacaagactgggagacttccaacagtttcctcctcgacaagcaggtcacaggacaatgtctggaggacttctatccccctttcttgtttctgccaccccctcccctgcagctctgcactctctctagtcccgccttcctggccctcgttcagcctgttttagtttagaatcgctgcccggtggtcactcaaggctgctaacctctgctgtaaggaattaagcttccaagagcatatctaagaaggagggcggaaggaaagggaccgagtgcctccacatgtcaggacagaccatgaaagagaagccaggaagtccaacaaaaccagcactggtctttattgaggtgtcagggtagagtggcaggagcacagcctaaggacatgaaggtcagagtttctcagagaggaggggctgggtccctgagctaggaggagggcggtgggtgactcgggagctcatgagacttcaggaagtccctgtacttggccaggaaagggttggccagagtgttcagctcttgccgaagctcctgcagagccttgtctcgctcttggggctcccctgtcacctgctgcctgtaatagttgatgtagaagttcatccagtcctccaccacagtcaccatgtcttcttcagagacgagaggatcattgaagacctggggggttgcggagaggcagttggcaagggagaatgtggtcagcaatgggattcgggaatactagaatagtgccacagcaccaactctcacattctctttcctctgcattgtatcccgtgtctctcgttgtttccatcaactccaccattacttcaccagctccaattatcctcttcctccacttccccggcaccccccagtctccaggccagtcctttgaaatggaaagcttggactcacctgctgattcagcagaacgctgaactccttcaatcctgcggaaatgagatccttattggccttaagaagagccatctgcctgggtagagaaaagggtagaatttacatatctgtttccctcctcactgggtatttcccccaacccacttcctccccttaaaaatccctcctgccctgcagggctatctcctttccaaaacctttcacatcctgccctgctctgaggtcacgattttcccaggttgggctcaccttcaggtctaacaggctgtatatgtctcacccacactcttgagggtgcgtgaatctctctgtgccaagctatagatgtaggcaaggagtcaagtgtcagcctaagatagaaacgccctgcatctaggtcctgaaggagggtgataggtcattctagggaggagaagaagggagaggcttccctgaaggtagaaagataacaaggccaaaaaaaaaaaaaaaaaagataaatgaggaaacccaggaaatgcaagaaggcaagagccaaaccaggggcatgttcctgctttttgccccatatttcagtatccaggctcgaaatgctatggaaattgacgtttactgagccctattacatgacagaggcttttgtgtaatcacaacgatgtgatcgcaatgattctcccaattcggagatgatgtattaatagcagcttgcattacatttattcatttgtgccaagcactgtttcaaacatgtacaaaatatttatcctataaaatttctttttagacacattttgcagataagccacctgtaagcgtgtggactgaactccaccacgctgtgctccataagaatggagataaatagccgggcgtggtggcgggcacctgtagtctcagctacttgggaggctgaggcacgaaaatcgcttgaacccaggaggcagaggttgcagtgagccaagatcacaccacagcactccagcctgggtgacagggcgagactccatctcaaaagaaaaaaaagaatggagatggatttgtcttgtttactaccctgtcaacaggtacccaataaagcagaaatactctttttcctctttttaaatatttttccagatattttccattttcagtagatgtttctcaaatttcaaaatcactatatactaattgaaataattaaaacaatacaaaaacgtacactgaaaaactgaatcatttttgccccctccaaagtaaccagcattaaacattgtatatttcctgtcactttttttttccattcaaaacccaacattcataggtgcctatacactcataaagctttgttgatttgcctttttggttgtagcattttttaatcaatatacagcaaaactgacttccttttggtgtacagtatattaaattttttttttttgagagggagtctccctctgtggcccaggctggagtgcagtgatgcgatctcagctcactgcaaactttacctcccaggttcaggcgattctcctgcctcagcctcccaagtagctgggattacaggcgtgcatcaccacgcctagctaatttttgtattttagtagagatggggtttcaccatgttggccaggctagtctcgaactcctgacctcaagtgatcgacccaccttggcctcccaaagtgctgggattacaggtgtgagctaccgcatctggcctagtttattaattttataacagatttgtgtaactacaaacgcagttaagatacagaatgtttctgtcacccaaaaaccactccttcacgttacccttttgtagccacccctaccctcacccataacttctggcaaccacttatctgttcatcactacagttaagcctttttcaggatgtcatataaatggaatcatacagtatgtaacctttgagactgactttttttggtcagcatgatgttcttgagctccatccaagttgtcacaagtgtcagtggacacattgcattgtatggatgcactgtagtttgttcattcagccacggaaggacatctggattgtttgtactttggggcaagtgtgaatagagttgctataaacatttgtgtacaggtttccatgtgaacatgttttcatttatatagggtggaaagtatgtgttaccggccaggcacggtggctcccatctgtgatcccagcactttgggaggtcaaggcaggcagatcacttgaggtcaggagttcgagaccatcctggctaacatggcgaaaccccctctctactaaaaatacaaaaattagccagacatggtggcatgcacctgtaatcccagctacttgggaggctgaggcaggagaatcgcttga

SEQ ID NO: 1242580 - DNA, 4001 bp, Homo sapiens
acatatagaaactgcaggatcatgtacttaaggaactgccaagcaatccagacaaatgcaacacaggcacgcaagagagacatttcacaagtacagatcttccagccgaagcttcaagtcgtggataagaaagcatgtctcaaaggtcataaagtcagtgggtcatttactaaaaatacaaagaagcaaaggaaaagcagccaagcccagctgtaagaacagcaacttccctgccctggtatttccccccaggctctgttacctttaaagcagagctccttctctgaattcctacttgcaccaatcaaacggctgaaggtgaaaagggtcaaaactaagcaacgttttcctaatttcttaaacagatcatgagcaaaccatgtactaaatgtccccaatcagcaataatttgtcttctctgacgagcttgtgacatccagggacgtacccaacccaggtcatccataccttgccagtgcccattactgctgttttgttttccaagagaaaatgccacccagtaattaaatcagaggaatgaagatcctggctcttctactagcatggataacatgcaataagtaacaacagttctccgcaaatctgcctttaaaggtgagtatgacacactgaatatacttgagatatcaaaaatgtgcgggggcatgttcccctttggctcaaatgaagacactgattttcagatctagcagtaatgtgcagcaccccagtgtcctctaggacacacctaacacgggaccggatcccttgggacacagtggtgtgctccacaacatacatttaatgggctggtgcaaacctgtaaagtctcttaaaggtctaacgcgttaggattctctttaagaatccagtaaattttgtccccagttctgcctgtcattaagcaggaggtattgtcttctgctgcctaactttgctatggatcttttaatccaatgtttccagcagcaacataatcacgagaaactgtagcacacttttcagggtctagtctaggacaagcacagcatacatgttctgagaggaatgacatagatggaagcaagacatgttacatccttgtcacttggaaacaattttagaatttctgcctgtttggccacggctgcattcctttacatcacccagctgagaagtctgggtcttcagcctgcgcgaatgacagtgcgtggcagagctaaaactaggctaaaacatgagtgctgctgttactctacatgccacagcgcactcacatcaccccgaatcggacttaagaaattacacgttaagaggagacagagcaggggccagaaaaaaaaagatgaaaacggcccgggccaggctcgctggggacagccgggacccgcggcggcctcggaccggcaccctcaccgcgggcggaaacccgtctctgagcactcagggaatctggacaaacctgtctcgaggtgatgcaaggcgggggccctgtcctggcctcgcagctagctcgatgctggcccgggagccgcgggcccctccagtgggggggctctggggcccggcgacgcccccttaaccagagctcggggtcgggacccggccggggagggcgggcacgggccggggcgagccagctgggcccccctctccctcgggccgggccagcccagctccagccgcagtccccagcagcagtcccgggctgcgaggcggccagcgcagcaggtgcctgcaaacgcgcacaggtgcccggccccgcctccgtgtcccactgcggccgccgtcgccgagtcgcgagcgcctagaaagatggacaaatgccgggcccgtggaggctggcggccagatttacagacacctcagccctcgcgtacccaccagcctgccgggcagtaagcctcaccccagtgccttcaatgcagagctcctggctgccaagcgccgccgcggcccgacagcatctcccgccgcagcgccagccctgcccctgcttgatccccgccccgccccaccccgccctgccctgccctgccctgccctcggcagcgggctccgccccctgctgcacgatcctggggcccgaggcttccgcctggcctcccggcgccaactggctctcacacctgcccgtcaaagacgttcttccgggggcgttgggaagaacacactcggtcctgcaaatcaaatcaccccggtttgggtgggactgcacttgaccctccccttacgtaacagcgcctgggacggcctgtcagtcatggaagtatcggccccccggggagggatggggcagagacaaacaagcgccgggtcacaattggccagggcgtctgccagtcaccacggagaccttcccggaggtttattcgcacagcccacagcgcaaccgccatgcgcaggggctggggcatacgctaacgtctgcaagccaagcttttggggagggccgggccgcgcgactgcccagtggctcccatcgctaggtcctactgcgttgggcggcgctgcgaggcccgaggccgccacgtcgggcccacagggtaccaggggtcagaaggacacttggcgtggcatcaagaaacgcccgttctctccatcagtgcaggagctgaaggctggagctgaagggagctcagctccaagtgggccctgggcactagagcagccagaggagctttgtaaatctgtgtgtgtcggccccgacctgcagcatccgagtgggggccgggggctggggggaggggggaggctgaggaccaggaatccacatctgtcacagttcgctgctgattctggcgcacactgaagttggagaacctctcccatagcaacatagttcctggtctttttttttttttttttttttaattcacacgctctcatttggacctcccgtctgctttcccatggaggtctctctctggcctaattctgtgactgctgccagctgctttccaggcctgttcttaccaacggtgcctccccgtggttagtccgtccaatctcggcactccacttccacacttgcgcgacagccctctccccgcaagcccctgccccttttctagacaccagaggcactgacctgtctgtgacaccgcctcagtgtcttacactcagaagccgcattctctggccgggttgtttggtccatttttggttgcctctgagattctggtaagtgacttattaaagggcaggaagccaaattctcctgatgttaatcccaagggttggttctgaaacccagcttcctcccctagctgaaaacacttctgagccacttccttttgtccccttaggacacatttaggaatgttatcatgccttttaatacgagtcttaatacagaaaggcaggcaagcaggaaatccttttttcaggccacaggtggtctcctttggcacctctgtggcccatttcctcccaatcttctttgaagctcattatcctctgcaaagctttttttctgctttcctcctttccccaaccttcagttttcaccgaggacccacataggtatttctccagctcacatctatccactgagcttccaatgcatgtcatcaactgcgtacttggcaccggatgactcagacgcacaccagcatcagactgcacatggcaggaaagccaactcaaaccggcttacttagcaaggggatttctctcccatgggaggattgtctccagaggtggtgccctggtcttcaggctctgctttccttgcagtccctggaattgcactttcaggctggtagcaagatggccgcggcacacccaggatctcacaaaattaaaagtatccctttcttccagtggtcccttttgaaatacatgactacctttcccagaagctccgcagaagaaatgcctgcaggtttcaatggccagaagtaagtctctggccacaacgaaacccagtcaacggcaagtggaaggagtccgccatgatcgacttgggctgagattttccctagatctctgcctggactttaggcagaggagagccatga

SEQ ID NO: 1242581 - DNA, 4001 bp, Homo sapiens
ttggctggggacaggagaggagggaccccctggtaccacaaaacggatagatgcaagggctaaatgtcaagtgtctcagggtaagagcctgcagatgaagggacaggttaccgggattcctcttccccagagcccaccctttatccccgaccagacccctcaccagcaggcagttcctagtcagcaggactagacccagcagcaacaaatagatgcccacagcgatgaagacgatggcagggatggggagcagcaggggagggctgctgacaggagccggggttggattccacgggctagaggaggcctggacgagtacaggaggaaggggtgacaaggagatggagaggggctgcaggaacacgggaataccatgagggacgaggaggtggctgggagaggaacggccaccagatggtggggagagcgtcaacaggactacaccctgactcattatcttgtgccctgagcctgcctttttccctatcattcccagttcagcaacatcaagcacttcagcattctagagtcttctagggctgattttccttctggaatgcctctccaaagagatctcttgtctctgactcccttgccactcctttaccatccctcagcccacattaccggctcctgtcatccaacctgcaattttgcccctttccacaccagatgtccttgtgtagtatccctccctcccttacaatccgtcaatggctcccagtaactcacttaaaactttttctattatttattttattattattattcttattgagacggagtatcactgtcacccaggctggagcagtggggcaagcttggttcatgcaacctctgccacccgggttcaagcgattctcctacttcagcctccctagtagctgggattacaggtgcgcgccacgacgcccagctaatgtttgtatttttagtacagagggggttttgccatgttggccaggctggtcttgaactcctgatctcaggtgatccgcccgcctcggcctcccaaagtgctgggattccaggcatgagccaccgcacctggtcaatttttttagagacagtgtctcactctgtcacccaggctggagtgcagcggcatgatcatggctcgctgcagcctcgagctcctgggcttaaacgatcctcccacctcagtctcctcagtagctggaattacaggcgacagccaccacgcctggcacttaaaatttatgtcagtgacaaaattcccaatttagccctgcctacctctctccctccccctcttccaaacacacgatagccctagcagttccccaaatgctgcagcctccctctcacccccagactgtttcctctgccggaaatgccttttctcgtggattacttagtcaactccttatcttgccaggaataccagaaatgtgccctcccgtgggaagtccattcctggactcttcctgacagctctcgtcctgagctggcaggttgtagtctctgttgggtagaagccccctccccagtccgtgctggaagacaggcccattcggggttaggagagggcgctgagggggcccagagaggggaaggggcccggacttacgtccatggggaagggcagagccagtcagtccgggagctgcagaaggaaggttctgggtctcagaggctgagaggcaccgttagaccggggtgcccaccctccttccctttcctgtttggggaaactgaggccatggctgggccggagggtggaattcgggaaggggaatggggggcgggggatccgaggcggcgccttcctcgcaggctccagcgcgccccaggccactcccctcctcagtccccacactccgggcttccccagtcggtcagcacccatcacctgcaccctcgggccgcgggcaattcacggattccgcgccaagctaggtccaatcgtccgagggaccggccccgcccagaagccgttcgcggcatcccgctgttgccatggtgaccagagcggtgtttgtacggcggctgccgaggcccaaactccctcttcccgcctcgcgcctccctcttcccgcctaagcttcaactgtcaccggctctgcgccgccgcggccctcggggctttctcgcggggagcgaaggggaagagcgaatcccgccgccgcccgcctgggtcggatcctcatcagatgccggacgttggaggaggcaccgggttctggggcgccacaggaggattgaacccccaggctacacccaccacttggatgtatctccggccaagccactgagcatctgcaaaagggagaaacgcctgccgctcagggatattgtaaacatcaatgctactttttatattttatttatatttatttatttatttatttatttatttatttatttatttttgagacggagtctcgctctgtcgcccaggctgcagtgcagtggcgcgatctcggctcactgcaacctccgcctcccgtgttcaagtgattcacctgcctcagcctcccgagtagctgggattacaggcgcgcactaccacacccggctaatttttgtatttttagtagagacagggtttcgcaatgttgaccaggctggtctcgaactcctgacctcaagtgatgcgcccgcctcagcttcccaaagtgctgggattataggcgtgagccaccgcgccgggcccggttcttttttactgatttatttattaattgatttatttattttttggagacagattttcgctcatctcccaggctggagtgcaatggtgtgatcttggctcactacaacctatgtctcctgggttcaagcgattctcccgcctcagcctcccgagtagctgagattacaggcgactgccaccacgcacacctaatttttgtatttttagtagagacggggtttcaccatgttggccaggctggtctcgaactcctaacctcaggcaatcccgcccgccttggcctcccaaagtgctaggattactggcatgagccactgtgcccagcctttttttctgaatttttagagatgtggtcttgctatgttgttaaggctggtcttgaactcctgggctcaagcagtcctccagcctcagcctcccaggtagctgggattacaggcataagccaccttcagtaggatctgctgaagcttcctgaaccagtgtgtagggtctcacatttccacagctttgcagttgctgatccctctgcctggaacaccctctgtcttcccctcaaacctcttcctcatccctcaagcacgtcctcagttttgcctctgtgaggtctccctgccaacctcaggcagaggtggctgctttggactgtgaattcccacagcatcctacagatactgttgttctcgcacttctcacaagatacttgaattcctcacttccatgtctggctccacaattagactgcaagtgtctggggcctggtctgagtcatctccgtatcctgagctctagtacttggcctagccctgggagccttggtgaatactcactgattctttttctttctttctttcttttttcttttcttttcttttttttttttttttttgaaacggagttttgctcttgtcgcccaggctggagtgcaatggtgtgatctcagctcactgcaacctccgccctggattcaagcaattctcctgcctcagcttccagagtagctggaagtgccaccatgcccagctaattttgtatttttagtagagacggggtttgtccatgttggtcaggctggtctcgaactcccgaccttaggtgttctgcccgccttggcctcccaaagtgctgggattacaggtgtgagccactgcgcctggcctgtttttttcttttaataaagtagacatggggtctcactatgttggccaggctagtctccaactcctgcctcaaatgatcctcccacctcggcctcccaggttgctggtattacaggccagagccactgcactcagccaatactcactgattctatgaatga

SEQ ID NO: 1242582 - DNA, 4001 bp, Homo sapiens
actgttcctacggggcaagaacgtggaggagcaagcgccttcccctgaaaaatgctcccgtcgcttcgcatggctgcagctgttccgggctcagaatcaaggtcgcccgataaggagagacagggaaagtgttaagggggcatcaagcaccgcggaggggtttccctcctcgcgaagggcgccccgtttcccaggacagaaaccaagctcccacttgcgagaaccctggggctgtacatgggccggcccccacccctcactgcctcttaggatccccgccagggctaaggggccctaatcctttgccacaggggtccctgcaagaaaagggggagaatggtccttcatctcgtccggcttcctcccccgccatgactcagcgcgcgcagccgctgcattgcgcagttagaggacctcaggctggaggggccggggagcctgtgtgtgcctggtagtggggagacgctggcatgggatgggggaggcctccacgcggacgcccaacccgccactgcccccaagatccctctccacggtccctggtccccgcacgtgaagaggggcgctcacctggcacaggagaggggcgggtgtgcagggtgcggcggcagagggcggcgggctggcgagtggattcaaggagagaacgcgggactcgtcaccaggaccccttctgcggcgcgttccgagaggaacgcagccgatttagcctcggaaggggcggcgcaggaggcgggcaggcggaaggcggcgcccggccttttaaaggcaccactccgccctccgccgagctttttcctttacgaggagcgggcggcgtccaatggcaggcgacggactgggctacgggccgcccccgagaggcgcagcccagaggccgcgctaggaaggggcgggcgccgagaacacgatccctccccacccccctcggacgtgactcggaccacatcccgcgggtcgctagggccctcccttctgctcctttcccccagcctggcgcgctctggggcgccgtgactcagccagaatgttggcaatgggggagggcggaacggggaagtggaggacgcggatggaaaagtcggaaacgaaggaagctgagtttcgcctcccaggcccagcgcgcgcggcccggggccgccccagcttccggtcttcgcggctgcagcgcgtgtcaccataggggccacatcgcgcagtcgtgcgttagcctgcctcgcccgcgggctgaatcggcgcggagccgacaccctgtcactggcccaggcgtaagggaggcggaggaaagggcatcgagaggacacgcagggagcgcgagaaggcggcggaactagcggcgcgcggaggcgagacctccccatccgagttccaggctggcaggccgggctgggtcgcgcatgcgtgcgcgctctccgccgggccgccgcagccaggctggtagtcctctgcgccacagaaaaccagaatgcgcggctatgcaccggccgctgctcggcctctggcatgcggggtcacagttcctgccaaacgtcttccttgagcctgacttccttctccaaaagaaaatccgtccccgaactgatctgcctcccagatgctgagccccctgctcctatcgtccaaatctcccctcctcacctggaccccatctggaccctgttggcccaaccccaaccccatccccaccccggcccggtcctgcaaggggcccacctgcggcgaggccgaaggagccggcagagcctggtcagcagcgagtgagctaggggttcccgggctggttataaggcagctcctgcccgccccacatgtgtccccgatcttctctaatgacccctgcccttttcccgccacggatcctctggcagggacctatatttagggaaacctgaagcccctgacattcacactatcgtggggcccggcatgggggaagggggaggaagacttgggtcggccctattgatggggagggagcccctgcccactcaccggtgcttcagaggaaattcttccttggaaatccagacggaggcccttggttgtcaagagaaataaatctttggccagggacctgtgggaaggaaaggggtgaggggactcggatcacgtggcctccctgccaccctccctggctccttctctaatctccctcctcccttgactccctgcggtgatggtggctgttctgattctctggagccctggttttttttaagaaggagagtagatactggcactacactcacctcctaaaataacggagagtccgtggacggagtgtggttgaggcacccctgcgtacccggtactcaagggccagactcctcctataacacttgtgtgtggtgagcagcgccacccccctgcccaacttcaaatagaatcgttgacgtgtggaggggaagggaagccagggcacctgcccgagcactagcccctctcttttctggccctccagaggagctgccgtccagccggccaagagtcctgccctgcagggagccaggccctgcgctgccacttccagttcccaggcctgggtgctcggcaggccatctgtggttccagtggcgtggggaaaggctcttcagggaggagggcacatgggccctgggggctggccgctccccagagggcaggggccctgggtcctcatcggagcttgatctcgaagcagagacagttgaggctctggcagtcggggagctggcacgtacaggcacagtcgcagagtgggcagcagcgggggcagcgaggtgcccagtcctgagggaggagagagagggttgagggaggtgggatggggccacgtctgttgctctctaaggggagaagggaacagagaggcctgggaaatctcacttgcccagtggaacagagggtactgtccatcattcccaggaacagtgcaattccctgtgctgttgaaaaatcagcagtgagtccttgttctgaacaactgagttcagaagctagaagcaatgattcagggttctctccttcccattttatgggtgaggagactgaggaccagagagcaactggccctgggtcccgtgctagaatttgggcctcccggtgtcaagctcaaaagatggttctgctacagtcccggggtctgtgcagttgaggcagtagacagagaaagcacacacatttttctgtccatcatgaaaatgacttgtgggctttatggacttcttcagcatgagaccaaaatagagggtctcattcaccatttttgagcatctactctgtgcaacgaacagaccgcattcatgaatgattttaaaaatctttacaggtatctttgaaaatggcaatttacctatttttaattttttttttttttttgagacagggtctcactctgttgcccagggtggagtgcaatggtgcgatcttggctcactgcaacctccacctcctgggttcaagtagttctgcctcagccttctgagtagctgaactacaggcgtgagccaccacacccagctaatttttgtatttgtagtagagatgggggtttcaccatgttggtcaggctggtctcggaactcctggcctcagatgatccacctgcctcagcctcccaaagtgctaagattaaaggagtgagcaactgtgcccggccatttttttttttttttttccgagatggagtttcactcctgttgcccaggctggagcacaatggcgtgatctccactcactgcaacttccacctctggattcaagcggttctcctgcctcagcctcccaagtaggtgggattacaggcatgtgccaccacacttggctaattttgtatttttagtagagacagggtttcgctatgttgaccaggctggtcttgaattcctgacctcaggtatctgcccgccttggcctcccaaagtgctgggattacaggcatgaaccaccgtgctcggctcattttttgtacttttttttttttttttttgagacggagtctcgctctgttgccaggctggagt

SEQ ID NO: 1242583 - DNA, 4001 bp, Homo sapiens
ccctccccttaccttgatgcccacaacaccgcccttggatttgataacttgggggaagggacgcccatcatccgccttctggtagagtgtctcatggaagaggatgacacccccaatgcaggggttcacgcggtcgtcagctgtcagcagcagctggcggtagaagcgccggttctcctcggtgttctcggtgccaatggactgcagccgcttggcaatgctccctgggagtgtcacatgggaattaggggatcagcctgccactcccaaccctgcaccctccacccattctgtctcctgcccgcaccagtggactcatctgcagccaggatgcccttgccaggtgccacgatgcggtgagcgatgtcagacagctccttcttctgctccggggtcagtgctggatattggtagggcatggtgctggtagtagcaagttcctggatacaggaaacagaggggaaggactagttagctagggtttcccatcatctcccgatgaccagggcccctctcctggaggtcagggaaatgttccctacctcccctgccccacacccagcaggccctggggcacttctggtccccagctctctcttacgcccaacttccctttgctaggcctgcccctgtacctttcctaactctgtctggtgctgggtgttgcccagctgagggtggagttgcccactggcaactgggggaaaggaaaaggccatagccatggacaggtgggtcatgttgaagctggacccttctggcttgcgccttgccatggggtcaccttgcctgaaaacaaaaccgaaccggagtattttagaatgtaaagatcgtgaatcaagcagagggcccaacaccctcgtgggaaagggcccagatatgggaaaggtctgtgcttcaagccacacagcaaccccggagccagatctgagattagaacccagctcttctgactgccactggggtgttccttccaatcccctcaagatcccagggctggcccgggctccaaggcttcaaggacatcccaaggtcaggcttttccccacaagggagggggcgggtggtaggaaaggggcattaggaaaaatataagagagcaaggagaagcccaggaaagggcggcggaacaagccctagcccgaggcgaggaaagcggtaagctttgccatcgtcactgttcctacggggcaagaacgtggaggagcaagcgccttcccctgaaaaatgctcccgtcgcttcgcatggctgcagctgttccgggctcagaatcaaggtcgcccgataaggagagacagggaaagtgttaagggggcatcaagcaccgcggaggggtttccctcctcgcgaagggcgccccgtttcccaggacagaaaccaagctcccacttgcgagaaccctggggctgtacatgggccggcccccacccctcactgcctcttaggatccccgccagggctaaggggccctaatcctttgccacaggggtccctgcaagaaaagggggagaatggtccttcatctcgtccggcttcctcccccgccatgactcagcgcgcgcagccgctgcattgcgcagttagaggacctcaggctggaggggccggggagcctgtgtgtgcctggtagtggggagacgctggcatgggatgggggaggcctccacgcggacgcccaacccgccactgcccccaagatccctctccacggtccctggtccccgcacgtgaagaggggcgctcacctggcacaggagaggggcgggtgtgcagggtgcggcggcagagggcggcgggctggcgagtggattcaaggagagaacgcgggactcgtcaccaggaccccttctgcggcgcgttccgagaggaacgcagccgatttagcctcggaaggggcggcgcaggaggcgggcaggcggaaggcggcgcccggccttttaaaggcaccactccgccctccgccgagctttttcctttacgaggagcgggcggcgtccaatggcaggcgacggactgggctacgggccgcccccgagaggcgcagcccagaggccgcgctaggaaggggcgggcgccgagaacacgatccctccccacccccctcggacgtgactcggaccacatcccgcgggtcgctagggccctcccttctgctcctttcccccagcctggcgcgctctggggcgccgtgactcagccagaatgttggcaatgggggagggcggaacggggaagtggaggacgcggatggaaaagtcggaaacgaaggaagctgagtttcgcctcccaggcccagcgcgcgcggcccggggccgccccagcttccggtcttcgcggctgcagcgcgtgtcaccataggggccacatcgcgcagtcgtgcgttagcctgcctcgcccgcgggctgaatcggcgcggagccgacaccctgtcactggcccaggcgtaagggaggcggaggaaagggcatcgagaggacacgcagggagcgcgagaaggcggcggaactagcggcgcgcggaggcgagacctccccatccgagttccaggctggcaggccgggctgggtcgcgcatgcgtgcgcgctctccgccgggccgccgcagccaggctggtagtcctctgcgccacagaaaaccagaatgcgcggctatgcaccggccgctgctcggcctctggcatgcggggtcacagttcctgccaaacgtcttccttgagcctgacttccttctccaaaagaaaatccgtccccgaactgatctgcctcccagatgctgagccccctgctcctatcgtccaaatctcccctcctcacctggaccccatctggaccctgttggcccaaccccaaccccatccccaccccggcccggtcctgcaaggggcccacctgcggcgaggccgaaggagccggcagagcctggtcagcagcgagtgagctaggggttcccgggctggttataaggcagctcctgcccgccccacatgtgtccccgatcttctctaatgacccctgcccttttcccgccacggatcctctggcagggacctatatttagggaaacctgaagcccctgacattcacactatcgtggggcccggcatgggggaagggggaggaagacttgggtcggccctattgatggggagggagcccctgcccactcaccggtgcttcagaggaaattcttccttggaaatccagacggaggcccttggttgtcaagagaaataaatctttggccagggacctgtgggaaggaaaggggtgaggggactcggatcacgtggcctccctgccaccctccctggctccttctctaatctccctcctcccttgactccctgcggtgatggtggctgttctgattctctggagccctggttttttttaagaaggagagtagatactggcactacactcacctcctaaaataacggagagtccgtggacggagtgtggttgaggcacccctgcgtacccggtactcaagggccagactcctcctataacacttgtgtgtggtgagcagcgccacccccctgcccaacttcaaatagaatcgttgacgtgtggaggggaagggaagccagggcacctgcccgagcactagcccctctcttttctggccctccagaggagctgccgtccagccggccaagagtcctgccctgcagggagccaggccctgcgctgccacttccagttcccaggcctgggtgctcggcaggccatctgtggttccagtggcgtggggaaaggctcttcagggaggagggcacatgggccctgggggctggccgctccccagagggcaggggccctgggtcctcatcggagcttgatctcgaagcagagacagttgaggctctggcagtcggggagctggcacgtacaggcacagtcgcagagtgggcagcagcgggggcagcgaggtgcccagtcctgagggaggagagagagggttgagggaggtgggatggggccacgtctgttgctct

SEQ ID NO: 1242584 - DNA, 4001 bp, Homo sapiens
gagaaccctggggctgtacatgggccggcccccacccctcactgcctcttaggatccccgccagggctaaggggccctaatcctttgccacaggggtccctgcaagaaaagggggagaatggtccttcatctcgtccggcttcctcccccgccatgactcagcgcgcgcagccgctgcattgcgcagttagaggacctcaggctggaggggccggggagcctgtgtgtgcctggtagtggggagacgctggcatgggatgggggaggcctccacgcggacgcccaacccgccactgcccccaagatccctctccacggtccctggtccccgcacgtgaagaggggcgctcacctggcacaggagaggggcgggtgtgcagggtgcggcggcagagggcggcgggctggcgagtggattcaaggagagaacgcgggactcgtcaccaggaccccttctgcggcgcgttccgagaggaacgcagccgatttagcctcggaaggggcggcgcaggaggcgggcaggcggaaggcggcgcccggccttttaaaggcaccactccgccctccgccgagctttttcctttacgaggagcgggcggcgtccaatggcaggcgacggactgggctacgggccgcccccgagaggcgcagcccagaggccgcgctaggaaggggcgggcgccgagaacacgatccctccccacccccctcggacgtgactcggaccacatcccgcgggtcgctagggccctcccttctgctcctttcccccagcctggcgcgctctggggcgccgtgactcagccagaatgttggcaatgggggagggcggaacggggaagtggaggacgcggatggaaaagtcggaaacgaaggaagctgagtttcgcctcccaggcccagcgcgcgcggcccggggccgccccagcttccggtcttcgcggctgcagcgcgtgtcaccataggggccacatcgcgcagtcgtgcgttagcctgcctcgcccgcgggctgaatcggcgcggagccgacaccctgtcactggcccaggcgtaagggaggcggaggaaagggcatcgagaggacacgcagggagcgcgagaaggcggcggaactagcggcgcgcggaggcgagacctccccatccgagttccaggctggcaggccgggctgggtcgcgcatgcgtgcgcgctctccgccgggccgccgcagccaggctggtagtcctctgcgccacagaaaaccagaatgcgcggctatgcaccggccgctgctcggcctctggcatgcggggtcacagttcctgccaaacgtcttccttgagcctgacttccttctccaaaagaaaatccgtccccgaactgatctgcctcccagatgctgagccccctgctcctatcgtccaaatctcccctcctcacctggaccccatctggaccctgttggcccaaccccaaccccatccccaccccggcccggtcctgcaaggggcccacctgcggcgaggccgaaggagccggcagagcctggtcagcagcgagtgagctaggggttcccgggctggttataaggcagctcctgcccgccccacatgtgtccccgatcttctctaatgacccctgcccttttcccgccacggatcctctggcagggacctatatttagggaaacctgaagcccctgacattcacactatcgtggggcccggcatgggggaagggggaggaagacttgggtcggccctattgatggggagggagcccctgcccactcaccggtgcttcagaggaaattcttccttggaaatccagacggaggcccttggttgtcaagagaaataaatctttggccagggacctgtgggaaggaaaggggtgaggggactcggatcacgtggcctccctgccaccctccctggctccttctctaatctccctcctcccttgactccctgcggtgatggtggctgttctgattctctggagccctggttttttttaagaaggagagtagatactggcactacactcacctcctaaaataacggagagtccgtggacggagtgtggttgaggcacccctgcgtacccggtactcaagggccagactcctcctataacacttgtgtgtggtgagcagcgccacccccctgcccaacttcaaatagaatcgttgacgtgtggaggggaagggaagccagggcacctgcccgagcactagcccctctcttttctggccctccagaggagctgccgtccagccggccaagagtcctgccctgcagggagccaggccctgcgctgccacttccagttcccaggcctgggtgctcggcaggccatctgtggttccagtggcgtggggaaaggctcttcagggaggagggcacatgggccctgggggctggccgctccccagagggcaggggccctgggtcctcatcggagcttgatctcgaagcagagacagttgaggctctggcagtcggggagctggcacgtacaggcacagtcgcagagtgggcagcagcgggggcagcgaggtgcccagtcctgagggaggagagagagggttgagggaggtgggatggggccacgtctgttgctctctaaggggagaagggaacagagaggcctgggaaatctcacttgcccagtggaacagagggtactgtccatcattcccaggaacagtgcaattccctgtgctgttgaaaaatcagcagtgagtccttgttctgaacaactgagttcagaagctagaagcaatgattcagggttctctccttcccattttatgggtgaggagactgaggaccagagagcaactggccctgggtcccgtgctagaatttgggcctcccggtgtcaagctcaaaagatggttctgctacagtcccggggtctgtgcagttgaggcagtagacagagaaagcacacacatttttctgtccatcatgaaaatgacttgtgggctttatggacttcttcagcatgagaccaaaatagagggtctcattcaccatttttgagcatctactctgtgcaacgaacagaccgcattcatgaatgattttaaaaatctttacaggtatctttgaaaatggcaatttacctatttttaattttttttttttttttgagacagggtctcactctgttgcccagggtggagtgcaatggtgcgatcttggctcactgcaacctccacctcctgggttcaagtagttctgcctcagccttctgagtagctgaactacaggcgtgagccaccacacccagctaatttttgtatttgtagtagagatgggggtttcaccatgttggtcaggctggtctcggaactcctggcctcagatgatccacctgcctcagcctcccaaagtgctaagattaaaggagtgagcaactgtgcccggccatttttttttttttttttccgagatggagtttcactcctgttgcccaggctggagcacaatggcgtgatctccactcactgcaacttccacctctggattcaagcggttctcctgcctcagcctcccaagtaggtgggattacaggcatgtgccaccacacttggctaattttgtatttttagtagagacagggtttcgctatgttgaccaggctggtcttgaattcctgacctcaggtatctgcccgccttggcctcccaaagtgctgggattacaggcatgaaccaccgtgctcggctcattttttgtacttttttttttttttttttgagacggagtctcgctctgttgccaggctggagtgccatggcgcggtctcggctcactgcaacctccgcctcctgggttcaagcgattctcctgcctcagcctcccaagtagctgggattacaggcacgtgccaccacgcctggctaattcattttttgtatttttttgtagagacagggtttcatcatgttgcccaggctagtctcaaactcctgggctaaacccaccttggtctcccaaagtgctgggat

SEQ ID NO: 1242585 - DNA, 4001 bp, Homo sapiens
ccggcaggcagaggttgcagtgagccgagatcacgccactgcactccagcctgggcggcaagagcgaaactctgtctcaaaaaaatatatgtgtgtttgtgtgtgcgcgcgtatgcgtgcgtgtgtatactatagaaccacactgacgacctacgttcaaatcctgattccaccacttcctagctgtatggcgatgggctacttacagagcctttctcagtctaggttttctcatctaaatgagaacaaccttaagaaacaggttcttgtattacctacatgcaatatttcttagggtaactgtgaggactaaatgagttaatacatggaaaacacttgatacacagtcagtacaatgtaagactatctgtaatgacacagagagcatggataggtgccataaatagacacataccataggctcctactcatgtctttaaacgcccatacacacaacacacacacatatgaatatgcaatatagtaccaatttgtgctggaaagtaaactgctaacatggctctcacagagggaggcagaggctgatacacacctggagaaagatataggcacctggctccctccacatcaacttccacagcaagtacatagcctgaagtacaactttgactccgtactggaaaactcggggcccaactgcaagtcagaaaacacctgtgactaccaaaggagcgtctggcaatctgcacggcttttcaaacgaacaccccctgcccccagcccatggattcagaggattctggagttgacggcatcctacctgcaagactctgaagttctgtcaaccccacaatctgaattctgttgttctgcaagagctcatcatggggtttggagtctgaaaaatgagaatgatccctttaatgtaccagaagcagcaatctaaagtcagataatctcccaactcaggctgaatcacggacagtgttttggaaagtaagatatttcaaaacctctctctgctcctcactagccagaacagagaatgcggccaattcttgttcagattgctctaggaggcacacagagatagggcctgaatcttacctaccttcacttaacatgatgcctggcaaacagtaggtgctcaattaaactaatctagattgtctggatagtggaattttcccaccacagagccatccctaggaagtcccactctaccccatcaccctaggatagcagattctaaacagggattaaaggcaactagtgctgttcccacttcttcctgagatggggttgagctaccctctcaagataccaacgtggagaataatgagggagcagacaccgctgccctgcacactgtggggaaaagctggacatgaagaacaaatgaaaacatctgtctgcagagctctgcgttgagggatgaggaatgaaatatcctgtcagctcagacatagcctgacaagggtagctgcacagggacgtagctaccagcactagccctggagttccacgcacctgggttccacttactaggagaattacgtgagaccacgcaatggattcacttaacacacttctgacacgtggcaagattaacgccggctatacctagagacccacccaggaaaggctggggcagaaccgctcgtctaatctcggagagctgcccaaaggcggcgactaaaggagcacttccgcctcgactccccggggcggttagaaccgaggatcaacggctgagagagcatcgtccctcccagacccttggccactcactgcagaaccccaggagggtcaccgagaagccgtgcatggccaacgacagcgcgtggtactgcatacgggggctgcggcccacgtcgcccagcaccaccgctactacatgccgggccgcccgcccccggcgccagcgcttccatcctcccagcagcagcagcggcagcagcagacacagcgccagcaggaccaagcatgaggccgccatcttggctggcccgcagcagtcacgtgaccgcgcttcctcgcgctgtgcgcagccgcagaccgagcctccgaagtgggccgagagggcgagaagtggacgcggttccctaacaggggcccggggaacccccaggagcccctcggggccaagaattagtagtagtaggacacacgcacatacaccagattccctacacaccagtgtatttccccgactaaagtaaagctgttactgtattgggatctaagaactctcttcaggattcaaagataatttcaaaatatagtgacacaagaatttggataaatttcatcctaacattgataaaggagccagatgctgacgagtacgaattgtagagttccgtctatgtaaataaaaaccagtcctcgctgttagaagttaggggctggtgggttctgcttctggatctggtgctggtaatgtgggtgtgctgcatttggggcggtacctcaagcagcagattacctgcccattttccagggtgtacatcacacttaataaaacatttaaaaggtagagagggggaaggacaaacaaggaagtaaacaccatcatgattttgcttaagtatcaatggctagaaaggaaatttccacagtgaccctccaatttcacctcccaaagtagccatagtgagagtttaatgtgtgtctctgcgatggcctgtattagtccgttttcatgctgctgataaagacatacccgagactgagcactttacataagaaagaggtttcatggacttacaggtccacatggctgggaaggcctcaccatcatggcagaaggcaaggaggagcaagtcacctcttacatagatggcagcaggcaaaaagagagcttctgcaggaaaactcctttttataaaacaatcaggtctcgtgaggcttattcactatcacgagaacggcacgggaaacacctgaccccatgattcagttacctcccactgggtcccttccacacaacacatgggaattcaagatgagatttgggtggggacacagccaaaccgtatcatgaccttttttctttgaaagcggtcccttgcagagaaacaccaagagctcactggtgatgctaccccattgcctccacttgggagctgccgcagaacctggagagccaccacccagaccgtattcaacaaacaaacaagactcctcccctgatgaggaccacaggcagcacccacgggacagggtagcccacatggatgtggctccccagtgtccctgggctcagctcagggcttggcacactttgcatctgcttttcacaattgccccatcactccctttctatggattcagaagggacagctcacgccttaagccagaccttgaaacccgagctttcagaaggaaaggaaggacgagtaagtatctgcagacagcagggatgggcatacaaacatgctggcagcggcatttatcctccagttcccagcgaggcccctgcctccaggttgcgtgtgctggggtggaggcctgtgacacatcgcctgcccaactctgtcgacgctctgtaatgggacaggtagggatctgggacctcagcctcaggactcctggctttcctgctccacctcgggcgagtcactccccatcaatttgctttcttcgtctgtgaattaagggaggggaacttcaagtctttgagagcctgtcctgctctgatgagctaagaggataaagactatggtgatgacaaaccaaaagtagatgcctccctctggtaggtgaacctccgtcggggagggagttgccgtggtgtctcctggagagaggggacggagccatccccagcaggggggcggtttcatagctgggccagcccacctgtccggctttctcacttggcatccattccacatgagatccagtctttccaacaatcaagaggatatatggataagtcactcaatctcccttggagcctcagattttgttcaagttgactgagcacccacttgaggggtgatcaaggattaacagaagtaatgacaatgacaagc

SEQ ID NO: 1242586 - DNA, 4001 bp, Homo sapiens
gcccgtagtgccagctactctgggggactaagacaggaggatctcttgagcccaggagttcagaaccagcctgggcaacacagtgagactttctctacaaaaaatgttaaaattggctgggcatggtggcacacacctgtagtcctacctactcaagaggctgaagcaagaggatcgcttgagcagagaagaatgaggctgcaatgggctatgaccacaccactctactccaacctgggccacagagagaaaccctgtctcttaaaaataacaaaaactggccgggcgcggtggctcacgcctgtaatcccagcactttgggaggccaaggcgggcggatcacgaggtcaggagatcgagaccatcctggctaacacggtgaaaccccgtctctacgaaaaatacaaaaaattagccgggcgaggtggcgggcacctgtagtcccagctacttgggaggctgaagcaggagaatggcgtgaaccctggggggcggagcctgcagtgagccaagattgtgccactgcactccagcctgggcgacagagcgagactccgtctcaaaaaaaaaaaaaaaaaaaactaaacaaaaaaaaaaagcatgttggatacaacctactctcaaatagttcagtaaaaaacagtagcacaggtacagccaagaggagcctgaatagtagtaacatacagcaaaaagttaaccctgtagaacctaagtaaaaattaaaataaaaaaagaccaaggacaaccaaatttcttccgggcaggaaagaaaatggaagcgtggggcaagcagtacaggagcagggggagtctcttctggaaggcgtgttccactgagtcacacatcagacaggttagggaggaagagcctgaccagggactatcgctgtgccaatcacagaatcccctgcggccttggttaaggggatggtttctgaagcctggaggcagccagagtgcagtgcagggggtggggacggcctatggctcagacggtgctgagccagcagtgtggagacagctgcggaggacagagggtctagggaggccaggcagagcgacaactgataaagaagcacaggggcgggacccaggcccagatccggtcatcaaaggaggccagactcaggaccatggaatacgtgctgggggtggggggtggggcgtgagtttgaaaatgagggcgctggttgctccgggagccccctccacctcagccagggagcctcacctcaccttgtgataaacctccggtggggaagtgaccagggtggggcagaaggaggtgacgccgtgcgacaggatcctccgggccacgagggcaacccccgaacccacgtcctccgtggcttgagagaagtcaacaccaaatccacctgcagccacagaaaaggaagtgtcgcatggagctcagagctcctcccctgggttcccctgccggccccgggccgcaccgttgatctgcacgtcgatgaatccgggagccaagatgcggcccccgcagtcccgccgctcgtcggccacgcgccgctcctcaaagaacagcttctctgggtccaagatgcggcctccgcgcacccacagatcctccctggggacgcagtgggtgggcgctcgcatcgcgggcctgacctcggccccgcaccctgcaccccgcccggtccccggccccgcaccctgcaccccgcccggtccccggccccgcaccctgcaccccgccctgtccccggccccgcaccctgcaccccgcccggtccccggccccgcaccctgcaccccgcccggtccccagccccgcagtccccggcccgcgcccacctgagcagtttccctccgcgcaggatccggcagttagtgaactggagcacgcgggcccccgccgcgccctgctcgccgcgcatcgtgagccgtgtcgggagcgagcggctccggagccccgcggcggccaaatcccgcgcccagtgacgaaccccagccgagagctgagaccgcgcccacgtgaccttcagctgactgaagcggcgcgccacgtgaccgccgcgcccacgtgatcgagccagcccacgtgaccggcagcgcccggcgcccgcccgcccgcccgcccgcccccgcccccaacaagctgagcagacacaggcccgtcacatccaagaactttattggacacagctccgcgcagggccacgggcccggcggtgagggcggctccatccaggaagtctcagcaacaggaacccacaaggcgacactctagctaaggttatagatagctgggagacaagggccgctccgcagacgcaggaacaggccagatctttataaataaacatccagtaaagagaaatgacaattctaaatcatccgcatacacagagcactctagggggtggggcgccgggggcctggaggggcgatgagtgggcccagatgtccacggcacggggcgggcgggggcaaggccggggaaacagacgatgggcactaggacactgcgcatgtacaagaccaactactgggggcggcggccccgtgcgtatgtgtcaggctgttcgttctggaatgaggaggggtggtctttacataatattctgtggctggtgggctcggagagggtctactttgtggagaggatgagggcgacgatgagaccgtagaggccgagcacctcggcgaagatgagaatcaggatcatgcccacgaatagtcggggctgctgggcggtgccccgcacgccagcgtcccccacgatgccgatggcaaagccggctgccaggccgctcaggcccacgctcaggccggcgcccagctggaggaagctcctgggggcgagaagagaggactgacatcagcagcctgccaaccagggggagacaagggtccgggtcaccacccacaggtgaaccgcccccctccctgcagtcctccagccctgggcaggggcctgaccccagtgctcacttgtagaggctgatgtcgtcattcagggagttggcgatgaggactgccaccaccaggccgtagatggcgatgatgccagccatgaccactgggatgatggacttcatgatctgctccggccgcatgacagacatggccgcaatgccggtaccgctcttggctgtgccataggcagcgcccagggctgtgggaggaaggcggggtgagcccacagcagtacgcaggccagttgagactaggaccccgaggtgtagctttggcacagctccaagggccaccccaagttatcacatgcagagggggagccgaagaaggcatccagcccagggcaagaggacccaggaggaacagccacgggcaagcaaaaggaggccaggacagccactcctccttcctctacgtgaggcccccaccctcagagtccagctcttcctccagcagcagctcttggggcggcgtgacccatctggggctcctggctctgcagtgaacccacctgtcaccccagggagcctcagtgcagcctcagcagcccccatgtggggtcagggtcagtcgacccttggggctactgcccaggacaacatgctggaaaagccaccaaaggtcttggggatggcaaagccactgctacagggtgtgaccggagggtcagaagcagctgacctggccactcttgtcacccaggccagagctcccttgactcactgcccaggccaagctccccaacgctcccagccccaaatattaacctaggagggccaaacattctgccagaaagggcagctctcagcaccctcagccacacagcaggcctgaacccttgacagattggagaatcttctctaccagacaggagacagggtgagccaagaagaggatgggggcagagaagacgacggggatcatcaacagtccaactacgaggcctcagctgacctcccagagaggtctcccctgcacacggggtggctccaagcacacaggagcctggccagagggcccaagcctcccaccgcaacagtgctggtgggctgggc

SEQ ID NO: 1242587 - DNA, 4001 bp, Homo sapiens
accagtgttgttatataaataaaataagggttccttctcaaaggcttatttatatcttagacttaaaaaatatcaaagactacattataatcttaacatggcaaaaacactctccatatcactttgtttacctgctaactcaaatgcaaaaacagatttgaaattaagcaagagatgtgagttgagttctttcgcttctcccttctttaggactgtaaagttcagctttacacagcagtagataaacaggaacttcacccttcactgccttctactaaactctccatcagaaggaccaggagacttaatctacagcccacagagtccataaatcccaccgcttcctgatgaagcacagtgggactaattataacaaatgagttgcatatcatactatcaacttggaatattaatctctcagtcatttacagcccactttcaaccccaaatgggaacatgcaaggagacaagatccaagaagccatattaaatccaagtgaggctttaaatcctggagaaacttttctgatcactgcgggatttacataagtattcaaggccaagatgaaagcaaaattctctagccaaaataccgttgatctgatcagtctgaaattatctgttctaatgaacgaaaccagcatgtgtgccttatcaatgctgcttatctcgcaggggcagacaacctggaaactgtgttagaatagatcctcaaataagaaacattcagttaaaatgatgggctgcctcttgacactgtgaatgttttgctgcgttcagacatcaaaggaaaactgtcatgaacatcaggtaaaggcagcagaaaaggaagcacagtttggtgtttgtttcattacacagctcccaaaggggacaatcgaatactaagcggcaaaaaagttgtgggagacggcctctctccaaccggaatgtccaaagacacctgagtgccgaaaattcccccatactcaacgtctgaattctcccctctgccctctcctcttcgtcggaagaaaatccgctaacaatcccatgcctgaccaagtgggaaaagctttcaacttcactctacttcgtccaaccctcgggataacgcactcccagatcccgacctccccttgaacctgccctctgagatcttctagtttctcccgagggtccctcagaaaacccagcccgttcctccccactgccccttaaccccttcccctgccccaggccccgtccgcgccccagcgcagaccatcacccgccgcctccccgacccccttcccggagccctcaacgctggcctgcccctcggggcctcctcctcgcaaccccacgcgatgttcctcccgcccgcggccccctccccctccccgcgcctcaccactctccctcagcagcgctcccgcgagcaaggccgcgccccccaggcgctcgccctcgggggtccctggcggaggggcccctaggcccaccacgcccccgcggataaagggtgacgcagcggaccccgcccctgccccgcgggcccggccgcctcgctcacccacacgaagaggctgtctgagagcaggtactgggccacatcgcgggcccggggtcccccggcgctcggccgggcgggcgccggcggctcaggctgcagcgaggccgttagctggtccggctcgccggggccggcctcgggctggctgagcgcgcggtaggcgctgatgatggtgcccagcagggccaggccgctgaggcccgtgtaggtgcggaggctgggccaggggaagcgctcgaggaagagcagcggcatggcggcagcggcgacctctggcccccaggcttccctgcgctgcggccgggcctctgcggcggcctcgcgaacggcgcccacgggctctggcgtcgctgccgctgccgctgccgccgccgccgccgcgccgggccgggccgggccgctcctggctgctggcgccgctccgccccgcgctgctcccgctgctgcccctgccggcgcggaagagcctgggcgggctcgggacaggccgccgcccccagcgggacgctggcgggacgggcgcaggggcgcggccttcgtcccccgcccccagcggtcgcgccgccgcctagcgggcgtagccccgggcctcaggccggggggcgggcacccagcatcatccgccgtccgcaccacggcttggctgggcccgcagacacagagggcacctgctccggccgcggcgcaggggtcactcgggctcgcaggcgctggcaggcgggcagggcctcagggcgcggggcaccctggccaccaggccgtcggccacttgccccccccccaccccattaaccctctgaagaggttacccccagcactcctaggggccgcgcagcttccctggtgcccgaaaccccagaagaaagaatattaacagtctttcaagtttctgctgtttgctagtagcctccagcagaaactaaaaaatgaacctgatttagcgggaaataaaaatgtgttccctcataccccagaagtgagaatgtcaaatggtgcagctgtcttggaaaataacctgtcctttccttaaagtcaaacaagagtgaccatttgacccagtaattccactcctctaagaaaagtggaaacatacctccacacaaaacttgtacacaaatgttgattacattctaacaatcaaaagatgggaacaacgctaatgtccgtcaagcgatgagtggataaatgtgatacatccataaaatgtactattcggccataaaaatgaactactgatacatgctacaataggaacgaaccttaaacacgtgctaagtcaaagaagacagccacaaaggtccacgtgttgtgtgattccattgatatgaaatgtccacaataggcaagtacatatacagacacagaaagttgattaatgattgcttagggatgggaggaagaggggagtagggggtgataaagggtgcaggtttcttttaagagacagggtctgtggcccaggctagagtacagtggcatgctcactgcatcctccatctcctggactcaagaaatcttcctgcttcagtctctccagtagctgggattacaggcgtatgccaccacacctggctaatttttaatttttggtagagacagcgtcttgctatgttgtccagaccagtctgtggctcctgagctcaagtgatcctcccaccttgccttcacaaagtgcagggattacaggcgtgagtcactggctgggataggtttgttttcaaagtaatgaaaatgtaaaattgaggtgatgattgcccaactctgaattgaaaaatcattgtacactttaaatagttctatctcaatatgcgaattgtatctcaataagctgttaccaaaggaaaaaaatgttaccttgggagttttattccttttgcatccccagggcctgtaagagttctcagcccagagtaggtgctctgtaaatatttgtaggattttccaaactttctaaagaaaaggaccaaattatctttcaaggtctttttcatgcctaatattctaaaagtctattaactagaaaacaaaagatctctcaagcttacaattccactttggaaattttagaaacatcttgttaaagggtctttgatgaacgtttggctttaccgggacagggagaggccttacctttgcacacgtgcatttttttaatacaaggtctatatgaatactagacttgaattcactttggttctcttcccacagccatgcaattaaaatgctaaactttaaactttatcagtaaaataaaggaaagctttattttgaaaaactattgtaattttccagggaagtgttctactttacaggtcaagatctgagccaccataacttttaaaccactgactggcaatctttattcaatcctagccacagtagttctaaactgtcacaaaccaaatttgtcccatcacccttagaaacaggctgctgttaacagatctgcccttattaaacttttaga

SEQ ID NO: 1242588 - DNA, 4001 bp, Homo sapiens
aggtctcagagaaaccaaagaaacagcctcagggtctccgattttgaacgttatgccatagactaggtctgcacacaacaaaaacagtaactgtttcgatggcactttttccacaggtaatatcatcttatatgtttggctaagtctcaacatcccaaaaaggatcaaaagattctctaagttttgcagttcaacaactgtgcacacttttatttctcatttcaagtgttaaggatattgctctaatgactgcataaaactctctcctcatgtaagaaagcctgaaatctaatttctctaccataaaaccctgttcttgcaaaaggatacaaaactactcataatctacaaaaacgatgaatcctaagcatgttacatagaaggaaaacagtttcaaagcatagggagctgttagaccagcttcatcttcccaagcctcttccaaaacttcttggaagctgatatataacactaaccttccaaaaacacaacagaagcagaaaatcttaatggggcaccaggaaaagagcaagcctcgagaaaaatcaagactccccccgaccaaccttcccaaataacacaaacacaagagttaacagtacaatccctctttgagaggggactgaatcaatgtggcagggccaaccctacacacacacacacacgcgcgcgcgcgcgcgcgcgcacacacatacaccacacacacagctaccgccctgccaggggatgatgaaatgaggaacggaaattaacatttcaggcaacgtctcacattgttccttgaggccaagggctgctgttgcagccgccaccgccaccgctttcctcccagccaccccccacacccgcccgcctaccctccccctaacaccccccacacggctgcccgcattcctgcccctcctcggcctacgcgcgcctcctgcaaccccgacgcccccaggtccccagttcgccctccccctccggctcggagcccgagagccgcctgctctcatttcaaaacagcgataataatagggacgctgagaataacaactacgaccagcacggcgaaggcgcccctctcgcgggtcagaggtcggcgccccagctccgcagaacccggcgcccggccagcgccccctggcagcccctcccggcagcctcaggtccccaagacctgcaggcccgccccgaagccccccgtccgcccctcacggccgctccgagcccccgaggcccgccccggagccccctgtccgcctctcacggccgccccgggcccccacggcccccaggcccgccccggagcccccaatcggcccctcagagccgccgcgggcccccggccacccaggcccgcccggagcccccgtccgccccttacggccgacccaagctccgccgacctcccaggccccccccggagccccctatgggcccctcacggccaccccgggcccccaaagacccccggctgccccgaacccggacccgtaggcccgctccgggacccattattggtccctcacgatcgccccgggcccccaaagacccccgcccacccggccccgaccccccaggcccgcccggaggcccgcggcgcagctccgtcgccggggaaggcctgcaggccgcaaggccgcgcgaatgccccgtgcccgccccgaccaccgcccccagaccagcggcgcctctcaccgtgctccgagggctgcgcggctccgcgacggctcagcggcggggcgcgggcgctgcccatgcagcccgcggccgcgtttcccgggccgcgcggcccgagcggcaaggcggcggcggcggcggcgcgggctcgggcccggcagagctgcgagggacggcgggaggcgagcccgcccctcgggcgcgcccacggctcgggcgagagccgcggctcccggtgcggacgctactgatggggcgtctggccgcgggctcggcggcggcgcctccccggctggggccctcggtccatcgcgcaccgtctcagggcggcctctggctccaggacccagcggcggctgcggcgggagccggccgcatgagacgctcccgcccattggcccgccgtatccgccaccgccattggcccgccccggccggccgcaggggctgtgcacgtcacagcgccgtgagttagtgcgctaatggagtgaaggagagaggcgggattgacagcctctctggcggtccggaggcgggactaggaggacgtcccggtaacgattgggcagggtcctgcgtaagggcgcatgcgacactggaagtagcgagcaactggattggctgcctccgtcgcaaaggagggtgggtcttgcattctcgggcctgacgattggtctttccaagtgccggaagcaacagggatgtcgtctggaaacaaaatctggtattgaagcgcagggagacaaaacgtccacctctagagccgaggcggcggttgcctgtcgcgtgcccgtggtcttctgcctgcccccggacatctcgggccacgtccggcccggcctccggccgcgctgccctaacgggcgtcacggggcatgaagagctctgggcggctgcgaggggagggtaccggggcagcggggcggtcgctcggggctcccgcgcggtgactcttgctctgccgtcgaagagaacggccctcgggcgcgtcgcggccgcggctccagagcccctgggcctcgcgctctgagagcctgagccgcttgaggaggccaagcgcccacgaaccgcattccctgccttgctagttagttctccaacacgcgaaaaaggtagacgaggactggttttctttgcagctaaaatgaatcaagcctctggtaagtgtggatcctgttctaagtgcacctgtgttctcctccagaactaaaccaaaaagcaaggtgaacaaaatcggtgctccttcagtttcttctttagttctgcatgttactggggactaagacaacgggtaagcaaactatttataggcctcaatttacgaaataacggaattgcaaagtccggagtggataggaccgtgaggacggtcttttttcttgggcaacacgcattatggtcgagagatcagttgttaaaccgcccctgttcaaatcccagccctaccagtgactagcggtcaccctgtaggctttgtctctcagatcttcagtttcttggtgggtaaaatgggaactacaagtagcacctattcttttttttttttttttttgagtcagggtctcactctgtcgcccatgctggagtgcagtgctaactgcagcctcagcttcccgggctcagaggatcctcccaccttagcctactaagtaggtgggaccacagtcaggcatcaccacacccggctaattttttaaattttcgtagagataggctctctgtgtgtttcccaggctggtcttgaaatcctggactcaagcgaccctccctcctcagcttcccaaagtgctgggattagaggcatgagccacggtgcgggccaggagcacctatttcataggcccatcgggaagattaaatgaaggggctgtggaggctgtagcacggtgcttggcacgtatgtgagctctggggaaacattagttatgctataactggaccttcagccttctctaggcagccagatttcgggctccacccacaactagtcacgccattggatgaggggtgagcgcctgataaaaacagccggcgtatgcgctgatgtgcgttcacgaagaggtgatccaagtgtttccatatttgcctcactggacgaagtatttggtaaaattgacgaaattcagagtcctggaccccatcatcacctatggaattattctagatgagaggggactaggcattggcatttttttattttggtcccttacaatactcatcattgggaaaatttgaaaaacatcaacctaagccgtcatgctcgcactcgagaatgtttcccctaggctgattgacgggcagtggtattcacaggtgcggtcagcgcagtccagctt

SEQ ID NO: 1242589 - DNA, 4001 bp, Homo sapiens
gtgttctctatttactggagacttgcatatctgacatccccagaggtctgaaggacaatgagaaccagaccaagcgtgacggaccacttgaggccaggagttcgagaccaccctggccaaaatggtgaactcccatctttactaaaattacaaaaattagctgggtgtggtggtgggcgcctgtagtctcagtactcaggaggctgaggcaagagaatcgcttgagcctgggaggcgattgcagtgagccgagctcaagccactgcactccagcctgggcaacagagcgaaattctgtctcaaaaaaaaaaacaaaaaaaaaacactaaagtgaaaactaaaatgtcccatcccgagtggtgtggtgtaaagtagcattagagataagacgttttagttttcattcaactttttggttctgtccattctgaaaatgctaagtatctgttacctttacagtgaatcctaaagaaaatgtggtacttagacacaatggagtactattcagccataaaaaaagaatgagatcctatcatttgcaaaaacatggatggaagcggagatcgttatgtttagtgaaataagccaggcacagaaagataaatattgcatgttctcaattatttgtggttatctaaaaatcaaaacaactgaactcatggacatagaaagtagaaggatggttacttctagtgtaaccaaggctgggaagggtagtggagggtggggatgcttaatggatacaaaaaaaacagaatgaataagatctagtatttgatcaagccactgcactccagcctgggcgacaaagcgagactccgtctcaaaaaaaaaaaaaaaaaaaaaaagatctagtatttgaccgcacaacagggtgactatagtcaatataatctaattgcacattttatttatttattattattttttttgagacataatctcactctgttacccaggctagagtgcagcggcgtgatctcggctcaatgcaacctccgcctcctgggttcaagcgattctcctgcctcagcttcccgagtagctgagattacaggtatgagccaccatgccagcctagttttcgtatgtttagtagagacgaagtgtccccatgttggccaggctggtctcaaatccttgacttcaggtgatccgcccgcctttgcctcccaaagtgctaggattacaggcgtgagtgagccaccgcgcccggctgcacatttaaaaataattcaaagagtataatcatattgtttgtaacacaaaggataaatgcttgaagggatggagacccccattttacatgtgattattacgaactgcatgcctgtatcaaaatctctcatatacgccataaatatatacacctactacgtacccacaaaaattaaaaaatttttaaaaatcttaacaaatgtgatgctggtggtaactgtcacgcccacagaggaggtctgtgaaagcacccaggcaccccctctcgccccgtggaaccgcatcgcaaaggtagctcactggccccggggcgggtccctggccgacaaacccgtaactcacagcagtgacgcttcccgacgccccccggccacatccccacaggaacgctacggcgcacagggcattactgtgcccccaccacaaccacataaagaaaatgtgggggctcggtcctccagtcacgcggcgagcaagtgcagcgcgggacgcccgagcgccgggtctaggcgggctgcaggtgccggcaagtgctggggccgggccgccgcggaacccacctgtgctgggcctcaggccttgcgccgccctcgggctgccgtcgccaaccccccccaaacagctcgccgccacgctccctcgccggggcaccgcccccggcacccgccccggaagtagttgcgggagggcgcggagcacgccgggaagctcgcgggtcggcaccgggacagctcccgggcgccgtggaatgcacacgtcccgcacccggaccttccggtcagcttcccggctcgctgtctgatgcccgcggtagccaatgagctagtggtgtttgtcctgctccgtccccgccctccaggggaaccaatcccattgcaggagaggcaggacgcgcaaaggcccgaaagaggagctgggcggggtggggggaaggcggaggcagtctagtaatgtaaagctccgctgagagggagagtgctgaagaaggggacagcctctgtacctgcggcgcggcccgaggggcggacgcgagcggagtgacgcgctggaggctgtttatagcgctgtcaggacagcgcggggagtggaggcagaggcctgaggtgaggggcctcgggcctgctgcgcctgcagggagttgaacaaaacgcggggaaatacgggctgggggtgggtgagaggaggagcgatgggctttccacttccacagctttaaaatttaaaagctcgacccgggaggctgttggcgtctggttgccataacaaccggcagcctcgtggcaggccggctgggggcggggctctgagaaccggggcggggctgtggcggggctaacaggctgcagctgagaaacccaccccgagacggagccggaaggccgttattcagaggcggctccgagcctccccttcgccttctggatgctctgagctcctcaacttggcgttcagggccctgcattgtctggtccgttttcaccggagagtccagcaactgacactttcttcccttaaacctgttgggcggttcattcctttgagctactgtacatgctcttccttctgccggtaatgccgttccctcccctattgtcttgtccgcctgaagggtttatcagagtctctggaggccctcttcatcccgacgattctgttgccctaagaaatactgtgccctgaattgcggaacagagctctagttacaaaaaacacccgctggctgtgtgcaccagatgcgtccccaacccgctgctcccagttcagagtgcaccaagcacctgccctattcccagaagtacagaggaagcaagcagcccccaattcacatctcctgccgctgccctgattggggatgaacgggcactgactgcagggccaaagccacagcggcctctcgagctgcagagttctcctgacactggctctagaggaccctcaccccccagctctcaagctcaagctccccagccccctgaataacaggaccatctcctttaagactctaagatataaatgcaggggctggtcagagtagtgactccaaaaaaaaaaaaaaatcacttagtgactccaaactgtcagccaggcgcgatggcacatgcctgtaatcccagcactttgggaggctgaggcaagaggatcacttgaggccaggagtttgagaccagcctgggcaacagggagactccatctctacaaaaaataaaaatgttagccagatgtggtggtacacacctgtagtcccagttattcaggaggctgaggtgggaggatcacttgagctcaggaggccgaggcttcagtgagctatcattgtaccactgcactctagcctgggcgacaaagccagaccctgtctccaaaacaaaaaagcaaggtgtcttctgttccttggtaaagggcagtaaagggtagtaggacttgaaattccccctgattcagagtccactgttgctatttactaaacaccctgagcctatgaaatgaagagaatagttatgctatatggggtatatataaaatatacctatatatcattatatatcgtacatatggcattctatataacatgtacatatatctacataggtatatttatatcaatacatatatttgtatattattatgtatatatcactatatacattatatacctgcaggctccacatgtgtgcatgagtgggaacacacacacacacgtacacacacagtgcctggcactaacaggagcttgcataactagaaggaaactgaggcaggtggtgaggcctgccagcctgttt

SEQ ID NO: 1242590 - DNA, 4001 bp, Homo sapiens
tggagccaccacctcttcagctagcagagcccaagatcgtgcagtgcccttccctcactttgcaggtgagaatcccaccctaacagccctggccaacgaagcctggataagaaaccaaacgagctgagggtcagttcagagtcccttccatacctccctcaagccttcactgggcatgtctcttccacgccaaaggcctcctgcagggtgaggccgtgttctctatttactggagacttgcatatctgacatccccagaggtctgaaggacaatgagaaccagaccaagcgtgacggaccacttgaggccaggagttcgagaccaccctggccaaaatggtgaactcccatctttactaaaattacaaaaattagctgggtgtggtggtgggcgcctgtagtctcagtactcaggaggctgaggcaagagaatcgcttgagcctgggaggcgattgcagtgagccgagctcaagccactgcactccagcctgggcaacagagcgaaattctgtctcaaaaaaaaaaacaaaaaaaaaacactaaagtgaaaactaaaatgtcccatcccgagtggtgtggtgtaaagtagcattagagataagacgttttagttttcattcaactttttggttctgtccattctgaaaatgctaagtatctgttacctttacagtgaatcctaaagaaaatgtggtacttagacacaatggagtactattcagccataaaaaaagaatgagatcctatcatttgcaaaaacatggatggaagcggagatcgttatgtttagtgaaataagccaggcacagaaagataaatattgcatgttctcaattatttgtggttatctaaaaatcaaaacaactgaactcatggacatagaaagtagaaggatggttacttctagtgtaaccaaggctgggaagggtagtggagggtggggatgcttaatggatacaaaaaaaacagaatgaataagatctagtatttgatcaagccactgcactccagcctgggcgacaaagcgagactccgtctcaaaaaaaaaaaaaaaaaaaaaaagatctagtatttgaccgcacaacagggtgactatagtcaatataatctaattgcacattttatttatttattattattttttttgagacataatctcactctgttacccaggctagagtgcagcggcgtgatctcggctcaatgcaacctccgcctcctgggttcaagcgattctcctgcctcagcttcccgagtagctgagattacaggtatgagccaccatgccagcctagttttcgtatgtttagtagagacgaagtgtccccatgttggccaggctggtctcaaatccttgacttcaggtgatccgcccgcctttgcctcccaaagtgctaggattacaggcgtgagtgagccaccgcgcccggctgcacatttaaaaataattcaaagagtataatcatattgtttgtaacacaaaggataaatgcttgaagggatggagacccccattttacatgtgattattacgaactgcatgcctgtatcaaaatctctcatatacgccataaatatatacacctactacgtacccacaaaaattaaaaaatttttaaaaatcttaacaaatgtgatgctggtggtaactgtcacgcccacagaggaggtctgtgaaagcacccaggcaccccctctcgccccgtggaaccgcatcgcaaaggtagctcactggccccggggcgggtccctggccgacaaacccgtaactcacagcagtgacgcttcccgacgccccccggccacatccccacaggaacgctacggcgcacagggcattactgtgcccccaccacaaccacataaagaaaatgtgggggctcggtcctccagtcacgcggcgagcaagtgcagcgcgggacgcccgagcgccgggtctaggcgggctgcaggtgccggcaagtgctggggccgggccgccgcggaacccacctgtgctgggcctcaggccttgcgccgccctcgggctgccgtcgccaaccccccccaaacagctcgccgccacgctccctcgccggggcaccgcccccggcacccgccccggaagtagttgcgggagggcgcggagcacgccgggaagctcgcgggtcggcaccgggacagctcccgggcgccgtggaatgcacacgtcccgcacccggaccttccggtcagcttcccggctcgctgtctgatgcccgcggtagccaatgagctagtggtgtttgtcctgctccgtccccgccctccaggggaaccaatcccattgcaggagaggcaggacgcgcaaaggcccgaaagaggagctgggcggggtggggggaaggcggaggcagtctagtaatgtaaagctccgctgagagggagagtgctgaagaaggggacagcctctgtacctgcggcgcggcccgaggggcggacgcgagcggagtgacgcgctggaggctgtttatagcgctgtcaggacagcgcggggagtggaggcagaggcctgaggtgaggggcctcgggcctgctgcgcctgcagggagttgaacaaaacgcggggaaatacgggctgggggtgggtgagaggaggagcgatgggctttccacttccacagctttaaaatttaaaagctcgacccgggaggctgttggcgtctggttgccataacaaccggcagcctcgtggcaggccggctgggggcggggctctgagaaccggggcggggctgtggcggggctaacaggctgcagctgagaaacccaccccgagacggagccggaaggccgttattcagaggcggctccgagcctccccttcgccttctggatgctctgagctcctcaacttggcgttcagggccctgcattgtctggtccgttttcaccggagagtccagcaactgacactttcttcccttaaacctgttgggcggttcattcctttgagctactgtacatgctcttccttctgccggtaatgccgttccctcccctattgtcttgtccgcctgaagggtttatcagagtctctggaggccctcttcatcccgacgattctgttgccctaagaaatactgtgccctgaattgcggaacagagctctagttacaaaaaacacccgctggctgtgtgcaccagatgcgtccccaacccgctgctcccagttcagagtgcaccaagcacctgccctattcccagaagtacagaggaagcaagcagcccccaattcacatctcctgccgctgccctgattggggatgaacgggcactgactgcagggccaaagccacagcggcctctcgagctgcagagttctcctgacactggctctagaggaccctcaccccccagctctcaagctcaagctccccagccccctgaataacaggaccatctcctttaagactctaagatataaatgcaggggctggtcagagtagtgactccaaaaaaaaaaaaaaatcacttagtgactccaaactgtcagccaggcgcgatggcacatgcctgtaatcccagcactttgggaggctgaggcaagaggatcacttgaggccaggagtttgagaccagcctgggcaacagggagactccatctctacaaaaaataaaaatgttagccagatgtggtggtacacacctgtagtcccagttattcaggaggctgaggtgggaggatcacttgagctcaggaggccgaggcttcagtgagctatcattgtaccactgcactctagcctgggcgacaaagccagaccctgtctccaaaacaaaaaagcaaggtgtcttctgttccttggtaaagggcagtaaagggtagtaggacttgaaattccccctgattcagagtccactgttgctatttactaaacaccctgagcctatgaaatgaagagaatagttatgctatatggggtatatataaaatatacctatatatcattatatatcgtacatatggcattctatataa

SEQ ID NO: 1242591 - DNA, 4001 bp, Homo sapiens
ccttaaccctccttttcctttatctgcccacatccagtcaatcattattgattctacatccaaactgccactcaaatccaaccatatcttcccattcccaatgtcactaccctagtccaactcatctcgaccactaaaacagtccccaaacattctctccgactgttatccatctacctgagtgagttttgtaaacataaatctactctggcagcttccctacccaagacatggcttcctgggcccttaggataaagtccttaccagagttgacaaggctctttgtgatctggtcttatctcttatacttgtcctgaccccactcctacttgaaccacatccagccatactcagcttctctagttctcagaactagagcagttttccatcttagggaaaacactctttcgtctagccaacttgttctcattttcctaatcccagcttaaatgctttccccttagggaagccttccctcacccctgagattgaggtagatgcctatttagtgccctctatttccctttttgtaacaaatatcatagatgagccaggcacagtggctcacagctgtaatcccagcactttgggagaccgaggctgtcagatcgcttgagctcataagttgaagaccatcctgggcaacatggcaaaaccccatcactacaaaaagtacaaaaattgctgggcatggtggtgcacacctcttgtcccagctactcgggaggctcagatgggaggaccacttgagcctggggctcaaggctgcagtcagctatgatcttgacactgcactccagcctgagtgacagagtgagaccctgtctcagagcaaacatgcacacacacacacacacaaatatcatagatgtcttgtcttcccctctcaaatctgctcactatgacagggactgtggctgtcttgttgatcacagtgtgcccagtggctagcaaaatatctcttatcttaagagataagtggctggcacataacaaatactgaataaatgggtattcaattggattcacttggctcctttatttaccttgtccttttctctttctttacccctcttgggttacggttgccaacacaacctagccctctgataacaggcagaacaagcagaggaactagcttactcctccattaaaatctgggcaaagagatggggtgtgtgtgtgtgtgtgtgtgtgtgtgtgtgtgtgtgtatctatccactagccaaagaagtgatagagttaagataggctaaagagtccttgtagagccagcaactccattcaaaagagcaagaccctgtgtcaaaaataaaaaataaaaaaatcatgagcttgcactgggattgaaagttaataaaagactgtgagattttgatggcatagataaaaaaaaaactaaaaccatgtcatttgttccaaccaaggttggcaacttaaaaccaagtaaaacaatggcctctttgaaaagagaaaactatttaaatttcatgaaaagcatttttaaaggcatagaattaaaatatcttccctcttccccatgcagataatgccgtagttcagggtctctcctctgattgtggctaagggatgagccactcctatagtgccagtcctcagtgagaaaagagagcatctctaggcatagttttctctctttctctaaaaatccaatcatttagacaatctagaaagaggataaagtatttgtattgacgtccctgcctcttgctgctgtctgcaaaaacctaccatgaacactgtttccaacagaaaccatcgggttgaacttaccctctactgcagattatctctagggcttccaagttcccatggtaggctgccaagagagtaggagtcatgccgtcttcatccgaaagatttagatctcgcttggtagcctcttttagaagttccaggtaactatcactagcagcttggtggtaacgagtagacatttttcctgctcaccagaacttggccagatgtctctccaggcagagcaaggtgttggcggagcaaccttcctatagagctggttaattagtgacaaggaagagtgtcaccaggggcaaagctcatttcaactgcttcctttcacggaaggcaacaaggttcgaggcactgaacttggaccttttctctctggaatggccatgacgttgactattgaagactgctgtattcatcttgagtgtttggaggtacattcaatttttctatgtccattagtttcttgagtgtaatattggccatctaggcacaggatgtaagaaataatttcttaataaaatgcagagctactctagttcactagctgttttttccaaaaagaacagctttattgaggtataacatcattaaatttacccatttcatgcatacaattcaatgatttttaggacatttatagagttgcatgcccattatcataatccagtttccatcagcccttaaagatccctcatgccatttgctgtcaatcccatttccactcccaacctcaggaaaccacagtctgctttctgtctctatagatttgttttttacgggcatttcagacaaatggaatcctacaatatatagtctttagtgtatagcttgtttcaattcacatacttttttgaggtttgtcatgtgtagcatgtaatggtttctttcttttcactgctgaataatattccactgtgctaacataccacatgttcttcatccattcaatgtttcatgaatatgatgaatatttgggttgtttccatttttcagtaatgatgaataatgctgctatgagcactgatgtacaagtctctgtgtggacacatattttcatgtgtcttgcgtatatatcaaggagtgaaactgctgggttgcatggcaatttacatttaaatttcagaagttgccagactgttttccaaagtggctgtactacttcacatttccaccaataacgtatgagggtttcaatttctccacaaccttgccagccttattattgcctatctttttgtttatggtcatcctagtggatatgaagtggtcttattatggctttaattttcaatttcctaatgactaagatattgagcatcttttcatgtgcccattagccattcttacatcttctattcaaatctttttgcccaatttttaagtggttgtcttattaataaattataagaattatttatatactctggatacaagtcctatatcagacatatttggaacagaatgaaaatgaaaataccacatatcaagatttataggatgcagttaaagaaaagcttagggcaaaatttgtagttttttatgcatatatgagaaagaaaaaagatctcaaatcaataacttaaacatattatcaataactcaagggaaggagaaaaagtatagaaaaatgactataaggagtacaatataagaccaaaaaatttccagatctgtaataaaaacaaaagaaaatggactaaatttatgatgtggaagactcagccatgtcttgtttataatagacatatctaaaatataaaattgcagaaagattgaaagcaaaaaatggaaaagttatagcaagcaaatactaacaaaacattggtgtacccacatagatggtctgcaacttatgagagtttgacctaatttttcaactttatgatggcacaaaaatgacaggtatttagtatgcttctcagctcacaactgagttattatatcaacttatggtggttttgcattgtaagttgaagagcacccgtattggtagcaaggaaaaatatagcttaagccaaaaaaatttactaggcataaagagagataatacatgataatgaaaggaacaattaatcaagaaactatgatcgttttaaacttgtataaattaaataacacagctgcaaaaaagggaaagcaaaaattaaacagaaaaaaaaaaacaaaaccacaatcataagggaagatttcagacatcatcataatgttctatatcagactaaagattg

SEQ ID NO: 1242592 - DNA, 4001 bp, Homo sapiens
ggtgattcaatcacactcgcctaacttgaaacgtaggaaatgtatcagtgaataactgtgaaatactttttgccaggcacggtggctcacgcctgtaatcctagcactttgggaggccgaggcgggcggattacctgagctcaggagttcgagatctgcctgggcaacatgatgaaaccccatctctactaaaatacaacaacaaaaaattagccgggcgtggcggcgtgtgcctgtagtcccagctacttgggaggctgaggcaggagaactgcttgaacccgggaggcgtaggttgcagtgagccgagaccgtgccactgcactccagcctggagacagagggagacttcgtctcaaaaaataaataaataaaaataaagacatactttttattcaagcatgctagactgcaaacatgcctttagaataaaagtgacgagattacgagtacttagagggttcatatttttcaaacgtgaaagttagggtgtgtgacaagttaggtatttgacaagtattctagggaacggtggaagtgaatatttaaaattcagctatccccagaaaaacccaatacatgaaatcattacaagtattttttagaatcagtcagcaaagatcattactgtacaaacacttcaaagttaaggtcactaagaaagcactaactcctcccttctgttaactaatcactgtaaagcagcccaactctcctttctacctacctcagattaatatttttctccatggacagatttccgtgctcagggatatataataggggagaaaaaaaaataccacacaagtgtcagtaagcaccaaaaagctaagtattcagcacagggagggaatccacatatgagaaaacatttgacagctcttgcctcccaaaagccatttaatctgcttcataaacataatctgcttcataaacattaccctgagcgagtggttcgatggatctcctacaccgagtcctaaccgggaaacacaatcaaccgaaccgtcccgactctttcaggcaatcaggaagaccgggagaattattagacgctgacgtccgcagggccaggagctgagaaaagggtaaacagtatactcgcaggtaggttgaaaaaaacaaaacaacaacatatacacacacacacgaaaaattgggaaagaagttggtcggaaggttagagagaggcgaggccgatgtccggttccgagaggacggcactgcaggggcaggcagcgattaactgggcatttggatatgctgggagttatctgacagacctgacacgggtacaagacacaagaacgctgatacgtggctcagagaagacacgcgggggtggggcccgccccgctaaaccccaggctccctgaatgagccctcaaagatcgcagcctgagaaagtcaagggttcaaggaggcccgtaccggcggggcaacgccacaacacggaacgccgcggcgcgcggaacctcccggtccgaggcctcggggtcggccctccagaagtcggagcagcccctggggctcccggcctctcctggcccagcttctctgtcttctcttctcaacacccacagcctgggactggacccctgaaactgaaaggaagcttccggtcgagcgcccgcggcagcggcggggcaaaagcagcaatatgctctcagcgccgggagtgacactcaccggcccgaaacctcgaatgaaaccagcagctccgggggcggcggcagcagtggcagcaggaaccgaacatccaaaatggcggctccctcggcctcaccaccgctaccgcaggcggagggatcctgaggaaggagggagtttttaactaacttcacacactattgaggaaacttcgctccctgtcctcctctcctggtcgtttccgtgtcctcgtactgcaacttatcgtgccttttctctcgaattatccaagaactcggaccctgccgaggactatttgccaaggaggaggcgactgctcctggcagagcgacgcaaacgtagcaaggatcggggctgtcactgatgacgcgagacgctgctgccgagtcaccgctgcgatgagtctgagcgagaaagatccggcctaccccgtagcggacggacattggttccgcttggtgagggggtaggggggtggggggtaggggggtgggggggtagggggggtggagctgggctaccaggaagcggtggagccacctggagggggcggagctaagtcaggtagcccaggaagtgagagcaagcgagacaggtgggggcggagaagacagcagggctgaaaaggtcttcgtccacgggaatcccgaactctttgctgtctcctttaagatttttgctttctttataacttaaggagcatgctccaggtggtattctatggttttatggtgtctttgcaacatattttatgaagagttaagaggatgactgaaaagaatggattccacgcccggtaccgcggtgcttgcactgctcaagtcacttaaactctccagggattcaatttcctcatatgtagaaagaagacttggactcatgttagctgaaacccttacagaatgggctttcggtctatgactccatgaattaataaccagggccaaagaaagtctaaccagacagttcctaacctgataaataattactaacatatgacgtgagtcttttccatgtgaatgtaaagagggcctgatatcttggcctgtttaaaggaaaggtgacctacctagactaaaatccttctgctagattggcaacaaagtacaatacaacacagcagcaggctgggtgccaaagagaacagaaccaaccacacaaaaaaaattttttttttttttttgagacaaagtctcgctctgttgcccaggctggagtgcagtggcgggatcccggctcactacaaccttgcctcccggggtcaagcaatttctcgtgcttcagcctcgcaagtagctgggattacaggctcccgccaccacggccgtctaatatttgcatttttagtagagagagggtttcgccatgttggccaggctggtcttgaactcctgacctcaggtgatctgcctgcgtcggcctcccaaagtgtggagatgacaggtgtgagccaccggcctggccagaactaaccacaaatcttgagtttaggatttgggtgtcatagagagaaggttgcacttttttccttagtcattttcatgcagggatttcaaaacacttaacaaaaattgctctaagtaggccgggcacagtggctgacgcatgtaatcccagtactttaggaggccggggtgggcggatcacctgaggtcaggagttcgagaccagactggccaacatggtgaaactccatctccactaaaaatacaaaattagccgggcatggtggtgggcacctgtaatcccagctactcggaaggctgagacaggagaatcgcttgaacctgggaggcagaggttgcagatagccgagtctgggcgacagagtgagaccctgtctcacaaaaacaaaaaaaaattgaaccaagtaggcccatctgtacaattttgtccctgaactactggggcatgccaagtggctggaaagaaaggaggccatgggtgcgataataattatcatttgtattattaaatattgatatcacattgttcataaggcactttcatgtgtataatctaatctgaccctctggacaacctcctgagtcaggctaggcaagcataagtaacttagttttacaaataaggaaaaagaggctccaagaaactaacttggctaaaagacacatcctctcccctcctccactggggttctgctacagagctatagagtgcctttttttttgagacagagtttcactcttgttgcccgagctggagtgcaatggcgtgatcttggctcactgcagcctccgcctcccaggttcaagtgattgtcctgcctcagtctcccaagtagctgggactacaggcgcatgccaccacgc

SEQ ID NO: 1242593 - DNA, 4001 bp, Homo sapiens
ctcctcccctgtgagctcctcctcaggcctggcctctggagttgcctccaagtcggcagtgccttcagcctctccatctgagggcagctcagccactggatccctgctgctccctctctcctcctgggcctcctctgcctgtaccagctcttccatcctggcccggtcggccctgatccccaagtcctgcctcatctcagcctccttaccacgcaggtctacctggccctcaaagctctcccctgcctcctggcctcccacagcttccctccctgcggtctggctctcagcagcctcttctgttctttcagtgcccaggacctggggctgtttggggaaagggctcacctcagcctctctctcctcatccccctcctcctctaggacccagacttttccagtagcctctaggagcctttctcctgggactgctccatattctgtctgtctgactcccagcaggtcagcctcctctttgcctgaggttgtccaggcctcgtcccctcctgaggctgtcccggcctcctcccctcctgaggctgtcccggcctcctcccctcctgaggctgtcccagcctccccgcctgaggctatcccggcctcctcccctcccgaggctgtcccggcctcctccccgcctgaggctgtttcagcctcctccccgcctgaggctgtctcagcctcctccccgcctgagattgtcctggcttcctccccatctaaaattgccctggcctcttccctacctggggttgtcctggcctcctctctgcctaagattccccagtcctcaggctctgcccctgggccccacgtcccccatgccctagtgctttcacaggccttctccaccactaccacctcttctcctttcccagccccttcggccccaggctcctcagtttcccctgcatctgcctccctgaccccctgctccatctcccggttgtcccctgccgcctttggcccaacagcaccagccttcccctccgtctccccatgccaggtccactctgactccgcccctctggccatccctggctctcttgccctgacctcttcctcctcctcctcctgttcccagcttctcagcctctcttctctgttcacttcctgctcatgggactcctgcctctcctgggcttggccgctcctgtcttggcaagccccagaccctgccttggatttctttctggcctccaagtgggcgcttggctcctggcacctggcagccttggctgtctccccagccccactgtcctgcctctctgcttgggacccatgggagctgccatctccccagccccaggtctgttctacagctgagctccccacttcatgtcttctgtcatctccaggccctctcagccttccagccccctcgttttggctgcctctaaggccctccaggtcctcctgggcttcctcctctacaatcttccctgtctttcccaccgccaccacccccagttcctcagccgcctgcgcctcccgctctacagtggggactgcatctcccaggaggtaggagacaaaggtgccgagggaatcctaggaaaaaagagagagagaggggagagtcattgaggagagtcccagccctttccctgggggccctggctggaggagcccaggttaaggaagagggtactgggatctgaaaggagaagaagaggatttgcagaaggagccagaaggggcatcgattaggggtacgaggacgcatggttggaggtggggactgaaattcagaaaatattaggccaggagtctgcctgaacctgagaaagcaatctccagtttgaggagatcagaaggaggaggggaaaggtgaggccccaggggaggtgcccggaagtgaggccccagggaatggggtgcaagtatctggcagctgtctgcccttctcaccagtgcccccctcaaggcctggtgcagcccagggaggtatagccggaggaagtccatcctgtctgtctctgtctgtgtgtccagaaagctgataatgaccgtccccacccaccaagacaagccaaccttccccaggaccaaaggcacttcctcttcccctgtctccctgatgcgtccccaccccaggccctgcccacggcccctgatgcccacagtagcccccactgcagcccgggaaatgggtgtacatcacacaggggactcaggtgcacatttggaaataaaggacaagcaagaggccagaaaggacaaagtgggagcaggagaccttagaactggggagggggagagggaggggacatgtggcaacagcagctcaagtgactcaggtctcgtatccgcacctcagccatttctgcctcccctacaagccacagccactctgcaagaggaagctggggtttgtggttcctgttttgcctgggaagaaagagtagcagtgaagagggggctggtgggagctctgacacatttcggcgtcattaatgcttcccccaggggcggaaggggccggattggtggctctggggtgcatcccctcacctatgattaggcttgcaaaaaagaacttggctaaactttatattgtggatatctgtgtctgcctcccaccttcctgtgacttccttgatggcagatgccatgtatgaaacgctgctgaatttctagagccctgcacgttagtaggattccattttccatcagctgagtgacctgggaggcacactagagagggcacatttcttttcttttcttttctttttttttttgagacagtctcactctgtcacccaggctggagtgtagtggcgcagtctcagctcactgcaacctctgcctcctgggttcaagtgattctcctgcctcagcctcccgagtagctgggattacaggtgcgtgccaccacacctggttaatttttgtatctttagtagagacagggtttcaccatgttagccaggctggtttcgaactcctgacctcaggtgatctgcccaccttggcctcccaaagtgctgggatgacaggcatgagccaccacacccagacgagagggcacatttccaactgcattctgaaggcctggtggtgagaaagagcatatagaggtggcacagcccatagcagagatgaggccaaggacaagaagagaatgcaggatgccgctttccacctagaagaaggtaagggtatgattccttatttggaactacataaagtgaccttgctctacttctcttccccataccctccttctcccctccccagccccactttcctattccaattagggcaattctatgaaatcacagcatcagaatcttaggccttaaaatcatttagtctggccaggtgcagtggctcacgcctgtagtcctagcactttgggaagccaaggcaggtggattgcttgagctcaggagtttgaggccaccctgggcaacgtggcaaaatccagtctctacaaaaaacacaaaaattagctgggcacagtggtgcgcacctgctgtcccagctactcgggaggctgaggtgggaggatcacctgagcctgggaggtcaaggttgcagcaaaccaagatcctgccactgcactccagcctgggcaacagagcaaaaccctgtcaaaaaaaaaaaaaaaatctggtctaagcaccacctttgatggaggcaggaatcctgcagcagcctggagccaacccaatggctccctgcctctggtgctctatttcttatcaccatacaggtctctaaggtcacctttaggtctaacattgtatgaatgattgtcagcaactttccaatttttttcatatacatatattttttttattttattttttactttttctttttttgagacaggatctcactctgtcacccaggctggagtgcagtggcgtgatcatagctcactgtagcttcaacctcctgggcacaagtgatcctcccacctcagcttccaaggtacctgtgactacaggaatgcgccaccatgcccggctaattttgttatatatatatatata

SEQ ID NO: 1242594 - DNA, 4001 bp, Homo sapiens
agaggaaggtgtcggcctggccaccaggcaccctctggacaacagtaagctgcatcccatgtcacacagcgaggtcctgtcccactcccaccaggcccttggagccacagcagttggctgcggggagacccttaccaccagtggccagcagatcatccacgacgaccaccctctgtcctggctccagggcgtctttctgaatctccagctcagcctggagtgggaagtggtgtgtggtcctcagcctcccgcagaaaacagctttgttgcacagcttggcagctgccaccctagaccctgactccaaccccaccttgctgttacctggctgtgtgagcccagcctatgtctcaacctctctgagctcccaaggccactgtaaccacagcagctccacttgacacgcctgggaaggccttttagaactgggggagagtggccacggtggcctggccctgcccttcctctggccaccccagccctcttaccttcccgtactccagggaataggaggcccacagagtggggcctggcagcttcccccgctttcggatgagcacgcagcccagtccaagctcctgggccagggaggggccaaagaggaagcctcgggagtctaggcctgtcagggtaagtgacaggagtgactcggcagcatgggaatccccaggggccagggttggccggtggcaaggggtacctggttggctcccagctgaaaggccagtgacatgcaccatttaaggaatgttacccatcacctacccggagctgcttccaggtcagagtgcagacctgggtctgtcttttaagggaccacttcttagctgtgtgttcctaggggagtcaccacccctctctctgagctgagcagcccatctgtaactgggctggtagaaacctgacaggcctcagcttactctcaaaggcagctctgcaccagggcttctgtctaaaaagggagtctctcgaggtggcctgagctgtgatggttgggggacgctcagggaaaccctgccccggcctggcaggaggtcagggagggcttcctgcaggaggtgagaagggagctctggcagtgttgtggctccagcaagagctggcgctttcctcagggcagtgtccagggagtgggctgtcacaccctaggagaggcaagacggccaggaacactctgttctccctgggccacctcttgggctctcccggaggcctccaggcctcccttccctgggtgggcattccgtgatcttcaccagggaaggcctggctcgtggcaggcgctcaataccagctcgcagaaggaacaagaagcaaggcagctgggccctgtggattcagcttgggcactccagggagaccaactgacccggcaactcggtcacgcctgtcctgggctggggacccggaacctgcgggaaggacgcctgcacagcgcggcggcctcgggggctcaatctcacaacccttcccgggcgacccaagcacggcgcccgtcccggcgccccctgaagcaccccaaaggccctcccccaagcagacgcgcagagcccacgtgctgccctcggcgcgcgcagaggcggaagcgccctagatgcggccactgggcactcgcctgcgatgtagtcgatgcggcccccgtgggtcgccttcaggtgtcgcgccaggaggccgatggcggcgcggaaggaggcggggtccttcaggacgggcgagatgtccctggacccaaggacaggcctggtgacgccggggccgaaggagggcagggccccgggggcgaaagacgagggttcccgccccgcccgcccggaggtcgcgggccacgcgctcccatccgtaggcccgcaggtcggggcgccacgagggcggcctgtgcgtgcacctgaataccacgcctggggtggggaagtcggggaagctgcggatccgctgctcaaccagctgcagctcggagtcggccatggccgcgtgcgaagagccagcggcagcccgagcgcgcctgcgcggggacgggcgggaccgccacgaggggtggggcatccccggagggcggagcgtgggtgaggggcggggcatccgtcgccggaagcctgtaccgtatttcatggactcctaggcgccatcgattttaagacgcgctcgcattccacgcaccactgagcagaacgttcgaaccggacaaaagtgcgagtcaaggcgcccttccttgtctcgggctacgcttctgactgcagccaggcagctgtgggccggggccttggcggctggaggaggggcgtgagctggtctcgcccacgcacctggcgcgcgtacgggccgcgccctttctcctttattggccgagatccccacgctgcgcgcgggaggctggcgcgcggggtggagaagggcgtgaggaagcggtccaagtagcaggagggcggtgcagggcccggagggagcagcccagggcggaggcggcgggcctgggctggaccggccgggggcgctggcctctcgcggatgggccctgccgttgaggcggctcttccccgcccggacccgggggagggaggccggaaggtgtggccaggccagggcgcgcatccgcgagggcagaagcccttctgtccgcctgcagaggccaggtgaccccttagccttggggtggggagctgtgaaccccctggccgcccgaggactggtacccagggggttgtgtgaggcataactccccccaaacacaatttcctttcaagaaaatccccagagctaaaatgccttgtgctctattccaagacttttcttcatttcgcaacttttttttgagaaggactctcgctctgtcgcccaggatggagcacagtggcgccatctgggctcactgcaagctccacctcctgggttccggccattctcccgcctcagcctcccgagtagctgggactacaggagcccgccaccacgccctgctaattttttgtatttttagtagagacgcagtttcactgtgttagccaggatggtctcgatctcctgaccccgtgatctgcccgcttcggcctcccaaagtgccgggattacaggcgtgagccaccgcgcccggcccatcatttcgcaacttttacaattcagctttggcctggcagttactgcagaagggaaaacccactcagtggaaggcagcccccaggagccttcggagggggaggccggaggctgcatgcggctgctggggccccggttccagggcgggtgggggacccatcgtctgatgccaaggggcgtggtaggggcggctgcctcgcagtgtgcggtggtcagggctggcaaggcctggggcctgggctccagacccctagggaaggtggaaatggaggaccctgacatcctcacgtccccggggaagctgccacatgagccggccccaccggtccaagtgtgtgagctacacttcagccgtccacgtccagcccaggaggcctccgccttccccttccttgttcctgattctgtctcccagatggcccgaggggggcctgggaaggcgtggggtgggggggtactggaggaggggcctggggagggttcaacacagaattggccctgtggcttccttcaacccgggctgttgggctggcgtgggaacagcaaggagccccgagtcctgcccttcaacaaccaatgtggcgctggcctctggaggaggccggccgggaggcagcgggagctgggcacctgattcttggcagctgctgagaaggtgtgaaaggaaaataaatctccggaccccaaaatcactcagccaagagaaaaatcaagctgggaattaggcaaacctgcctcccgttttatttctaaataacatagttacaatgataagaagctacacgcctccctcataattagcgtccagggaaattccttgtggacaaaggacagacggaactggaagtcatccctctggggctcccctgagacaaacgcttatatgattgccccgttcccttactgtttac

SEQ ID NO: 1242595 - DNA, 4001 bp, Homo sapiens
actttttgtttcacttgcagcctcccttggacgtctaaagagatgtggtttgttttttgtttgtttgtttgtttgtttgttttttggagatggagtctcactctgttgcccaggctggagtgcagtggcacaatctcggctcactgcaacctctccctcccagttcaagcaattctcctgcctcagcctccgaagtagctgggaccacaggtgcctgcccccacgcccagctaatttttgtatctttagtagagacagggtttcaccctgttggccaggctgctctccaactcctgacctcaggtgatccacccgcctcagcctcccaaagtgctgggattacaggcgtgagccactgcacccggcctaaagagatgttaaagctcttttccattctggttttctcagaaatagtatttctgtttcctcattcagatctattttttgagtgagatttaatacagaccaaccatgtcccagatcaccctgccaggcaccccactcaagatcttcgtcgtgatggctggctctcctgggaaccagcagccatgtccacagacctccccattgagcctctacccagacgagagctaagccagagaagcctgtccctttccctgcccctccttcttgatcacctcttgacaagccaggaccactgcagatctctgcatacccaggtgggaaaacctggctcaggtcttctatgcatttctgctttccctaaaacccccttctagtggtaacaataacacagcaaccaatgcctgttgtatgtttggtgtgtgccaggcgctctacttcatttaattctcatgacttccgcatgaggcacttggatttgagcgctggagccagacagcttgttcttgactcccgcctctgccactttctggccctctaagcttggacagattacatggcctttcacttttgcagctgtacaatggggctaataacaggacctaccccacaaggcttttgtgaggattaaataactaatatctataaagtaattagactagtgcctggtacatggttagcaatatagatatgttggcttgaaaaaaaaaacatttaaaagctactattcccattttataggcggggaactttgggtttagagagtaacttgccagccaggcatggtgtctcatgcctgtaatcccaaaactttgggaagccaaggcaggaggatcgcttgagaccaggagttcaagactagcctgggcaacatagtgagaccccatctctacaacaaaatttaaaaattagttgggtgctgcggcgcatgcctgtgatccagctactcaaaaagagaatgacttgctcaaagtcacaagctcacaggctgcggggtctggagttgaccccagtctgactcccaaccccatagttatccagagcgctccttgaaatcccgaatacgtatgcgcccaggggtccttgacaacgcctttgctttccacacccagtgccccaagtcagcatcaggctgaatcctcagagctggtctcacctgatattccccagcgtggcaatcacgagccccaaagccagcccgtgggccagggccggctgcagcagcccagtgtccgtcccattctcaatgaccgacaggcacccgatgaagatgaagagagcagagcccagcagttcgaccagacatggctgcacaaaccgttcgtaccaggacactcgccacctgccacccacgctcggctccctggccttgtcattgccaaattcaggctcacacatggctatctgccgtagggaaaaagggacagaggacacgggtgggaggcaagtccagatatagaaggccccgacccccaaccttgaattaattcacagccccccttgctctgccagcctggagaggaagatgccgacagagggctcacctctccagacatcaggatcagatggcacaaacatcggactcttgcctgagctgctgggaaacctgcacctgctgtgcaagatactcttatctcctagggacaggacctgctgatcacactatgggctctgccccttttaaagggctgcagaggctcaatgctggtgcagagaaagcaataaacctcaggtaggaggcggctctgaggcccagaagaggaaatttttttaaatctcaacagggcagggtgagggagtcagggattgctgaactttccgccagtgagggaaaaacacgccagcttggctgtgtcatctgggagcacactccaggctgtagaaggtgggagatgggtccagcaccccagctccccacggtccaaagcagaacagcacatgttagtgggccccactgggttggaacctcacatgttaagaaacagcaaacagccaggtgcagtggctcacgcctgtaatcccagcactttgggaggccgaggcaggtggatcacgaggtcaggagattgagaccatcctggctaacacggtgaaaccccgtctctactaaaaatacaaaactcagccgggcgtggtggtgcacgcctgtaatcccagctacttggggggctaaggcaggaaaatcatttgaacctgggagacgaagattgcgcagagccaagattgtgcaactgcactccagcctgggcaacagagcaaggctctgaaaaaaaaaaaaaaggaaagagaaagaagaaagaaagacagagaaagaaagaaaggaaagaaaagaaagaaagaaagaaagaaagaaagaaagaaagaaagaaagaaagaaagaaagaaaaagaaagaaagaaagaaagaaagaaagaaagaaagaaagaaagaaagaaagaaaaagaaagaaaaagaaagaaagaaaagaaggaaggaaagaaagaaagaaagaaagaaagaaagaaagaaagaaagaaagaaagaaaaaagaaaaagaaagaaaagaaggaaggaaggagaaagaaagagagggcgtgttggtgtttgcctgtaatcccagctactcaggaggatgaggcatgagaatcacttgaacccaggacccagaggttgcagtgagccaagatcgcgccactgcacttcagcctcagagtgagaccctgtctaaaaaaaaaaaaaaaaaaaagaaagaaagaaagaaaaaagaaaagaaagaaacagcaatcccattttcaattatttttccaatgagtcccacagcttcaaacacctgcagtcaccgtgacagcctgagccaggactgagtgtatagatgacgatccttcacagacagaggcagcagagactggcaagaggtaatgcaatgcagcggcaagacccatgaactttggaaataggctgcctggcgttcaatcccagctctgctgtaaactagctatgtaacccttgggcacatgacttggcctctctgggcctttgttttctcatctgttaggtgtggatgttagtggtttcaccatgtcatagggtcgttgggaagtttaaatgagataatacgggtaaagtgctcaggacagtgctagacacacaataccagtgtccactaatttacaatacatgcttagctgtaactaatagctaatagtgagcactttctatgtgccaggcactggggctaagtgccttctattatctcatttaaacctcactgccaccctgtgaagcaggtactattattacaaccatttcacagacgaggaagtggagtgtcaggaagattgagtttcccaagattacacagcttatatgatcacagaacttgtgggctgtcacaaaaggataaatactgtatctgattccacttgtatgaagtacctagactagtcaaattcatagagacagaagtagaatggtggtttccacggcccgaggggaagggagaatgaagagtttgtgtttagcgggtacagatttcctgtttgggaggaaagttttgggatggatgatacagtggcacaacaatgtgaagtacttaatgtcactgaaatgtacacttaaaaatggttccaaatgctgggtgtgcttggctcacacctgta

SEQ ID NO: 1242596 - DNA, 4001 bp, Homo sapiens
ttgggaggccaaggcaggcagatcagttgaggccaggagttcgagaccaccctaggcaacatggcaaatccccactctacaaaaaatacaaaaattagcggatgtggtggtgcccacctgtagttccaaccacataggtggctgaggcgagagggtcgcttgagcccagggaagtcaaggctgcaatgagacaagatcgcaccactgcaccccagcttgggtgacaaagggagaccctgtctcaaaaaaaaaaaaaagtgtgaagggagaagcctctaagatgacccaggagtcaaagagaccctaaatagcttggtagatttaagtctcagaactttgtataaaaagagtgaaagtcccttacctgtcacgaacaatgtaaaaacaagccaaacgactatttgacaaatgtatcttggcacttactaaatactagttccacaatgcacgttgctcagaacactaacaagggtacgaaactcacaagaaattatcatgtgcttgtaaactgttccttgaaacatcagccgccattaccacacgtctaccttcctctcagcattatttctttaattttcctgcaaataacagaaaagtaggtttgtctgggctttaggggcagcgattaaccctgaaaataagagttaattctcaccacaataatacggtagggaatcgaaaaaattaaacaaggaaactaagcaaaaagatggaggaaatgaaacagtaaaaagcaaatttagaaaactcgagaggaagtaaaagtattttcatacactcaaaaaaaagaagtgtcccacgtgcttcagccaaaccaaactccccttaactgttaaaaacagaaaatcaaaagaagagctgtgagaaattcatactttcgtatctctttgctgaataaacactaaatcggtacagtacagccagctgccctgaaagaccttgaaatattagccccagataatacagcacatgacagtcacctccagaaactctcaaaaaccacaaatcatttcttgttctgacaacctgatctaccaactctggtctagcctgccatttaataatcaataacgtttcttgttaagcacttcaaccgtagcaaaggaagataaagaagcatttgtttccaaacctaaggtgagactttttaaattggcgcaaggcgtctccataatccttttccgccaattcctaatttctaaatgtcaagaactggcagcagcagtccagttcctaggagccctggttttgagacagcaccacctccgaattccctcaaagggcgttctgaactcactgagcaaatccggctggctttcatgtccctctagccatttcttgccgccatgcacttacaggagaaggactcgcaaacagcgggagcaccgggaaagcctgggactgccgccccccacagcacagcgctcggcacagcgttagggacagaagtcaccgttgttgagcccagggcagcgatcccagctggctcggcccccgggaagggaggagaaggaccgggtctactccccgagggcgatgctcccggggcagggacaatgggcaggggaccccgcggtgtggcggaggaggcggcggccctcccctgcaggtctcgggagcccggcggcgctgagagacaggcgggccgcctggagcgcggcgctcgggcctcagcgcggcgcagcccccgggcccgtgccccgctggtctcgggcaggggctgcggcccagctcagagccgccggaccgcggaggagccgtcccgcccccgcgccctccgccctccgcccccagccccggtgcgacccccgtgctgcccggcgcactcgcctgcccacggtctggttagccagctgcttcatgcggttgaactgcttcttcatggcggcggtggcggcggcggcccgcggggctcgggccgggcagggcgggggacagcctggcagctactacatcgcttcccggcccaaacggcggcgcggcggtggctccccgggccggcggccccgccctcgcctcgtcacttccagtggcaccgcccgcccgccctctaggtctggccgagccgagctgagcccgagtagagccgagtcgaaccgagccgaggctaacagtgccttacctgacacgggcgaagagctagaaggccccgggcgagaagaccactaggcctcctccgcctggcctccccgaccccaacgctgcccggtcaccctctcgtttatttcaacgtatgaaaagctgtttctagcagggcgcagtggttcaacgttgtaatctcagcactttgggaggccgagggggcagatcacttgagctcgggagttcgagagcagcctggccaacacggtgaaatcctgtctctactaacaatacaaatttagctgggcgtggtggtggacgcctgtaatcccagctactcaggaggctgaagcaggagaacggcttttacccgaaaggcagaggttgcagtgagccgagatggcgccactgcactccagcctgggcaacagagtgagagaccctgtctcgaaaaaaaaaaaaaaaaaaaaaattaaagtcaatgtgtgttttccttaacacacgtgctcacacactcatgtcttcctggtttggtggccttggctccaggtaagccccttctttgcattggatgggcagcaatgtggcttctttcatcagccacatctcaaatgtgctcctaaatgtcatagaaaaaggaaagagctccctaactatgggataaaggagactgatgccagtttggaattcttaatatcaaagaatgagggacttcaagatctttttagtgacctaggagagacctaggaagcatcagagcttcagatagggcagcaaactaaaagttatcgacatcaattacaacagaaagaggtagaaatgagccttcctaaaacaagaaagcaagcactacaggatcggttgcaggaccggcagccagccctggagtcagcacattcagggaaggccggaggttcccatccacactgcatcccctccattccatgtggtacccatcatgcttcagtgttccacgacgcttacatgggtttttatgacataatttcatcataacaagaaataaacagatagtccaatgaagttctaaaacttgagtctccagttggccattggaaatgtattgctcagacttataaaataggaggaacaactagttttgatgaaaatgaaatctacaaactacaaacaccaaatattaatatcatcaaggagctcaaacaaaaaagaagtcaggatactgatgaccatcagcttgaattatcagtattacagaatgttcatcaacagaaattgagggaaataagttgtaagcatcaagaaaatctaagcaattaggaagaaaagattgaagaactggaaaatttgttacagcaaggtggctcaggaattacagtacatgatctctctaaacttcaagagaaggaaaacactattcatgcaagctctacaaattgaaaaagtagagtctaccaaaaaattgaagaatttgaacatagagtaaaagacaaataaaaaattatcttctggggccaggtgcagtggctcacacctgtaatcctagcactttgggaggtcaagatgggaagatcacttgagctcaggagtatgagactagcctggacaacatactaaaacctcatctctatgaaaaatttaaaaaaaaaaaaaaggccagaagcagtggcatgcacctgtactcccaactagttgaaaggctgaggcaacaggatcatttgagcccaggaatttgaggctgcagtgagctattatcacaccattgcactcttgtctgggtgacagagtgagacccctagctgaaaagaggctattggaagaaacaactctgagaaaaccatgaaaagattgtccactgaagctaacctggagagctctgccttacagctagagcaagagtgtgtaattaaactcagccacgagaaagactctgaaatgtcagc

SEQ ID NO: 1242597 - DNA, 4001 bp, Homo sapiens
ggcgagggcatcagagctgtcctctgtctgcccccgcttcccccccccgccccgttccccccaccgctgccctcaccgcgcaggccccggcggtaggtgtggtgcagacacttgaggccgctgacaatctccctgtggacctgggaacagaggcattaggggttcctctgggggccaggcctctggctgttgcccccacccccatcccctccgcccattgccccggctctcaccttgaaggagatcttcactctgtaatcaacaccttccttcaggacaaacacctggtccttcagaacagccaggtcccctattggggaaacctcagctagggtcggaactcccctacaggctgagacctgctccaggagcccccacgtagggtgtggtacccatgaggtgtgcgactgtgatggcccagggctcggaactcaggggtgcagaagcgtgcctgggagggccctacctgtgttcagggtgcagcatcctgcgagttacctgtgagatccatgacgacgggccccggagcctgttccgacaggagtgtcagcctggtcacctgcacattgggcaggcttgggtctgaggagaaactggaagtctgcaggatgccccccacccccaccaggctcctcaccagccccccagacccagccctccaagcctagacccctgccatacccacggccggtggcaggggccccagcagcacccgcttgtacttggccaggctcctgtcgtccgggtccagctgccggatctccaagaggctcttcctccccggcgcccggtactcgggcacagcctcatccaacacctcgtccactgccggcggcccaccctccttgtcagccaggaggactgggggtggggaggggcgtgagcagcagccactagcggaccctggcattcgagcaccaggctggagccccctctggccagctgtacctcccactatccaaagggactcaagggaagcctctgggggctcagggagagagcgagcagagagagcagggcggcctggggaggtgccgcaccgcacccagaccttcaggaggggcctccagagaccgccaggcctgcagctcctctggcccagatgtccacaagggccccctccctgactcggagaccaaagggcgggggagcgaagacttcagatgagggcagcccagggtcaggggctacctgctagagagcagcggccctcggcggcccccaaacctactgaccctctagggccctcggcggcccccaaacctactgaccctctagggccctcggcggccccccaagcctactgaccctctagggccctccaccaccctgctctggactggggtctctgaacactttcccacagtctaggagttcctccccatggtgctcgggtgccgggggcggctgtctccaaatccctgggctcaggctctgcgccgcctcccatggcgccccgggctggtggcctcctgaagcccctctccctggtgccctgggcaggggtttctgagtccctgcccacttcgctcccgtcttctcggggatcaccacacgccctacagagcctgagccccagccccagccccacccaagacagaggggctccaggcggcggtgtccagggggagagggtcccagcgccgccgcttcccaagccgacccgtccgcacctggtcccttccccacagggctggagcctggatgaagtcccccacccctgccagaccccagccggggggtcggcgccgcgaggtccccatgcgcgcccccaaagttgccgcgggggaggggctactccccgcccggggctgagaccagccgagccccccgcccctgcccggcccgctcacctcgggcgcacagcgccagccggagcagctccagcagctgcgcccccagctcgcacgcgtccaggcccagcatggcggcgcgcggcccgggcgccgcggagccgccgaggagccgccgcccgccccgccgccgccccgctcggcgctcagccccggcgcgactgcggtgagctcatcccggccgggagcgccccccgcgcccagccgcgcccggcagagagcccccagccgctccggaccccgcgcagccccgcagagacgcgcgtgtcgcccgcacgggccggcacccgggtcgcccccgccggcgtgccaggaccccgcacagaagcgcccggacgcggacgcacgcagccgcggtcacgatccccgccgcccgcccggcccgtgcccggctctggccagcagggctgccccacccccacggcgcggcgggagcccgagggggtctcctgggaaaccctctgcggggcgccgtggcgcaggtgcgcccccatccccagggtctcattatccgcggccacacctggggccggaccgcgcgcccccttcccctcccccgctcctgagggagcttctgtctgggccgagggggactccgggggcctgcccagccttggggtgaggggctggcccaacaccctacaggttcacggtcatcagtagggcgggaccacagtgggcgcgggtcgcacgcacacccaggaggcaacaagggcccctcaaaggcttagcgacctggctgcgctgtgtgagttcccaagagggggtgtccctgcagggctcttggaaacccagttaccgagccccctgtcctcagggagaggacactgacaagggggcggagtacagagaccggagcacagagggggcttctgatattgacacctaaactgagacctgtgggtgggtgggggggatgggacccggcaggggacaggggtgagcaggccctggctgggacagctggaccaaaggcctgcgtctggataagggagaaggggtccgaacaccagcctgagtccctttcttagacacccctggccggttccagggacaccagaaattagacccgcccttgccaaagagctcctcaattgagagaagaccaccttgggtgctagggggcattggggtttgggtggggactgtctcccttgccccccaactgcccacaacctttccagggcaggatcctatgaacttgtgcccaggcccccctagagcgccacctctgctgacccttcgctgcagggagcgggggctgttaggacacttgtccccaggcccacagctccagctcctgcagctgttaccagatagaaggtcttggaggtgagttgtccaggttcttggtgggttgaacaaagaattgaacaaaacgcacaaagtaacaaaagaacaacgaaacacaaggaaacaaaactgagtcagaagaacggagtaaggaaagcacagatttaacggaaggcaattcacagagtgggagtgggctggagcaagtagctccagagcctctgtaattaggatttttattaagcaaagaaacctgaccacagcccttgtgccctttagaggcctccaattggctacaccctatgaaggattggcccgagaccaatcagaggtgaagtggaaatttctgtcttgttatcacagcagccaggatgtggcttgtgagctgcccaatcctgcctagaactggctgcacctgctgttccgtttcttatgcccaacccttggctaccctcattccctattctgcctcacagctaccatgggtgcccacccctgcagacagggcagccagacctgggccacctcaccccacctgggtgtggggcatgggagggctcactgggatccaagcgagatggtaccctggagtaagagaccccacaagccccctgccccagctcatgctgaacgtggcctctccggcaatggaaatggactcagaccactatgttaggggctcccagcccaaggccaaccgcccaccctgcccagcccctagcaccctctgagtgggtaaggatggggagaggtactctgcctccaagaaagcagaaatagaccagatgcggtggtacacatctgtagtcccagctactcaggacgctggggtgggagaatcacttgagctcagga

SEQ ID NO: 1242598 - DNA, 4001 bp, Homo sapiens
aattttcattctaaatggattaagccatacagccaataacaccaaataacagtgttcttttctcaattctcataaaacttaaagtcaacagaattttctcaaatgtaagttttcccctcctacatacttgtcttaaacctctggggactgttactgcttctctgttacttagcaggtttcatggatgcccaaatacatccacaagtaggaactcaaaacctaggaaaatacagaaccagctgaagcttaataccttgttttctttatggccatgtgtgcttatggttatggttttatgtgtttattttcatttttattttttccagacggagtctcgctctgtcgcccaggctggagtgaagtggcacgatctcggatcactgcaagctccacctcccaggttcacgccattttcctgcctcagcctcctgagtagctgggactacaggcgcccgctaccacgcccggctaattttttttgtatttttagtagagacagggtttcaccgtgttagccaggatggtcttgatctcctgacctcgtgatccgcccacctcggcctcccaaagtgctgggattacaggcgttagccaccgcacctggcctggttttatgtgttttatggcatgaaaatgttaaaactcaaaactatctaaaattgaaattgctcttaccctacataagaaatagagtagatcattatttcctatagttttgcgaagaacgccacactgctggtgccctattagcctgagtcagtcccttccagcctctgaatctatgcttattagatgttttcaggagtactgggctgtttgtttctaagacaaactgcagtaagcctttacttaagtattacattgtgctacattaaaaattgcaggcagcttgatgttttctctttttaaaattaactctccaaattgatttcaatgtccttaaagaaacaagcaagtccttaaaaacagtatcttaaaagcttacccatgataatgtcctctaaatatccaaccacagcatcaaattctgcatcagaggcggaggagctgaaaaacatgcctggattaggtgctatttcaaataatgcattaaaaaaatgtttttagtatggacgttttcaaacatgcacaagagaaaaaagagtagcaaaacgaacttcccatcacccatcttcaacgattaagaatgactgactgatctagtaagtccaaacagaagaaaacacactcggcacgtttgtgacatgaacgttcaatgtcatgactccactttaataaaaacttgttctccaggctcttagctatcaccccatacctgtctgcttgtgagcatgaacccggcacgggcgaaacacctgccggggggggtcatttggtcaggagtccgggaggcgggggccagggaggggtggaggggcctcgggcgctcaacccctccaggctttgctgacagctgagggttggcggctggggattgtgatggaggcgctgatcaacggtgacacccgcctcgcactcctgtcctgcggggcctgaaacctgcagccttagtactctacaaaaggaaggcctggagctgggacggcgccttggcggcccccaccctgcccggcccggcccggcccggcccctaaggacacctgttttatagggtcaggccccggggcgaacgcccgctgcctccggccccaagtcgcctgcgccctggaggagctactcacaaagacagcgcaaagctctctccttctaaggcgtccatcgcagtcgccccgagtaggctccaaccccgcccgcggcccaactcgcatgcagggcgcggccgcccggcggggttaaggcctctcagccaaggccgcggccagctcactgccaggtcgggtcagcgcctgcgcgccaggtccggccttggataccctctgccgccacgcgtcggtccggcctctacgcccgcctggccctctgcgcgcgccgccgacgccgcaggtccgggcctcggtgactgccggaggggcgcggcgccccgcctcctgtcaccatggccaccgcaaccccttccaccgcctcacggccggccggcatccaatcacaggcgagcgttaccgatgccggggcggggcaagacagggagaggaagtcccggaagggagtgcggagggatgcggcgcttcggcgagcacccgttgtgtgggaactccgtctcaagtcgcccccattgtacggatgaaggaatcgaagccacgagccagaatttcctcactcgcaactcgagaataaattgcgcctccctgagtgtggaggattaaataagtagtttaaggcgtgtttaaagagcgcttgtaagttgccaagtcgctggagagccagtcccttatcccttgaaccaggtgatgctgacgtctgatttcaagacagttcctacccctcgtggaaggaaagccccatcgcaagaagtcgatgtcctgtaatttacgttataatcttcgcatcataaagattactcggcagtaattggtttcttgactaattatacaagatgagaattgaagaactattttgagccacgcaatcaggaatcagatacctttcaggaaaaggcctcttcaaaactgccaaactttgaaaaaggattcgtttgagctgatttctcttgattggacaactaagcattgtgtctctttagttgcatgataccttatggccaaagtgtggtatatgactagaggaactagaggggtttaaggtatgaactgagggtcaggtggccagtcagaatgggttagcagacattttttatttttttgagacggagtcttgctctgtcgcccaggctggagggcagtggcacgatctcggctggctacaacttccgcctcccaggttcaagcgattctcgtgcctcagcctcccgagtagctaggattacaagtacgtgccactatgcccggctatttttgaatttttagtagagacagggtttcaccatgttggccaggctggtctcgaactcctgacctcagatgatccacctaccttggcctccaaaagggctaggattacaggtgtgagccaccacaaccggcctagcagacatctttgaatggacttaaaatagatatccgtgggatctgaaacaaagatggttacaaagacacagtcgggtgtgacagctgtgaccaaggtgacataaattattactaatttatttatttattgagatggagtttcgctcttactgcccgggctagagtgcaatggtgcaatctcggctcaacacaacctccgcctaccggtttcaagcgattctcctgcctcagcctcccgcgtagctaggattacagtcatgcgccaccatgcctaatttttttgtgtttttagtagagatggggtttctctatgttggtcaggctggtcttgaactcccgacctcaggtgatccgcccgccttggcctcccaaagtgctgggattacaggcgtgagccactgcgctcggcctatttattttttgagagggagtcttgctctgttgcccaggctggagtgcagtggcgcaatctcggctcactgcaatctctgcctcccgggtttaagggattctcctgcctcagcctcctaagtagctgggattacaggcgcgtgccaccacacccggctaatttttgtatttttagtagagacagggcttcaccatgttggccagcgtggtctcgaactcctgacctctggtggtctgcccgcctcggcctcccaaagtgttgggattacaggcgtgagccaccgcacccggtcaggtgacatcaattatgagttactctgtttagcaccaagtggaagataggcatttaaaaagatttgctgaattactggactgagttgtttagtcaagccctggtcacacagcttacagcaaactcagagagtttcttcatgacctactttctctatataccacacatttctggacaaaatgaatttgcctacccttcctaagtcattgatggag

SEQ ID NO: 1242599 - DNA, 4001 bp, Homo sapiens
atttcagatggttagaattgatccgttgtttttgtcatcttattgatttaaacccttctaaatccattaggaaagactttccctgaatagcattcaatttctaaaatagctctttgtgtaatggaatcactcagatgttgacattcattggacaattaaggaaaactactttcaccaaattaaggtggcattttacggtcaatatacctcctcaatacagtgtttcttaccactcaggatgtcattttgattatacttcaaatttctctgactctgaacagccgaaagtgggcctctaggatgagctaatgtggcaaaagcccttaaagctggttttggtaaaggaagaaaaatttagaataagaaactcaagtgtctctatgttatcaggctggatgcagtggatcacgcctgtaaacccagcacttggcgggtcgggggggattgcttgagcccaggagatcgggaccagcctgggctgagaccttgtctctttgtaaaagtcattcactggaaatcatgcaaatgacagaacaaggcacttaatcttaacaaagacgctcgctatctgtgccacgctgagcactagtgtgatctcaatatttctgactttatattccatgcttaatactagtgaaagagactactatgtgtgggcactctgctgagcattcatatttatacttcaattaatcttcctaacaacccttaaaaaaaggtgttattactgtccccattttaccaaggaggaaacagatacagaggttaactgatctgcatccaagaaatccacgaccaaaggcgttgctttccttagagttatattgctctgctggaaggagagttgggaagcaggagctctagcccaggatttgtcatttcaacagggcttgagctacttctctgtgcttcaattaatcctcttaaaaagatccacgctgagaactaactatgctagaaggagcgtgtgtttaaaggaacaaaccatgcatttctaaaagcaaatataaaatcacgcacaatcaaaactgccctgaagtcacgtcattggccagcgtctggggtcttggaagttcaaaagcccctaagtaaattctttggttccgtttttcattgctggtatgtgacctacagtcaccagggaagggcaactgagaatatgcaaggatatttctcttgttttttgcccacaaggtgcgcttaaattcataacaaataaaaatgtgtccgcctatgataccatctcactgcagttccttcggatccctgcttattactctaaagctgtttccagtagtcctgtgaccccacccccgccagacttccaaattccagacaaacgccaagacatcccattgtctgttcagctggaccccgctcccggttccccacggtgagctcgcagcctccctgtcgttttaagttgtaccagctctaagataaattctgggcagtagccctttgaccctccacccttgtccaagttttagggggaaaagaaggcaggcacatccaggttaagatcaaagacggggaaagccgaatacggctggggcctgagccgcgaaagcgctggacaggccccaggaggccttctgcccccacccgcaccccaggctagtgtcgcagcccctctgcctcccacttcctcctcgactcctactcgcggtgatgaatcacgcgccctcctcgccccgtcgcgcaccgtccccaggaaaggtaagggttcgacacccaggagtcacccaagaagcccgagggccaggcatcgtcgcctgcccagggagagaagggccgggcccgcggcgggtgacagggacgaggccgcggtgtttgagcccacggacgtctggaggcctcgctcggctcccgggggacaggcagccaggactcaccagcaggttggtgctgcgattatctccctccgccatcgtctcggggatgcagtctctacaagcgcaggccacctccccaacgagtcctccaaccgaaacccgcacaccaaccacaacccgagggaacgccccgcaggctgcttatatgggtcggccgcccttcccgacggcccccgcgacgctcgctcctcattggacagaccgagcttacgcctcaaggaagccgggccaaccgaagctcagcgcatggcttgaaatcgaggtcaaaggagacagaggcagcgccgggccgagggggaggggacacggagtgcccaatcagcgcccagggactgcgcgacgccccgcccagcgctgtgggaagcggttcaaccgcctctgcagggggcgctgtccctcagtggttctccggctcttgccgctgcggtggctttgggtccctcttcgtctggctttcgcagccgaggagactctctggaaaatgggctactcgaagagagatgctccgttgcctcaggcggagggcggggacgccgggcctgcgacacttcatcttttcctggccccgaggtggctgggatccgttccaccttcggcccagttccccagccaggcccctgagccgtttagcccggatttgcgacccgtgaggttttgaggacaagtgaaaagagctctttgtgtggattttgctgcaatgtttctctcctacccagtaggaatgaggccttagcttgcgcggaaaaacccaggcctggtttgagaacgtgtgaaaatgcaccgccttctaagtggctttattatacgtggatgtttaagttacttaaactacaagctccctctccaaaaggattctttttttttttttctttttttttgagacggagtctcgctatgttgcccagcctggagtgcagtggcgcgatcttgctcactgcaagctctgcctcccgggttcacgccattgtcctgcctcagccttccaagtagctgggactacaggcgtccgccaacacgcctggctaattttttgtatttttagtagagacgtagtttcaccgtgttaggatggtctcgatctcctgacctcgtgatccgcccgcctcggcctcccaaagtgctaggattacaggcgtgagccaccgcgcccggccagaattgtttgtttgtttgtttgagacgaaggagtctcgcgctccgtggccccggctgaagtgcagtggcgcgatctctgctcactgtaacctccatctcccgggttcaagtgatcctggcgcgtcagcctcccgagtagctggaattacagacgcccgtcactacgcccggctaatttttgtattttaatagagacggggtttcgctattttggccagggtggtctggacctcctgacctcaagatatccgcccgccttagcctgccaaagtgctgggattacaggcgtgagctaccgcgcccggccaaaaggatagttcttgacacgacctttcttccattagaggtcaagctaagaaaatatgtaaaccctctcacaagcagtagaattcctaggcagtttaggaactgtgttgaggcacttgtacatcttttctatccaggatttcaaatgcagtaacaagtgctttgatcttttttttttttttttttttttttttttctttttttcttgagacacagcctggctctgttgcccaggctgtagtgcagtagccaccgcgcccggccgatttttcatcgtttgatacaaacagaatcatgccaaatgtccggatcagatgtttgtttcaggtgaattaactatagttttaacttccaaccttttatcttttttacaggttttaacttccaatctcatggtcatttgtattcggccattgaatttaaatttatttttaaaatgttccttaagtaaccaccaggttcttaaatgttcaaggaagtcataaatgtgagagaacatagctgcagaccacatactgcccctaagagagctgggcaagggcaggagcattgtgaatttcatggaagggtgtcaatttgctgtgggtctttcggggaaaggggagtgaagtatctgaatcagggagaagcacttgaaaaaaagtc

SEQ ID NO: 1242600 - DNA, 4001 bp, Homo sapiens
tttatgtaaattttaaatatattaatgcttccctttatccgaaaagttaagatgtcatcaaaactagcataatttcgtggaaggcaggtagtgacatgtaaactgctttcacacattgccactaggaggcaccaatttagctggtaaacagaaaagcttatgttttgctaggatttgttcttactgtgctggttttaattatttttatttattttttcctgcttcctaagcgactactgatttgtttggttttctaagatacgaggtcttgttacgttgcccaggctggaatgcagtggctattcacaggcagtcattgttcactgcagcctcaacctcctaggctcaagggatcctcccgcctcagcctcccaaatagctggaactacaggcgcgtaccactgcacccagcttatgctagtttttaataacttgaaatacgtatcatgcttagaatatttgcatattcgtgccatatttgtacttcgttttctccccactctgatttttttaggtagctattattgccccattttacaaggaatcctagcctcggaggggttaggtgacttttgcagatctccctttctgaaccactacaccttccagctcatcagtggggcttcagaaccttgcacagggccggacacatagttgggcactgaatgtctgctatgaacatcataactggacggtaagaatcatctgaaaaaatcaccaaataactctttggcctccgctagtccagcttcgaaagaagtcctcaacaaccaattcctagataatggctacaattatctggtctgggagggctctctctcatctatagagagtgcagtgacgtcacggggcacaacagattgagaaacaggagcgatgcgccatcacaaagcacgttattccgggataggacacaaagaactccagactgcccgggtctagagagcaagggagttgcaaacctaatctttctaggaaacgggggcggagcacttacccaaagggagtatgcctccgagtctgcgcacttcggtccggcacgccccttccgtacagcaatcggctaggatgctgagcgccaagtccagcgtcttgcgcaggcgcactggcggcgtaggactagacgacgacacagcggagggggcggggcccgacgcgggggcggggctagaagctcccgacgcggccgacgagggggcggagccggggcctgcctgggacggggcggaacccgctgcagccgctcgccgtagcagcgcgagtagggggcggagcccgccgcgtgcccggaagcgctcgattccccccgctgccttgatgtggcgcgtgcggagggctaggagcgcgcggctcaggggtgtctcgttggtcgctgggtccttttccccacccagagcctccccggccgccgccgcgagctgcgcgaggcagaacgagagcgagtccgtgagggttggcttcgcagccgccatcttggctcgggcctcagactccgccccgcttctcgccgctgatcccagggagcggaactggaagacagggaaatcgtcgggcaccgcctcgctgacgctgtttagcgccaccgcagtgatgcaagtcggaagttgtagttctcgaccccggaagtctgtccttgcacacgaggcgcggcagtaccttaatcgcagcgcatcctgggacgtgcgggcggtgcatgagggagatgtggtccgcgtcgagcttctcacgcctacctcgggaagcgctggaaactcttccagggccctccaggtgggccagggcctccgaacagcccagaagtccgaccacggagccttcgtgccgtgccccgcccccggcgtgcactcggcggggaccgccttttctcctctaggctcgcttcgctgccccccagcggtggtgcggcccggccttgggacggactccgagaaccccgagccgggccgaaagtgcggggtcctgaccgcgccgcagacggggagccctcgctcggtcagaggaagaagagggttaaacctaccgagaacgttcgctgccgcttcctagagtgacgggcttgtggaattttccgtttccggagctggaccccggtgtcccgagtgtcctccgctctggacgtgctcgtgagctcaggagctggcatctaggaaacggggagttcttcactcgcagcgcagtcggccgcgccagaagaggcgagggagaatccggacggggcggggcggcgggggagcgggacattcgcgtcccggggagcccccaggtcacccctggattgcgaggtggctccgcctgagcagcccttcctggtgtggtcggggcagctgcccgcccggaaaatggtcaggctctagccctggggaggaagaagcctttgccaagagcaaccgtctacaagccccaaaacctgcgagtgccggaaatgtggactgaccacagcctgcctccccggcttcattcaccaccaaggcagcccctctggtgacaagccttaccgttgtccgggttatggcagaagcttccgatgtggctctgatctggttaagcaccactgggtacacaccggtgaaaagccgtactcctgccccgagtgtgaccatcgcttcggccctatgcctgtgcctagtgtggtaagactttcagcgtcagctccaacctgatccagcaccagcgcgctcacaccgctaaaagccttaccgctgaggggactgcggcaagagtctcagccttggctccaccctgttgcagcacctgcgctccacatgggtgagaaggcctctaagtgccttgtttgtagtaagagttttgtgcacagttggaatctgctgcggcaccagcacagtcacaaagtccggaaacctgatgcttggtggtgagtgtggccagaccttcggccacagctcccacctgcccatccactaggcggcccacagcagcacccctgcgtctgcctgcagtgtggcagggccctagcgcaaagctccaacctgggccagcaccagcggacgcactagggcggcagcctctgcaaatagccctggcttcaattttagctgaaacttcagctctgactttggttcggacttcaaggaaatggaaggaaccaggatctctaagcagacccccttctgctcccttagggctgttgattttagagctaatgatgggattcggttggggcgagggggtctccacatctttttgcccaaccctttgctaagtcaaggaaccccagtctgggctgggcatggtggctcatgcctgtaatcccagcactttgggaggccaaggttagcggatcactggaggccaggagttcgagaccagcctggccaacatattgaaaccctgtctctactaaaaaaaaaatgctaggcgtgttggctctcgcctgtaatcccagctactcgggaggctgaggcaggagactcacttgaaccccgggaggcggaggctgcagtgagcgaagatcgtgccactgcactccagcctgggcgacagagagtgtctcaaaaaaataacaaatttaaaaattgtttttaacaaaggagccccagtctggaagaatcagaacactagatctgtgatcactgccttcaaagagcccagtcagctgagagggcttaggtttgttctttgaagttacaaagacagaacgtcgaccagctgaagggagagttttggaatggcgggagctatccagcgtggacccagctgcctgcagatctggcagtagctgacacagtcccttcacaggcctagggagtgatggggttaatcacacctagaacaacagctacctcttcccagaggaatgggaccagaaatcaggcaagcccctgtgaggagttccatggcagcgcgcaggcggggcattcctaacctccagagggaaccatgagggatcctgtgttctggcagatgggccagagaatttgaacttgggaccattgtgtgagccctgggtgtgtgagcccttcaaaagtcctctcagcacgtga

SEQ ID NO: 1242601 - DNA, 4001 bp, Homo sapiens
aactctttggcctccgctagtccagcttcgaaagaagtcctcaacaaccaattcctagataatggctacaattatctggtctgggagggctctctctcatctatagagagtgcagtgacgtcacggggcacaacagattgagaaacaggagcgatgcgccatcacaaagcacgttattccgggataggacacaaagaactccagactgcccgggtctagagagcaagggagttgcaaacctaatctttctaggaaacgggggcggagcacttacccaaagggagtatgcctccgagtctgcgcacttcggtccggcacgccccttccgtacagcaatcggctaggatgctgagcgccaagtccagcgtcttgcgcaggcgcactggcggcgtaggactagacgacgacacagcggagggggcggggcccgacgcgggggcggggctagaagctcccgacgcggccgacgagggggcggagccggggcctgcctgggacggggcggaacccgctgcagccgctcgccgtagcagcgcgagtagggggcggagcccgccgcgtgcccggaagcgctcgattccccccgctgccttgatgtggcgcgtgcggagggctaggagcgcgcggctcaggggtgtctcgttggtcgctgggtccttttccccacccagagcctccccggccgccgccgcgagctgcgcgaggcagaacgagagcgagtccgtgagggttggcttcgcagccgccatcttggctcgggcctcagactccgccccgcttctcgccgctgatcccagggagcggaactggaagacagggaaatcgtcgggcaccgcctcgctgacgctgtttagcgccaccgcagtgatgcaagtcggaagttgtagttctcgaccccggaagtctgtccttgcacacgaggcgcggcagtaccttaatcgcagcgcatcctgggacgtgcgggcggtgcatgagggagatgtggtccgcgtcgagcttctcacgcctacctcgggaagcgctggaaactcttccagggccctccaggtgggccagggcctccgaacagcccagaagtccgaccacggagccttcgtgccgtgccccgcccccggcgtgcactcggcggggaccgccttttctcctctaggctcgcttcgctgccccccagcggtggtgcggcccggccttgggacggactccgagaaccccgagccgggccgaaagtgcggggtcctgaccgcgccgcagacggggagccctcgctcggtcagaggaagaagagggttaaacctaccgagaacgttcgctgccgcttcctagagtgacgggcttgtggaattttccgtttccggagctggaccccggtgtcccgagtgtcctccgctctggacgtgctcgtgagctcaggagctggcatctaggaaacggggagttcttcactcgcagcgcagtcggccgcgccagaagaggcgagggagaatccggacggggcggggcggcgggggagcgggacattcgcgtcccggggagcccccaggtcacccctggattgcgaggtggctccgcctgagcagcccttcctggtgtggtcggggcagctgcccgcccggaaaatggtcaggctctagccctggggaggaagaagcctttgccaagagcaaccgtctacaagccccaaaacctgcgagtgccggaaatgtggactgaccacagcctgcctccccggcttcattcaccaccaaggcagcccctctggtgacaagccttaccgttgtccgggttatggcagaagcttccgatgtggctctgatctggttaagcaccactgggtacacaccggtgaaaagccgtactcctgccccgagtgtgaccatcgcttcggccctatgcctgtgcctagtgtggtaagactttcagcgtcagctccaacctgatccagcaccagcgcgctcacaccgctaaaagccttaccgctgaggggactgcggcaagagtctcagccttggctccaccctgttgcagcacctgcgctccacatgggtgagaaggcctctaagtgccttgtttgtagtaagagttttgtgcacagttggaatctgctgcggcaccagcacagtcacaaagtccggaaacctgatgcttggtggtgagtgtggccagaccttcggccacagctcccacctgcccatccactaggcggcccacagcagcacccctgcgtctgcctgcagtgtggcagggccctagcgcaaagctccaacctgggccagcaccagcggacgcactagggcggcagcctctgcaaatagccctggcttcaattttagctgaaacttcagctctgactttggttcggacttcaaggaaatggaaggaaccaggatctctaagcagacccccttctgctcccttagggctgttgattttagagctaatgatgggattcggttggggcgagggggtctccacatctttttgcccaaccctttgctaagtcaaggaaccccagtctgggctgggcatggtggctcatgcctgtaatcccagcactttgggaggccaaggttagcggatcactggaggccaggagttcgagaccagcctggccaacatattgaaaccctgtctctactaaaaaaaaaatgctaggcgtgttggctctcgcctgtaatcccagctactcgggaggctgaggcaggagactcacttgaaccccgggaggcggaggctgcagtgagcgaagatcgtgccactgcactccagcctgggcgacagagagtgtctcaaaaaaataacaaatttaaaaattgtttttaacaaaggagccccagtctggaagaatcagaacactagatctgtgatcactgccttcaaagagcccagtcagctgagagggcttaggtttgttctttgaagttacaaagacagaacgtcgaccagctgaagggagagttttggaatggcgggagctatccagcgtggacccagctgcctgcagatctggcagtagctgacacagtcccttcacaggcctagggagtgatggggttaatcacacctagaacaacagctacctcttcccagaggaatgggaccagaaatcaggcaagcccctgtgaggagttccatggcagcgcgcaggcggggcattcctaacctccagagggaaccatgagggatcctgtgttctggcagatgggccagagaatttgaacttgggaccattgtgtgagccctgggtgtgtgagcccttcaaaagtcctctcagcacgtgagaactatcattatggatgatgctagggtggtgggggccccagaacagacctgtatgttgagttcaggggttgctttgttgcatttctgggcaggggcaagaggcccagggtttgtcatctgccccttcccctgccttatccccttcccttccaagttccccaggctccttttctgccagtctgtcaagagagggaagagtggcgaagagtcctttgtgcctggacattggggactgaacatggcccttttgcctgggcattgcccaaacatatatttctactggcataactttgtgtatgtgagagccaggggtaggcttcccaaagcacctgcctgtgctcagagtagacaccaagctctgaggcccttcccttccctgctgggggagggagttgtctgtttcaaggacctaatgtccaccccttgtgggacagtcctaccatcagtccaggcatctggtctgctgcccccaaattttaccatcttttttttttttttttttttttttttttgagacggagtctcactctgttgcccaggctggagtgcagtggcacgatctcagctcactgcaacctccgcctcctgggttaaagtgattctcctgcctcagcctcccgagtagctgggaccacaggcttgcgccacgatgccagccagtgtttgtatttttagtagagggtttcaccaaccctctactaaagaccagcctctagttggtc

SEQ ID NO: 1242602 - DNA, 4001 bp, Homo sapiens
ggtaaacagaaaagcttatgttttgctaggatttgttcttactgtgctggttttaattatttttatttattttttcctgcttcctaagcgactactgatttgtttggttttctaagatacgaggtcttgttacgttgcccaggctggaatgcagtggctattcacaggcagtcattgttcactgcagcctcaacctcctaggctcaagggatcctcccgcctcagcctcccaaatagctggaactacaggcgcgtaccactgcacccagcttatgctagtttttaataacttgaaatacgtatcatgcttagaatatttgcatattcgtgccatatttgtacttcgttttctccccactctgatttttttaggtagctattattgccccattttacaaggaatcctagcctcggaggggttaggtgacttttgcagatctccctttctgaaccactacaccttccagctcatcagtggggcttcagaaccttgcacagggccggacacatagttgggcactgaatgtctgctatgaacatcataactggacggtaagaatcatctgaaaaaatcaccaaataactctttggcctccgctagtccagcttcgaaagaagtcctcaacaaccaattcctagataatggctacaattatctggtctgggagggctctctctcatctatagagagtgcagtgacgtcacggggcacaacagattgagaaacaggagcgatgcgccatcacaaagcacgttattccgggataggacacaaagaactccagactgcccgggtctagagagcaagggagttgcaaacctaatctttctaggaaacgggggcggagcacttacccaaagggagtatgcctccgagtctgcgcacttcggtccggcacgccccttccgtacagcaatcggctaggatgctgagcgccaagtccagcgtcttgcgcaggcgcactggcggcgtaggactagacgacgacacagcggagggggcggggcccgacgcgggggcggggctagaagctcccgacgcggccgacgagggggcggagccggggcctgcctgggacggggcggaacccgctgcagccgctcgccgtagcagcgcgagtagggggcggagcccgccgcgtgcccggaagcgctcgattccccccgctgccttgatgtggcgcgtgcggagggctaggagcgcgcggctcaggggtgtctcgttggtcgctgggtccttttccccacccagagcctccccggccgccgccgcgagctgcgcgaggcagaacgagagcgagtccgtgagggttggcttcgcagccgccatcttggctcgggcctcagactccgccccgcttctcgccgctgatcccagggagcggaactggaagacagggaaatcgtcgggcaccgcctcgctgacgctgtttagcgccaccgcagtgatgcaagtcggaagttgtagttctcgaccccggaagtctgtccttgcacacgaggcgcggcagtaccttaatcgcagcgcatcctgggacgtgcgggcggtgcatgagggagatgtggtccgcgtcgagcttctcacgcctacctcgggaagcgctggaaactcttccagggccctccaggtgggccagggcctccgaacagcccagaagtccgaccacggagccttcgtgccgtgccccgcccccggcgtgcactcggcggggaccgccttttctcctctaggctcgcttcgctgccccccagcggtggtgcggcccggccttgggacggactccgagaaccccgagccgggccgaaagtgcggggtcctgaccgcgccgcagacggggagccctcgctcggtcagaggaagaagagggttaaacctaccgagaacgttcgctgccgcttcctagagtgacgggcttgtggaattttccgtttccggagctggaccccggtgtcccgagtgtcctccgctctggacgtgctcgtgagctcaggagctggcatctaggaaacggggagttcttcactcgcagcgcagtcggccgcgccagaagaggcgagggagaatccggacggggcggggcggcgggggagcgggacattcgcgtcccggggagcccccaggtcacccctggattgcgaggtggctccgcctgagcagcccttcctggtgtggtcggggcagctgcccgcccggaaaatggtcaggctctagccctggggaggaagaagcctttgccaagagcaaccgtctacaagccccaaaacctgcgagtgccggaaatgtggactgaccacagcctgcctccccggcttcattcaccaccaaggcagcccctctggtgacaagccttaccgttgtccgggttatggcagaagcttccgatgtggctctgatctggttaagcaccactgggtacacaccggtgaaaagccgtactcctgccccgagtgtgaccatcgcttcggccctatgcctgtgcctagtgtggtaagactttcagcgtcagctccaacctgatccagcaccagcgcgctcacaccgctaaaagccttaccgctgaggggactgcggcaagagtctcagccttggctccaccctgttgcagcacctgcgctccacatgggtgagaaggcctctaagtgccttgtttgtagtaagagttttgtgcacagttggaatctgctgcggcaccagcacagtcacaaagtccggaaacctgatgcttggtggtgagtgtggccagaccttcggccacagctcccacctgcccatccactaggcggcccacagcagcacccctgcgtctgcctgcagtgtggcagggccctagcgcaaagctccaacctgggccagcaccagcggacgcactagggcggcagcctctgcaaatagccctggcttcaattttagctgaaacttcagctctgactttggttcggacttcaaggaaatggaaggaaccaggatctctaagcagacccccttctgctcccttagggctgttgattttagagctaatgatgggattcggttggggcgagggggtctccacatctttttgcccaaccctttgctaagtcaaggaaccccagtctgggctgggcatggtggctcatgcctgtaatcccagcactttgggaggccaaggttagcggatcactggaggccaggagttcgagaccagcctggccaacatattgaaaccctgtctctactaaaaaaaaaatgctaggcgtgttggctctcgcctgtaatcccagctactcgggaggctgaggcaggagactcacttgaaccccgggaggcggaggctgcagtgagcgaagatcgtgccactgcactccagcctgggcgacagagagtgtctcaaaaaaataacaaatttaaaaattgtttttaacaaaggagccccagtctggaagaatcagaacactagatctgtgatcactgccttcaaagagcccagtcagctgagagggcttaggtttgttctttgaagttacaaagacagaacgtcgaccagctgaagggagagttttggaatggcgggagctatccagcgtggacccagctgcctgcagatctggcagtagctgacacagtcccttcacaggcctagggagtgatggggttaatcacacctagaacaacagctacctcttcccagaggaatgggaccagaaatcaggcaagcccctgtgaggagttccatggcagcgcgcaggcggggcattcctaacctccagagggaaccatgagggatcctgtgttctggcagatgggccagagaatttgaacttgggaccattgtgtgagccctgggtgtgtgagcccttcaaaagtcctctcagcacgtgagaactatcattatggatgatgctagggtggtgggggccccagaacagacctgtatgttgagttcaggggttgctttgttgcatttctgggcaggggcaagaggcccagggtttgtcatctgccccttcccctgccttatccc

SEQ ID NO: 1242603 - DNA, 4001 bp, Homo sapiens
aagaaggtgtagggctaggcacggtggctcatgcctgtaatcccagcactttgggaggccgaggcggattgatcacgaggtcaggagatggagaccatcctggctaacatggtgaaaccctgtcttcactaaaaatacaaaataaaaaaaaattagccaggtgtagtggcaggtgcctgtagtcccagatactcgggaggctgaggcaggagaatggtatgaacccgggaggtggagcttgcagtgagccaagatcgtgccactgcactctcgcctgggcgacagagcgagactcctcaaaaaagaaaaaagtgtaggcttcaggatcagagagactagagcacttaactagaatgttctagactgttgaaagctttcttttttaaatttcagcttgtgtttatgagtactttcttgtcacccaggctggagtgcagtagcacaatctcagctcactgcagcctcaaactgctgagctccagtgaacctcccacctcaccctctccagtagctgggaccataggcatgggccaccgcgcccggctaattgttttattatttgtagagacaaggtctcactgtgttgtccaggctttttatgagtactatttagggcaagtaatactgatagtgctataaatatttcttttaaatacgtagaacaaaaggtcggggggagagccaaggtgaagaaacgcagtacagatgggaatgaccacggcaaagcttatgaaggtggtgtgcagataaccgaggctgaggaaatgctgctgtgggtggcaacagggagccatggaagaagagaggcacaatgagaaccagacagcagacggctctggcggagagaagggtctgggggggaaatcatcgaggcaaggaggttgtcagtaggcggcagctacttacccagatggcatctgacccgggcattggtgggcccacagcggccctcgagccgggccccaggcaggagaacggaaaagccggcattgccgaaggtgttggcactcataaagcttcgaagccccctcagtgcccgataggcccccgggcaccggcggcagttgctgggttggcaccggcctgcttggtacagcaggagctggtagcacccgggggccagaggtggggaccagccccgaggcggaggggtagtccctgagaagtcccagctcacagccccgaagtcccgcaaaatggcagggaagctgctctccaggagctccacgtcgtgccgctgggcgtcccgcggcacaaagggggctgaaggcaggtctggtaggaaaagcaggcctgggcgctgaatacctaggacccctggccctctcccagggcctgggccaccctgagctgcccgcctcactctacccatcccagcccaggagtagcgccttgcgtaggcccgaagccgccggctcactaggccttccgtcctaggtccttccccgggatccccaggaccccctgggcttggcccgccggcctccgagcatcccacaggcccaccacgaacacccccagctcggctcccagcccctagggcctgcatgtcttgggagcccaggcggtagcagtaccagaggaacagggaagtgagggccccgaagagcaaggtgagggccgaggaggccaggggtagtggccacgggagcatgatcagggaggccctggccaagaggcctggggcgtcctccggaccccagttcccctgtccccccagctccccacctgtcccttccatggctgccccctggctccccgctggactgtttcccttccacattccactctgggctgtctctctctccttccgcggtcctctctccacgctgaagctccctctcccctccttcatgcacctccaaccctcctctctcctttctctcccctttctctctccttctacctcttcttcctcctctccctctgtcgcctcctcaccctcttctttctccttccagcagcctcctctctctcgctctgcttctctctcccacctcaatctccccctttcctccccacccccgcttttcgctcgctctctctccccgcttcctcctagctcccctgggcagcggttcctaccctgcctggacctgcagtcccgggaacccgcagcctgtcttcctccgcggcagcttctttctctccggcctcactgctctctccttgccctcgctcctcactagccccgaccctgcggtcctgcctggctctcgctccctctctcctactcgctccttcctgggctcccactcaccctgacgtcactccttcccggagccctctcagctcagccacccccgaaccctcccagtggcacagcaaatcagccgggtgccgggggaggggggagagttgtcgctggaggtgcctccccaccccccccgcccggaaagggcgccacgtggggcgcaggggccacggtgccagcctccagccgtcccgcaatgcgaaagaaggggcgggtcgtatcgggcggggcctgaggggcggggcctgaggggcggggcgagcgcggactgacggctgggcaggcgcccgggactgcgggcaaggatgctgaggccagtccgtcgggcggctggtccgtcggtcggtcggcctgtgactcccgctggccctaggcagcccgggagcccgcgagcctggcaaacaccgaaagcggcctcagccaatcgcgggcggcgtcgggccgggcccgccccggcggggcgaggggagctgtccgcgcgccgctggtgctgaaaagggcgctccggagggaaaatcagagccgaggccgcctgttagctggccggggtcagggtttatggaagaggaggggtctgtctctcctccccaaaccccggcccgtcacccacgagacttgtcacaatcgtggaagctctctattcccctggaggagggagagcccattccacccgagctactgtaaaaggggaagggaagccccttgggaggtctgaatgtgaacagggggcataattgggggcctagcaggcgcgaaccaagctatgcagcccctcggcaccctgggaagaggagattcagattccagatgtgctggaatggcaggcggagggggctaattactgctgggaccagagagtttcctttgcctcccctaggggccgcgggagtgaggattacggccctggctcgtatgatccctccctcctccatctgcacttcctcctcctccctccccgtcaaataaatcccaggcccctccctccgcccgtccccaggatctgacgtgggctcgatacctttctcagcttctccctcccgcagctccagtgcccgagcttcggctctcccagttccccaacccaccccttcccctccccgacaagccccgctagagcccagtggagaccccctcgatcctcgaccccaccctaaacccccagaagctgtctttctcctccccagtcccctagcttggggtccagacagcccagtggacccaggcgcctgagcaggagggtaacccaggccacccggccccttcggccctctcggccccaccccctgcagccggagccgcgccccctccaccacagagccgcgagaagaggacagaggagactgagcaaaggggggtgggctccaggcgacccctagcccaattctgcccctccatcccaaggggcagagaaattgtctttctttgctgactcctacgaggaaaaaaaaaaaaaaaaaaaaaacaattaaagggaaagataaacggagacggaggaaaggtggcagccagattacttagagaggcacagaggagagagatcggggtgagtcgccatggggactcccagggcccagcacccgccgcctccccagctgctgttcctaattctgctgagctgtccctggatccagggtaaggacatgagactgtgggggtgggccccaggaaggcgtccagcggggtcctccaccctcctttctcttaatatcctgggtcttccgagcacatgggggaggggagaggcaca

SEQ ID NO: 1242604 - DNA, 4001 bp, Homo sapiens
agtcgggcgcctataatcccagctacttgcaaggctgaggcaggagaatcacttgaacccggagggaggaggttgcagtgagccgagatcgcgccacttcactccagcctgagccaaagagcgaatctctgcctcacaaagaaaaataaataagtaaaataaaataaaataaacgagatagataagtcaccgcagtgtgtgtgtgtccgggtggcggggggagggggggggagtaaaatagactgacatagaatgagagaataagattttttggtattttgtatcatctcgctcaacaatgagaactaatactcttgcgcatttaaagttgtattttatttttaactatccaatatattaaactttgattacatcaaatgaaatagattgtgcacactcactataagagagctatgatatatgcagaagcaaaggtgcagggatcatgcaatagtttcgtaccagatttcaagataccaagtagcaaggaaacacaatggaattgaaggctgaggtgaagtacaggcataaggcaaggaaagcagaacattcaagatgtacctatatacaccagttcttaaaacacgcaaatcatttccaataaggcactggctcatgtatttctgttgaggcagaagtcaatcttaggatgtggtctgtacatatctgcagataagactgagagtgaagtaaatttgattaagatcggagtcaacacttctacaaacgtattgcagaataaacgagctaagaagaaaggcatacttcacaaaagctgaattcagtgttattagtccttcattcagatgcttcatttttgcattttcaattgctttcctgtgatataacttatctttatcttggtcttccccatttgttttgcaaatagttatgtcgcaggtcatttactggctacaataaatatgacaaaatcataataaaaacagtattaagtcgcaatctagaataacaatttaagtgaatatgacataatttttctaatgtggactattcagtacaactgtcctcttcttccatacatattaaccatatgcaagtcttcagaacagaaaaagccattgtgtcgtaaaggaaggaacacgtggttagaaacttcattttcaacacagaaacacggaaaggtagaaagtccgtttccttaagtgcggtaaggttttaacaaaaataaggcaaaaaaaattattgcgtcctctctttctcaaacttgcttgccaaacttggagaaaactggttagagaagggcgataagatggaattttcttaaaaacatattcataaaaacgaacttctaccttaaggaaatcgtcttccttaaatcctaccatccttacaccggcaagctcagaggtacgggatttcagcattttactcagaattttgtatttttcctgatgctctggtccctactttttaacaaacttcaaggccgccaggcgagatccagttgccttctggcacctgacttcattagatgattaaaacaactcaagaaaatttggcaatgggacactaaaattggtggaggtggagatttatccgttaatttctgaaagcattccggacaagagcgagcttttacttacccctcaggacaaaaaacacgcaccacttccctccgcagtccctaaccccagtgccgcccggacctgaggccgcacaccactcccgcttcaccagtatccctctgcgaaaacggtggagacgcgcccgtccgcccctcaggggcctcttcccggacctgtcagacggccccgcggacgcttttcagtcagggcagcttcgccgcaaacgtccggtaggcccggcgctccgaggcctccggggccggccctcagagaggcgaccgacgctcctagagccgccaccccgccaatcgccgctctcgcaggacactcgcccggccccaacgtacctagagcgacgacgcaccagccgcagcaatacccacagccacttcgaaccgcagccgttaacaatgctggtccggccaggacctgctgaagtaggtctccctacgcccacccccagctgattatggaccaatggcagcgcgaatatgcggcagcccagccagtcaggcacagccagctagagtgggcggggcgaagggtcgcgaggggaaatggaagtaggctgaggggcgcctggggttcgcctccgtgggcgcttcttccggtcagccaccggggcttacccgccatagcgcagatgcaggctcctgagctgggcctttcttttgagtgactcgtgtgaagatttagactttcgaaacttattaggaataagaccttatttacaaaaacaactcctcacccggtcggtagtttccgatttgaattttctaatattgtttgaaaatatttatcttatttacttttttggacgactccttaaattttgtgactcaggagattggtcctagcaccgtagtcttttttttttttttttttttttgagacggagtttcgctcttgtcgcccaggctggagttcagtggcgtgatctcagctcactgtacccccatttcccacctcccaggttcaagcgattctcctgccttagcctcccgagtagctgggaccacaggtgtgcaccaccatgcccggctaatttttgtacttttaatagacatggggtttcactatgttggccaggctggtcttgaactcctggacctcaggtgatccgccacctctgcctccccatatgttgggattacaggcatgagccactgcacccacccgcaccatagccttgagtttgctaaattgtcccaggaacctgccagccttggctgcttgtgatttcatgaggcccgatgccttaggtggctgtgcacttggatgccatgaactcactcaacaggtggtcactgaatgcccactgtgtagaaaatacaggaaatacaacagtagattagatccataatgccctctttttcattaattaatttatttatttatttgacagagttttgctcttgttgcctaggctggagtgcaatggcgcgatctcggctcaccacaacctccgcctcccgggttcaagcgcttctcctacctctgcccccaacaagtagctgggattataggcatgcgccacagtgcctggctaagttttttttttatttttagtagagacggggtttctcaatgttgatcaggctggtcatgaactcccgacctcaggtaatccacctgcttcggcctcccaaagtgctgggattacaggcgtgagccaccacgcttgtcatgaggctagagctgcctgccttgtcacttccagttaggagaaaaatgaggcaagtccggacaatctaggttgggtcatcaatggaataacatactccaaccagccagttccccaaatatgctccagggatctaggggtaatctttaatgtcaatcctatttttataattatactatttttataataatataaagatgattttgcttttttcattctctgagtcaggagagtacatggaattttctagaagcctctggaaaatcgacgggtgatattgctacagattgaatacagaagcagacatgagaatctaactaccaacctgggcaacaaagtgagatacccacttttctagaaaagtaaaaataaaaagttagctgcatccttccacctacacgggaggctgagaggacgggaggatcgcttaagcttaggagttagggactgcagtgagctgtgatagtgtcactgcactccaccctgggtgatagagcaagagactgtcttagaaaagagagagagagaggccaagcgcagtggctcacatctgtaatcccagcactttgggaggctgaggcagccggatcatgaggtcaatagttcgagaccagcctggccaacatagtgaaaccccatctctactaaaaatacaaaaattagccgggcatggtggcgcgtgcctgtaatcccagctactcgggaggctgaagcaggagaatcgactgaac

SEQ ID NO: 1242605 - DNA, 4001 bp, Homo sapiens
ttcccagccagccttcctcccggttccttgtccttacccctaccttcttccagtactttgaaaacaggtatcaacattgatgtttgaggcctggcgcagtggctcactcttgtaatcccagtactttgggaggctgaagcgggcggatcacttgaggtcaggagttcaagaccagcccgaccaacatggcgaaaccctgtttctactaataaaacaaaaattagtcgggcgtggtggagcatgcctgtagtcccaactactcgggaggctgaggcaagagaactgcttgaacccgagaagcggaagttgcagtgagccgagatcatgccactgcactccagtctgggcgacagagtgagactgtctcaaacaaacaaacaaaaagaacaatgtttgaggcagggcatggtggcaggagcctatagtctcagctactggggaggctaaagcaggaggatcacttgagctcaagagcctgacagcaacctgggttaacagagcaagaccctgaaaagccttctatgtagtaaccagacaaggtacagatctccatactgggcaccatcatatagatggctattgcatcacacagacaaccttcattaaaggaagacaccaagacaggagctgctcaggggccactgggcactgcggttagaaagccaggacaagacaggaaagtcagtctgcttgtcaagaaaaaaatgatggatctggtgaggtataattcctgctaaaaaaaagtttgccctggctgggcacagtggctcacacctgtaatcccagccctttaggaggctgaggcgggtggatcacttgaggtcaggagttcgagaccagcctggccaacatggtgaaaccccacctctactaaaaatacaaaaattagctgggcgtggtggtatgcacctgtaatcccagctactagggaggctgaggcaggagactcgcttgaacctgggaggcagaggttgcagtgatccaagatggcgccactgcactccagcctgggcgacagagtgagactctgtctcaaacaaaacaaaaaaaacccaacataattagaaacaaacctactgtatactaaccagtcctgaaaggcaaatggtatctttatgttcaacagatgtttaccagggtctttaaagagctagagctcctaacaacaactccacagaaaggaacaacagaaactattaagaaatagttcatccacctaagttatgattaaataaaggatttaggtcggtcgcggtggctcacacctggaatcccagcactttaagaggctgaggtgggtggatcacctgagggtcaggagttcgagaccaagctggccatcatggtgcaacctgtctttactaaaaatacaaaaaaaaattagcagggtgtggtggcaggtgcctgtaatcccagctactagggaggctgaggcaggagaactgcttgaaccccggaggcagaggttacagtgagctgagatggcgccactgcgctccagcctgggtgatggagtgagactctgtctcaaaaacaaacaaaaaaacacaaaaacaatagggaagaaaaggatttagttaaaatttagtatgaaaacaaaacaacaggttgaaagccattcccagagttacacttgagtgctgaaagaaacccagagcttttcagtccaacaattcggccccacctgcacggtcttcctcagcatacctcaggtacatttcctgactggctccctgatcttcaattgagaacgttgttgcatcccggtttagatggtggtaagagcagatcactcttcattggcgacacatctgtcctactagagactacaacctcagagttttctgctgtgaaattcttatcagaagcctgactatgggcagacagaacatgcaatattctgggtactctaaatttactcctgatcatcaaaagctacatattcgcagaactgctttcaatgacttgcgcttttgaattatgtcactgctggcctagagtggtggaaggaaacttgccattgtaatgactgagagattgtgacttaacaggtccggggtggggctggacatctggatttttaataagcttgtcacagatgtgtcccaaggttgaaaatgactgccctgttttgcataacgtggagggttgttgagactattgtcatggtgtatttactgtgtccccctcttaaagaagagccacaggggcaatttcccttaggtctcagtcctgagctgatcttaccaacaccgtgaaactgactgatggtgtttagaggcaaacctaccgctcctttaaaacatttttttattcataatcgacacacagtaattattcctactgatggggtgcggtgtgcagcatggatggacatatacattgcatagtgatcaagtcagagtgtttaacatgtcctcgacctcaaacgtattgtctcttggtggtgagaacatttaaaaccctctcttctagttattgtggcacatacagtccactgggcaggacccaagggcggcattgtgggtgtcgtggcaagcacagggctttagaaccagaggccccggtttaaagccccgcatcatctaggttgcataatctgtttctcattaatataatggagacgatgcgtccctcgccaaaacgccgttaagaactcacaggcaaaaaagtgtaaaaagcctgggccggcgtccggcacgacactcggggccagggagccagggaaccagggaactggcgcgtacggcggacccggggctcccagctcctcctcccccccagaggccgcacctgcggcgcctgccgcgagggttcgagagccgcctccggccggggagggcagaggccggtggggcagcggcagcggcagcgcgcagggcgctcgtccccccgaggccggcttcgcgcgccggcgccgggcgctttgttggagccaggcccggccccccgggccgccggccgcgtcgggctcacctgcaggcggtggctcttgactaggtgcatgttgagcgcggggctgttgggcaggatcttgccgcagccgcgcacggtgcacaggatgttggtccgcacggcccgggacagctcgctcaccgacggctggatcagctcccccgccggcggcgcggggacagcgggctgctgcgtcgcccccgcgggccgcggccggctgcccctcagtcggggtcccgggggcacccacgggcccgaggcggcggcggcggctcctgtcgtggccgccgggacggcccgggcacccgccgccagagccgcggaccccgccgccgccgccgcctccgaggccgccatggctcccgcacggccgcccggcccagttcgtaggccccgcccccgccgcagccacttccggcagggggcgaggccgccaggcttgttagcatccggcgggcccaggcggccgcggcgccccctgccggccgcggagggcgcgccttggagggagaggactttaggtgacgccgccaggaggcgaaatttcacctgccagcaggtaaaaggtattgccccgcctctctaatcgatccattcttcctaggaaagtgacttcaggcagtagtcacataaaagaaaaagcaatacgttgagcaatgcgtttacttcccaaagattagaaacaacccaaatgtctagtggcaggtgaggcagaagtacactgatttccgccgttgtttattacctaggccttactgggtaccaggtgggtctggtggatgcacttttcatgctgtgtctcattttgtcttcaaaacgactgtagcgggtatgtactgtaacttgccccaccttgtgcagagaaggacatttaggcttatataaattaagtaacttgacctagaccacactatacaaatgaaaagattgttattattgataggattaatcattttaagaaggctggatttgcttgcttctattttagctgctgaaattaggattactgtttgggagacactgcagttcagtatacgattacaaaa

SEQ ID NO: 1242606 - DNA, 4001 bp, Homo sapiens
caagctggccatcatggtgcaacctgtctttactaaaaatacaaaaaaaaattagcagggtgtggtggcaggtgcctgtaatcccagctactagggaggctgaggcaggagaactgcttgaaccccggaggcagaggttacagtgagctgagatggcgccactgcgctccagcctgggtgatggagtgagactctgtctcaaaaacaaacaaaaaaacacaaaaacaatagggaagaaaaggatttagttaaaatttagtatgaaaacaaaacaacaggttgaaagccattcccagagttacacttgagtgctgaaagaaacccagagcttttcagtccaacaattcggccccacctgcacggtcttcctcagcatacctcaggtacatttcctgactggctccctgatcttcaattgagaacgttgttgcatcccggtttagatggtggtaagagcagatcactcttcattggcgacacatctgtcctactagagactacaacctcagagttttctgctgtgaaattcttatcagaagcctgactatgggcagacagaacatgcaatattctgggtactctaaatttactcctgatcatcaaaagctacatattcgcagaactgctttcaatgacttgcgcttttgaattatgtcactgctggcctagagtggtggaaggaaacttgccattgtaatgactgagagattgtgacttaacaggtccggggtggggctggacatctggatttttaataagcttgtcacagatgtgtcccaaggttgaaaatgactgccctgttttgcataacgtggagggttgttgagactattgtcatggtgtatttactgtgtccccctcttaaagaagagccacaggggcaatttcccttaggtctcagtcctgagctgatcttaccaacaccgtgaaactgactgatggtgtttagaggcaaacctaccgctcctttaaaacatttttttattcataatcgacacacagtaattattcctactgatggggtgcggtgtgcagcatggatggacatatacattgcatagtgatcaagtcagagtgtttaacatgtcctcgacctcaaacgtattgtctcttggtggtgagaacatttaaaaccctctcttctagttattgtggcacatacagtccactgggcaggacccaagggcggcattgtgggtgtcgtggcaagcacagggctttagaaccagaggccccggtttaaagccccgcatcatctaggttgcataatctgtttctcattaatataatggagacgatgcgtccctcgccaaaacgccgttaagaactcacaggcaaaaaagtgtaaaaagcctgggccggcgtccggcacgacactcggggccagggagccagggaaccagggaactggcgcgtacggcggacccggggctcccagctcctcctcccccccagaggccgcacctgcggcgcctgccgcgagggttcgagagccgcctccggccggggagggcagaggccggtggggcagcggcagcggcagcgcgcagggcgctcgtccccccgaggccggcttcgcgcgccggcgccgggcgctttgttggagccaggcccggccccccgggccgccggccgcgtcgggctcacctgcaggcggtggctcttgactaggtgcatgttgagcgcggggctgttgggcaggatcttgccgcagccgcgcacggtgcacaggatgttggtccgcacggcccgggacagctcgctcaccgacggctggatcagctcccccgccggcggcgcggggacagcgggctgctgcgtcgcccccgcgggccgcggccggctgcccctcagtcggggtcccgggggcacccacgggcccgaggcggcggcggcggctcctgtcgtggccgccgggacggcccgggcacccgccgccagagccgcggaccccgccgccgccgccgcctccgaggccgccatggctcccgcacggccgcccggcccagttcgtaggccccgcccccgccgcagccacttccggcagggggcgaggccgccaggcttgttagcatccggcgggcccaggcggccgcggcgccccctgccggccgcggagggcgcgccttggagggagaggactttaggtgacgccgccaggaggcgaaatttcacctgccagcaggtaaaaggtattgccccgcctctctaatcgatccattcttcctaggaaagtgacttcaggcagtagtcacataaaagaaaaagcaatacgttgagcaatgcgtttacttcccaaagattagaaacaacccaaatgtctagtggcaggtgaggcagaagtacactgatttccgccgttgtttattacctaggccttactgggtaccaggtgggtctggtggatgcacttttcatgctgtgtctcattttgtcttcaaaacgactgtagcgggtatgtactgtaacttgccccaccttgtgcagagaaggacatttaggcttatataaattaagtaacttgacctagaccacactatacaaatgaaaagattgttattattgataggattaatcattttaagaaggctggatttgcttgcttctattttagctgctgaaattaggattactgtttgggagacactgcagttcagtatacgattacaaaacttaatacttagactgggtagttcatgtaaatggacataggaggctggggtagacaaaagggaggggtgaggactgcagtgaaattggaaacacatcctttattaaaagggggcagctgctactcatctttggtatggctagagttttatgtgaaaatttccaccttttacatactagcagctatattcgttttctcttgctattaataaattaccacaaacttactgccttaacacaaatttattatcttccagctctggaggtcaaaagaaatgagactgctgggctaagatcaaggtgtcagcagggctgtattccttcccaaggctccaggggagaatctgttcacttgcctttcccagcttctagaggttgcctacattccttggcttgcggacccttcctccatctccagaatcagtaacggtgagttgagtcttcgtcacatcacatcactctgatttcttcagtagtgatccctctgattcttctattcttgaggccccctgtgatgacattgggcccattcaaatcatccaggataatttctccaactgccaagtccctttgccttgcaagataactgtgataatgtgaagtatatatttggtctttgtcctggcatgcaattcctaaaatccttggaatcagcaaattggtgtttttttgtatgctaattagttgactgatgactcacagtccctaggtagctttaggatgggactggtcactggaaagaccaaggtaggattagaggcttgagactttcagccctccccctcaacctctggggaggagacaggggctgaagcttaagctgatcaatcattcctaggtaatgaagcctccataaaatcccaaaagaaatgggtttggagaacttccagatagctgaatgcatggagtttcctggagggaggcgcactcaaagagggcatgcgtggaagctcttgccctatgcatcttttcatctgaatcctttgtaacatcccttgtaagaagtcagtctatgtgtcttcctgagttctgtgagctgccctagcaaattaattgaacatgaagagagggttgtgggaaatgcaatttatagctggttagtcagaagcgcaggtgaaacaacctggggctggcaactggcctcagaagtgggtggcagttttgtgggactgagcccttaacctatggggtctgatgatatcgccaggtagttagtgttggaattgaactggagcatacccagctggtatctgctgtagaactgattgcttatgtcaaccaagaagaggtgaaagggccaggcatggtggctcacgcctgtaatcccagca

SEQ ID NO: 1242607 - DNA, 4001 bp, Homo sapiens
aatcaccagaacctggaggcagagattgcagtgagatgagattacgccactgcactccagcctgggcaagagaacgagaccctgtctcaaaaagaaaaatctaaataaaaaatcaaagaaaatcagaggctgccctgcagatgctgtcctggacctgtcagcaccacagacacaggtggctctgctgcgcctgtaacactggggcaaagagaaagtgctatttctctcttttttttttttttgagactgggtctcactctgttgcccatgctggagtgcaattgtgcaatcttggctcactgcaacctccgcctccccattcaagtgattctcctgcctcagcctcctgagtagctgggattacaggcacctgccaccatgcccagctaatttttttgtatttttagtagagatggggttttaccatgttggccaggctactcttgaactcctgacctcaactgatccacccgcctcggcctcccaaagtatgaaagtggctatttctatcctcagtgttcagaaaccagtgagcaccaaaaaatggcttatagcctgacatttcttaaaaccaaagcaaggtagcatttgggttttcactttggaaatgacctaaaaacaaaacaaaacaaaacaaaccaggaagcagaggacaggacatgtagggggtggtcaggtcagtggaagaaggaaatcaagctagcgtctattgaattcctactgtgtgccaggaacatgcatcatcttagtcgatttcacactggattgctagccccattttatggatgaagaaactgaggctcagagggatgaaggaacttgctcagggtcacatagccaggaagtgacagtgggtcacagtctcccacctcttccccacactccatcccattccagaccaggggataggaccagaggaagaggcaagtatgggggaggtgatggaggaggaggagactggagggagggttggcctcttcttcactgttgggacatgaaggggtaaggaagggtcaacgctaacctgccaaacccccacgatggcattggcaatgaggatcaagaggatgacaaagggttcaacaaaggcagtgatggtctcttcaccttcctcaaaccaggccagcacctggggagcaggggaaaggagaatgacaggtaatgaggccccaaaacagatggagaaaggaagtggaccactgcaaaggggagaactgtgcaggagagtgcaggagccagcaggagggccgggcaccgtcggggcgctgtggccccacatccgtctgagggtctgtccatccactgcaggtcctgccaccgccttactcagcgggatgggcgcgcacagacttgcaccacttgggggattagctgggaatgctttcaggtttccctgaccaagctgctggcttagaagcgaagctcaggccaaccccccgcacagccacatccatcccacgggagccaaaacccgagaggaaaaaccctgtggtcttcgcaggcggtctggcccccgcagccctccccctcggccaaggcagggaagctccggtttcacgagggagccggagcggggatagggttacggggcctcctgcgcgcgccccgccccagctgttgccaccgccaggcagcaggcaaatgtcaaggagcaaatctgagaagggagaggagaggccctgccagcttgtgcttaacgcgacggggcctgcgttcggagaccaaggcacagggaggctttcgttgcctccagagtccccagcgaggctcacatgctgcggaagaacccgcgacatgcagatggaccgcgggatggggagtagcccccagggcgggagaggaggcagagccctggagatgccctgcgggggtgggggtgcctagggagcgcggggaagggctaaggccaggctgggcgggtaatgagggatgccagtgccctccctgaccgggcgccgggctccttggagtcatcatcacaccgccgcgctttcccgccactaggagcgagtcctcccctcgaccaatcagcgtcaggaggctggggagggcggggcaggggcgccgacgggcgcggggattggtggagcggccgtccgcccggcgcatgccgggagtggcagtggccccccgcgccgcagccggcatcgcggcgggacccggagcccggagttcgggtgggtaacccgagctctccaagctcttgaagccgcgagggtggcttagcttcggtgttttggctgagaacacccttaaagcttaaaataaaacctgcctctggggtgcaggggaggagagaggaggacgcgaatcacacccgctgctgcgcgccagcccgccccgtctgtacaatgggatgctcgggactcggacgggaggatccagtgactgcgagccccgcattcgcccgatcccagcctcacacccccagccagcccccagagaccctcccacacttacgaaggaaatgcatgcggccaggaggagaatccgcaccaggaggtcttcaaactgctctatcaccagctcccacagggtcttccctgggggaggaggcaaggggagggccccgggttaaggtctagtgggtgaaggtctgggatggagcgccctggactccggcctgcagtggggaggctctagggtggtgggcagacagcttggtgcccagagaagggctaagaagctcgcctggagtccagaaacagactcggcaaagtggggggcagttcaagggttggctgcttcaaggagaaagcgcctgggagacttctgccccggacaggactctaacctttagggagggagatttgccttttgggaagggatatttgctcaaagaatctaaagaggcagggaggagggagtgggacagggcggggtggggggtggtcatttatgagagttcagggattccagtaacttaccttcctcagcagggagctctacccaggaaaaagaagaaaaggacagattcatttggggttcagcctcatgccccccacacccaagactttgtggctaagagaatcaggccaccttgaggttcatcaagttcatcccattaaaacctcccaaaactctggatctcgggactctgttttctcagtatcttcttccccctgcgagcattggacaacggcccagctcttccttaagaaaccctgaagggagaaacgcgtgcatgcgtgtgcgtgtgttttgggggtgcaggagggcattaattaccagccgctcttccaagggacacttaccattgaggccgtatttctccagattccgcttaacttggtccggggtgaggcccgtggtctcactcaccccaaaataggccaaacattcctccgtggttttagcatgagcggcctccattgtgctcccttcctgggggccggggccggtgtgttccttccagggggttcccactcgtggggggtcttcctcagtgtgtccaactgcctgtctgcctgggtttcttctttttactctcctgccccctccaggtttttcttccctccacaaagctctgacccccgtcccacttgagcagccggccaccccccggcccccagctggtccttatgagggagcagggggaggccgggctcccccctccaccagatcagggattggctggctgagactccagcaggaggtggtcagaaaagagagatatttctgctgacagagggggaacagtggggctgcagcctgagatgtcactcatgagggacgcaaaggtagccccagccccagggaagtggggtagggagagacttcactttctgtcatctgctactgaccctgcccccccattgcctcgacttccccagctgcattgaatttcccattccaaactcatccccccagttcttcccggagccctcttccatccccggcctcacctgtccctttcctcacaccccccttcctgcctcatctgcccggagcctgtttccattgccgcagtctccttcctcctcaccccatttgctgaagca

SEQ ID NO: 1242608 - DNA, 4001 bp, Homo sapiens
cacgagggagccggagcggggatagggttacggggcctcctgcgcgcgccccgccccagctgttgccaccgccaggcagcaggcaaatgtcaaggagcaaatctgagaagggagaggagaggccctgccagcttgtgcttaacgcgacggggcctgcgttcggagaccaaggcacagggaggctttcgttgcctccagagtccccagcgaggctcacatgctgcggaagaacccgcgacatgcagatggaccgcgggatggggagtagcccccagggcgggagaggaggcagagccctggagatgccctgcgggggtgggggtgcctagggagcgcggggaagggctaaggccaggctgggcgggtaatgagggatgccagtgccctccctgaccgggcgccgggctccttggagtcatcatcacaccgccgcgctttcccgccactaggagcgagtcctcccctcgaccaatcagcgtcaggaggctggggagggcggggcaggggcgccgacgggcgcggggattggtggagcggccgtccgcccggcgcatgccgggagtggcagtggccccccgcgccgcagccggcatcgcggcgggacccggagcccggagttcgggtgggtaacccgagctctccaagctcttgaagccgcgagggtggcttagcttcggtgttttggctgagaacacccttaaagcttaaaataaaacctgcctctggggtgcaggggaggagagaggaggacgcgaatcacacccgctgctgcgcgccagcccgccccgtctgtacaatgggatgctcgggactcggacgggaggatccagtgactgcgagccccgcattcgcccgatcccagcctcacacccccagccagcccccagagaccctcccacacttacgaaggaaatgcatgcggccaggaggagaatccgcaccaggaggtcttcaaactgctctatcaccagctcccacagggtcttccctgggggaggaggcaaggggagggccccgggttaaggtctagtgggtgaaggtctgggatggagcgccctggactccggcctgcagtggggaggctctagggtggtgggcagacagcttggtgcccagagaagggctaagaagctcgcctggagtccagaaacagactcggcaaagtggggggcagttcaagggttggctgcttcaaggagaaagcgcctgggagacttctgccccggacaggactctaacctttagggagggagatttgccttttgggaagggatatttgctcaaagaatctaaagaggcagggaggagggagtgggacagggcggggtggggggtggtcatttatgagagttcagggattccagtaacttaccttcctcagcagggagctctacccaggaaaaagaagaaaaggacagattcatttggggttcagcctcatgccccccacacccaagactttgtggctaagagaatcaggccaccttgaggttcatcaagttcatcccattaaaacctcccaaaactctggatctcgggactctgttttctcagtatcttcttccccctgcgagcattggacaacggcccagctcttccttaagaaaccctgaagggagaaacgcgtgcatgcgtgtgcgtgtgttttgggggtgcaggagggcattaattaccagccgctcttccaagggacacttaccattgaggccgtatttctccagattccgcttaacttggtccggggtgaggcccgtggtctcactcaccccaaaataggccaaacattcctccgtggttttagcatgagcggcctccattgtgctcccttcctgggggccggggccggtgtgttccttccagggggttcccactcgtggggggtcttcctcagtgtgtccaactgcctgtctgcctgggtttcttctttttactctcctgccccctccaggtttttcttccctccacaaagctctgacccccgtcccacttgagcagccggccaccccccggcccccagctggtccttatgagggagcagggggaggccgggctcccccctccaccagatcagggattggctggctgagactccagcaggaggtggtcagaaaagagagatatttctgctgacagagggggaacagtggggctgcagcctgagatgtcactcatgagggacgcaaaggtagccccagccccagggaagtggggtagggagagacttcactttctgtcatctgctactgaccctgcccccccattgcctcgacttccccagctgcattgaatttcccattccaaactcatccccccagttcttcccggagccctcttccatccccggcctcacctgtccctttcctcacaccccccttcctgcctcatctgcccggagcctgtttccattgccgcagtctccttcctcctcaccccatttgctgaagcagtggcagagataccccaagcctttgggggactgatgaagggagaacatcttttgggggctagaggaagtgagtggctcctagagggacaaggggaagtgaggggagagagtcaaggggacagggccgaagatggtaaccctaccctagggaggggttgccacagccatcaacaagggatttagtgtccaggccctggtgagcaaagccagcactgcctgtctctccccaaaactgcccccccccttccccatcgctctaactcagcctctgggaacagagccctgagggcccccccatcctggatagggaatccccaccccacccccaagaaaatgggacaccaaggcagccaagtaacccaagaggctacagaatgtgctgatggcagagggggaggggtaactgtctcaggatgggggcaggggtcaccccaagtcgtgcactgagggtcacctcatcccacactgtgctctaaccaacggggtttctgtggccagccccagaggcctgtggtctgcgctgcactctgccctgctgcatctgtccacgaggggaacaggatcaggcccatgctgtgtgcgtgcaggagctaggcagaccccacagaaaggtgtcggggcctggggaagctggaccaagcaggggctccagaccaaaggaatggggaagggtggacttctggggacaggtctgggggaaataaggacagatgtctagacctagggggaaagggagcagagacacagagccaccagggtcagagggaagtccgagcagcagtggggaagagggacagcagggagccaggtgggcggggaccccggcgctgggtgcaaagccacaagttgttgctgaatgctggccttggtgtcagcttcctcagagaagcagctgctctgagctgcccctccccacccctgctccaggatgggggcgtctcttggttaccaccagggcagctgctggaggagccgagggagggtaccaggggtgcaggaaggggaggacaggcaggcagaaaggctggatgagagtcagggtgaaaggtcagtgaggggaaggggcctggtgccctgggctcaagtccgtcctctgtctaggcctgtttcctgaaatgagcagaggcatgtggacttcctaagtgtggcttcttaaggctgctttccattctggggctcaaactccgaagcagaggacagaataggagacagcagagcaaagaaaagggaggcccccacttttggggagggggatggcagcaggggtggatggaacttgagggttcagcctcccagatgcatcccttctgcctggacttgggtgaggcgcggcctcctgggtgagttgaggacaaggtgctccttcctgcctccttttcacagttccaacaaacccctcccctgaagcagaatcctgctgtgacctgaggggagtgggggacagtgggctgaattgggggtgcaggagagcattagcagcctctcttccaagagacacagcccccggcacctccacccggcccagcacccaccgtctccgctggactcaggctca

SEQ ID NO: 1242609 - DNA, 4001 bp, Homo sapiens
ccagccacccggcctccccacctccctccctcctcacacttcccatcgatcttcattgccatttcctgggtttgcacatttcctgggtttgcacaaggctgcctctggagacagcatggcttctttctcagctggcctttggtgtcagtgctggtatcacccgcctcctggcgctgcacactgcccatcatcacgcacccagggcctcaggatgctgctgagagcaccccggtccacagccaggtgggagagcacactgacagaccggctgaacacctgtcagacctctgagaactctcctgcaaagctttggagggacgagtccacctggcacagagatcaaactctcccagcatctcccttgaggttacatcatccatgcacctgcattcctggacatcctgtgaaacctgatggtaaccaactacacaccaggagagtttgaaaaatacctggcctgatgcaagaatcaaaagatggaaaggaaaaaacaggaatggcaacataggaaaggcaacctgtgatggcaaataaacttcaaactcctttagcagaatgtatcgcagaagcagagaaatggatcacagccaattaattgaactctatatcctatcaatattaacatgccacttcagaaaaatcgagattgctcaaaaactgctagttacgtggtcctgtggcctaccaccctaagaccagaattcttacatcaacagggatgtataaaacactatttttaaaaaagcacaaaacactatttttaaaaaagcacgaatacttaatctcacaaacaaaatgttttgaccattagtattctttgggagaaaaaaataaaattttaagtcaaatattttttcagctaatttctttttttaattaaaaggtaagtttacctttgaagtttcctttcactggtcaaaaggccatcgccaagtcatatttctaattagcaacccaggggactcgttcagaaatgttacttttgaacgactgcttaagcgtaaatgaaaaaaaaaaaagtgcaacgaccctctggcgtgcagagaaacgcttctgcagaaattcagtgcccccctgaccttaaagcatgcaacgagttctgtttgcgaagctaaaaagaagggtgttgggtcaccctcaagcctggcttcacccctggcttccaagaatccaaggaacaggaggggctttatttgacagctttgccacttcgttccctcatgaaccgccctgccctggcaccctgctgctttatcccagagggtccctgaaggttgcaaagcaggcatacagctctgagtgactttctaaaagtacctgactgtaggaagtgaggctgggaggtccctcagctccaactttgctttctattattgctacaacatttcagcaatcttttgttttttgcatccctctaattttattttccaatttaagttttaaaaatccataaagcagcccaagtctggagacccaggaattttaattctctggagtcagagaaacctaggttaagttcccagccaggtcacttcctagctccgtgccccttagggaatatacttaaccactctcggcctcagtttctcaaccacaaaatgggttcacgtgagggttccatgctgagctccccgcgccagagcgcagatgagagcgcggttgctgtgaggacagcttctttccagagccaggggaggagggcgagttcgcggatcgcagcgcgaacgcggggtctcgggccggggacggttacgacggaggggatggggggtcgggtcgcacgcccggcgcggagtcgcggggactcaccaaggcttcctcttcgtccttctccagcgcctggtactggcggcccccgcccgagaagccgagtttcttcaggaactcggagacgcgtccctcgaccatggtgagcgggcgcaggcgttgcctgcgtccctaggtccccggcgaggcccgggatggctgcgcgcgcccaagcctcctgggccggacccggttaccaggtagctgtctacctgcccgcggcaggtgaggccccgcccctggggcggggctgcgcacagggaggtgccggctcacccggccccgccccgcgagctcgcctgggaccccaggggctctggggacagcgccggctggccatgaaaggcccagggagaggctgcgtcgcctcagggcttgggctgtttcccaaacttacagatcctaagaatcacctggagtgggggaggtggaggagcaaatgctggtttaaaatccggattcccagacccctccctgcccagtcacggtttggagccgccgggagctgggtttttaacgagccccaggtgatcctcttgaggaacccagggtgggcggctctaaggcgccgggagcgaggtggctggagctcagtcagactcacacctgcggctgtgcactctggacgggtcacgtggcctttctgagcctcggcaacctagcctgtcattgagcggggagcagcagaaggctaagacccccacctccagggccctgggagtgagtccaggaacaggagcgactgagagccctgctgcctttggcgcctgcatggtctcggatggtcagggcccctgtcctcgtctgcaggatgagcgccgctcttgctcgtcgtgggacctgagcaggtttcttatatttttagcgccttggtttactgctctgcagaatggccaccacgatagcgcctccttcacagtgacatggagaggccccagcggacagtgctgtacaggaaggtctcgagcagggcttggagtagagaatgtgctggtgtccccatgacaccatcctcctcctcttcatcatcagaaggtgctgggctcaaatggctcccaaagtatgtgagtccatacgcagtgtagacagttgccagcagccaagtgggtgctttgaagttccagggctttctttggcttcaggtaggactagatccgtaactagacccaccacttagcagagggggagctctggggaagtccgtgccacccgcctttccgctggcttcctcatctctacagggaagttactcacgggctacaggaggtgccctctgcatttgtccacgaaattcagccaccccttttgagcaaatatttgccacctacctcaattgctcccgagggttgactccaggccacgaaaacctgcagggcagttccagtgccccttcttgtatctcctgcatcttcctctttcaaggaaacaaaggctacggtatcagcctggccccactccccagtttcaacaaaggtgcaggaataatggtaacagcaaacctctgatgtgagtgagtccagatttgaatcccaggaatgttcctttccgaccttgggcaattttcttcacctctctccacctcagtttactcatccataaaatggggatgtcactacctacccgtaggagtcagggtcccagtaggaaatagtaatttgaggagagtttgagaaacagactttttacaaagctgtggggaagacgtagagaaaccagaagtgcttgtgtcattaacgaagactagcaaagagtgagaagtggctttggtcccacccaaggcctgaagggccagacgagagaggagttacctggagggggagctctggggcactgataacttctgcagagggcaactgcttagatcaaaagccagaaagcaacagagcgccaaggatgcagcctcctgggcagagaatccaaagaagggtggagagtggtgtagaggaggctgggcaaggtggctcacacctctaatcccagcactttgagaggccaaggtgggcggatcacctgaggtcaggagttcgagtccagcctggccaacatggggaaaccctgtcactagtaaaaatagaaaaattagccaggtgtgctggcatgcgcctgtaatcccagctacttcggaggctgaggcaggagaatcgcttgaacccggaaggtggaggttgcagggagccaagattgtgccactgcac

SEQ ID NO: 1242610 - DNA, 4001 bp, Homo sapiens
caaactcttttttttctttatatacaataacaagcagagactcagcagacctgtggctgcccgcccgggagccgagcgctgtcagggaactcaccgtggcgatgctgacggcgtcctcatactccttggtgaggacactcaccagggcagagcccagcagcagcaggatcagggggttcttaaactgaagaggaaataacagggtggggcacgttctttagtctcagggaccagaatgggtttcttactgtgcagaagtttgtgtgacaggggtctcagttcagggccaggcttccaggtcaacaccatggtgaccgagggctggggagaccacccccatgcagtggtcctcctctgcctggaactccacccaattgaccctcccaggtcccagtactgaccccctgaagacaccggcctcagccctgcctttgagttcttggtctcgcctctccacatctccatgacgctccaggccgggactttcggcaagatgccagtcctggctcaggacggccaaggatcctctctcaccacaccagctccccaaatcctgcacatcccagtcaccaaactcagtaacagcctgctcctgtaacagcctctagggactccaatgatgtccctctctaaaacagccgttcccaaaacttcctgagaagatttttactttattttatatatctgccctttcatttcagagacatctcatggtagctcatgttacagaggattgaaaagaaatgcaaacacataaaaccggattcagaaggcagaccaaagatcaggataaggaagagagttacaatatcaacaagggctgggtgcagaggctcacactgtaatcccagccctttgggaggcagaaatgggaggactgcttgagcccaggagtttcagtccagcctgggaaacacagcaaaatcccatctttacaaaaaaatgaaaaaatgagctgggcatggtgaggtgcacctgtggtcccaactactcagaaggctaaggcaggaggatcactggggcctgggaagttgaggctgcagtcagccgtgtttatgccgctgcactcctgcttggacaccagagaaaccctatcccagaatataacaataataataatgcacctggtctgggcaccttgattcccaggctgccaggctcctgtcccctcagggactctgcaccctgccctccagcgacgccctccatccacatcctcacatggctttccgtctcatttcactcagatctctgcccagatgccacctcctcagagcaccagcctagtgcctccctgccatcccgtccagagccttacgccgtgctaaggtagaattcctaatggtgagactcctgagacagaggaacagggctgccttgtgaggtgatgagttccctgtcactgggggaaagataggagaatcacaacacttggcatgcaggaggaactcaacacatgtaaggaattaataagggagagcagacagaacccgtatacgcaagggcaggaaaacccagccgtcaggagctcccgtccagtcctacaaggattcccacagatgcattgctgaaccgacaagctataagatgaatgagcaggtcctctgctctcaagaaatttaagagatttcattttggggaacaccctggctggaggctggaggaggatccttggtgagaaggaagatgttcacggtgggtttcgacagagcagaggggaacgaggaaggaggataaccaggggaagtgggggagcgggtcctagtggaaggggtgccagggcagagcaaagagatctccagccgcagaggggagctcctccctcacagcccatgtctcggcctccttccctgaaccccaacttccgggagcctccactgcctcttctcagccctgcagttttaggaagcttctgggctagccagaaccacctacatacccagaagcctattttgctgccaaaacgcatcgatgaataacattcccagaacactgagaactgagccttgatcagggaggggacctcaaggagagtggagacagaggatgctgcccaggggactgtgattggttccggaatcgaccaatggaggaagctgtaaacacagagccaataggaaggcggttgaagcctggggcagcccaggggccagagaatgaagaaggggatgtcagggatggggccaagagcatgcaaaaggctggaaaaggggatctaaggccatctaaatgccctcaggcacctggaaaattctgcctgttcactgagcctttctgaactggtcctgcaaaggtggcagggactgccgacttctagaatggaacttggagccatgtcaattgcagttttttctttccccttcttagtggcttccaggcatttgattgtgtgccattcattcagcaccgcgccagcaccgatggcagcagctagcaagggaaggggctctgggtgcagctccctggctgcactgctctgcactgctcctcacagctatgtgactttgggctcaggttacagtaggacacccagtaaaatctaaatttcagaaaaacaaggaactttttgtttttagtataagcacgtccactgtattgggacacacttatactagaaattgcttcttgtttatctatctgaaattcactttggttttgttgttgttgtggagacaaggtctcactctgttgtccaggctggagcacagtggcacaatctcagttcactgcagcctccacctcctgggttccaacaatcctcccacctcagcctcctcagtagctgggattacaggcatccactaccacatccggctaatttttatatttttagaagagacggggtttcgccatgttggccgggctggtcttgaactcctgggctcaagtgatccacccgcttcagccgcccaaagtgcttggattacaggcacgagccaccacgcccagcctgaaattgaaatttaacagggcatcctatattgttatttgctaaacctggcaactctggggaaatctttcaacctctgcacttctccttcctcatgtgcaaaggcgggattaggaggaggattagtaagcgcatgcttacttattcacttactcatatagcgtggggcccggggcctgctcaactgtctacgaaagtgatcactgtttttcctgatcgcggttgcctgggagttggtgatttgctcatgactgatgctcaggctggctggggcagcgtgaaaggggcgggagctgtccaaggatgccttccatcaacattgaaagatggaatggctgccccaccctcgctggcttatgcatgttaatgcaaagaatgacacctctggtcctacctgatccaggtatttcttccacacaggttcgctgttgtcagcaacaaactcattccagccatgggccagccggcgctgcgtcaccgagaactccgacagcccagtgtgtaagtccacctggaaggagaggtcaggcacaagctcactcatgggcgcagcaaggaatgaggcaacagggtacagactcccactctgaaaggcagcggcttccatgatgggccagggacacaggcttgtccaccaaggtgctgggacttgttcaaagaccccgtgcagatggggcagagagaggaggaaaaggcacaagccagtgaccattataattacagcagaaaagacgactctggtcttaaatttcaacaaatggaaatgcagcatagacttccagaaatgcagaaacacatcttttcttcttaaaaaaaaaaaaaaaaaaaaggtcttgggaatgtaaaatggtgcagctgttatggaaactgtgtggcgattcctcaaaaaattaaaaagggagctaccagatccagcaattccactttggggtatatacccaaaggaactgctagtggggctccaagagatgtttgtacaaccatgttcgtagcactgttcacaaaagcaaaaaggaggaaacaacccaccaatctttcaagggatgaatga

SEQ ID NO: 1242611 - DNA, 4001 bp, Homo sapiens
agctaataccccacaggtggccaggcaaaatggaatctctgaaggcattctgagggcaaagaacagaggaggctggggggaagggctcggcagcctgttgggagaagccttgagtctgtggaaagagcaggcggtgcctagggggaaggagaagtctagaccacttcttccaccacaaatgaccccttacttgcacacgacgggaaggccagggctcactcacgaatggcagacaggcccaggcagaaggaggcccgcaagagaacagagagctccaagcccccaccccacaggtgtttacagtcagcagagactgtttggagttcaaaccctccacatatctgcactaggagcctccccaggccaccaggcagggtggggcagggcacggtcatcaaagctaaaaccagacctaaccacggaggcggaaatcagaccaggccaggccagtccacggaggctgagactgggccagaacttaactcgtcggacccacattcctgggcctagccctagcccaagtgccattctcccagggagaccaattgtcactaaattggacgcccaggacctgtcaaggcccaatttcaaaagcagggtgccaccaagaaccctagaaggccccttctccaagcccagggaagcccctcccaacttcaggcctcagggagggaaaggaaggtcattcattcacccctccattcattaggaccacaactggaagcctcagtcctgagggcaacgactggatcccataaactcggacacccatgccaccctctcacccacctcagagcacagaccctctgcaagctacacagccccgccagcgccgatgctgctgtctccccgctccctccacttccacacactcccacccgggtctccgcgggctctccgaaccaagccctcagcccagctttcccaaacagcccacacagcgacacgggtattgggcaactgtaaccagctccaaccggaagtacctgcctgtgggtgagacccacctgaccctcggggccggccgccataagggcgagggctgaggacctcccgtgggggacatgggctccccaccagccggaaagctccagcgaccggctgggcgttcctgggccggacccgcgccgccgcccgcgcactggggccttcgaggtgtgatgtcacctgcccgcagaatcggcccccctcgcgccgcccccctcgcgcccccaccccagcctccctctcgccgctcccggggctaatatggcagcggcgccgccgccccacccccgcaaccgcacgacccggctggcagggccgccggcccggacccccgagactcacaccccggccaggcccgcacgccctgcgccccggacccccggcggctccccgcagccctcggggcgccgacccccgcccgctgtcacacgaggcccgggcgcccccgacagctcgggattacgtcagagtgacgtcacacaccggaccccggcgagctgcgggcatgagcaacgcgcgcgcccccgcccccgagtccctcccgccgccgcgctcaccgctgaagaccatggcggccgaggcgcccatgacggcgaaaaacgaagcatactcggggccgctcttggactcggacatgtctgcgggtggggagggggcaagctctgcgggccgaggcggtggcggaggcgggggcgaggacgggccgggcacgaaggtttgcgggcgggcggcggcgaaggcgatccggcccgtcagccgctgcgctctaaataccagcaccgcagaacaaaatggcggccgcggccgcgtcacatgacctgggccccgcccctgcgagccgtaccacttcgcaccgtgggggagacgcgtccccgggacgcccggccggcccgttgacctcccccgggctgtgccgcccgcccagcgacccggccccggcgcccggccccgccctgcctcggcctccgcgggtgtttccgggcgccgccggcctctggatctccgcagcgttggaccggtctcgcgccggggcggggcggtgtggtgtgtgcttcattagcatacggggcggggcctcggacgccccgcctcctctgcggctgcgcgtcgtctgcaggtgttgggttcccggcgacgcttttctttgtacccctggcgtgaagctgcaggccgtggtttcgcggccttgcccccaagacggggcctcacccctccgggcgctggtcttccaggatctccctaccaatcctgggcgagctaagggtcccagcagatgtgcggcgcgcgggcctcctctgccacagcgtccggaaaagcccccagcccacacctgtgaagtcccagcccgtggctgcggtcacctccctccaccctgtccccagtctcctccagacccagacctactgcctctgacccagcagttggtgacttcacctctcgcttcggagaaaaaggaccccctccccgcacctgtctctgcctttgcatcagggacccaaacattagtggggtgtgtctctgcccctcaagatgtaggcatgactggtggaagccctgtcggaactgcgacctctggaggccccccgggctctgcacgttctggcgtcctggtcctcccacctgtccttgcagccacccactcacgcaaagcctgcaccttcagggccatctttctgtctttctggagcagttggagcggttcccgcagccgtgaaagcagcccagccagggctggcgctgccctactgatcctgtgtggcagtccctggcaccccctctgcctgatctccattccccctttcaggggccctgggcagctgccaccaggcctgagtgtcctttgagctctaaggcctcatcctgggttagagctctccctgagtagcctggatgctggctcatcaccttctctatgtaggcaatggggtcatggcccctggtctggccctcctgctggactcagccccaccttccccagcaggagcctccctcaagccccttccccaggctagcctgggtctgccactcttggaacttgcagcccgtgaaagtccctaagtctgtcctggttcaaaggagaggaggcaacagatacggccagaggccctttctgctcctccctctttcttgcccggcccttgtttctgagaagacgaatcttcactctgtctccacctcctcacctgcccttccctctccagctccttgcccttgccaaggtcactggtgaccgccatttctctaagcagaaggacatctgtcaggctgtccaagtggacctctgtgctgcgtggcctgccaccctctccacacactctcctctctcctgcggacttcctaaatctcagacgccctcattcttcctggagtcacaaggccctgtagccccaattttgctgcaggtcctggcatacccagggctacccctagctctgcccttcccctgcttgatcccatcctttccctggctttgtcccccatcttacgccgtcttgtccctcacctgcaccattccagccccgaccgccctctgagtgagagcaacaccagtgcctgcccccataactccaagccctccaggaaagcctaggccaggaaggctgtgcctggggccgaattcagaccaaggaaaggtggcgcagagcagcccaccatggagaaacagcacagtccaagctcaggggtgggctgggcacggtggctcccgcctgtaatcccagcactgtgggaggccgaggcaggaggattgcttgatcccaggagtttaagaccagcctgggcaacaaagtgagacctcgtctcaaacaaaacattgtagggtgggcaaagagcacctaactccattgtggctgaaacaccaggactggggacatggggacgtggagagacttccctcttgcaggagcagggagtgggtcagctgtgctcactggcctcttacccattcattttctgcctaagttctagtgtgagaggtcacaccgggtctccagtgtggctcctgacacttcaag

SEQ ID NO: 1242612 - DNA, 4001 bp, Homo sapiens
cagggcttcaagggcaagcagcaacagctagaatttaagttccacatgggcggggatcccattttgttcactgctgtcctaccagtacctggcacatagtaagcgctcaatcaagattgtttggatgaatgagtgacagccacaagctaataccccacaggtggccaggcaaaatggaatctctgaaggcattctgagggcaaagaacagaggaggctggggggaagggctcggcagcctgttgggagaagccttgagtctgtggaaagagcaggcggtgcctagggggaaggagaagtctagaccacttcttccaccacaaatgaccccttacttgcacacgacgggaaggccagggctcactcacgaatggcagacaggcccaggcagaaggaggcccgcaagagaacagagagctccaagcccccaccccacaggtgtttacagtcagcagagactgtttggagttcaaaccctccacatatctgcactaggagcctccccaggccaccaggcagggtggggcagggcacggtcatcaaagctaaaaccagacctaaccacggaggcggaaatcagaccaggccaggccagtccacggaggctgagactgggccagaacttaactcgtcggacccacattcctgggcctagccctagcccaagtgccattctcccagggagaccaattgtcactaaattggacgcccaggacctgtcaaggcccaatttcaaaagcagggtgccaccaagaaccctagaaggccccttctccaagcccagggaagcccctcccaacttcaggcctcagggagggaaaggaaggtcattcattcacccctccattcattaggaccacaactggaagcctcagtcctgagggcaacgactggatcccataaactcggacacccatgccaccctctcacccacctcagagcacagaccctctgcaagctacacagccccgccagcgccgatgctgctgtctccccgctccctccacttccacacactcccacccgggtctccgcgggctctccgaaccaagccctcagcccagctttcccaaacagcccacacagcgacacgggtattgggcaactgtaaccagctccaaccggaagtacctgcctgtgggtgagacccacctgaccctcggggccggccgccataagggcgagggctgaggacctcccgtgggggacatgggctccccaccagccggaaagctccagcgaccggctgggcgttcctgggccggacccgcgccgccgcccgcgcactggggccttcgaggtgtgatgtcacctgcccgcagaatcggcccccctcgcgccgcccccctcgcgcccccaccccagcctccctctcgccgctcccggggctaatatggcagcggcgccgccgccccacccccgcaaccgcacgacccggctggcagggccgccggcccggacccccgagactcacaccccggccaggcccgcacgccctgcgccccggacccccggcggctccccgcagccctcggggcgccgacccccgcccgctgtcacacgaggcccgggcgcccccgacagctcgggattacgtcagagtgacgtcacacaccggaccccggcgagctgcgggcatgagcaacgcgcgcgcccccgcccccgagtccctcccgccgccgcgctcaccgctgaagaccatggcggccgaggcgcccatgacggcgaaaaacgaagcatactcggggccgctcttggactcggacatgtctgcgggtggggagggggcaagctctgcgggccgaggcggtggcggaggcgggggcgaggacgggccgggcacgaaggtttgcgggcgggcggcggcgaaggcgatccggcccgtcagccgctgcgctctaaataccagcaccgcagaacaaaatggcggccgcggccgcgtcacatgacctgggccccgcccctgcgagccgtaccacttcgcaccgtgggggagacgcgtccccgggacgcccggccggcccgttgacctcccccgggctgtgccgcccgcccagcgacccggccccggcgcccggccccgccctgcctcggcctccgcgggtgtttccgggcgccgccggcctctggatctccgcagcgttggaccggtctcgcgccggggcggggcggtgtggtgtgtgcttcattagcatacggggcggggcctcggacgccccgcctcctctgcggctgcgcgtcgtctgcaggtgttgggttcccggcgacgcttttctttgtacccctggcgtgaagctgcaggccgtggtttcgcggccttgcccccaagacggggcctcacccctccgggcgctggtcttccaggatctccctaccaatcctgggcgagctaagggtcccagcagatgtgcggcgcgcgggcctcctctgccacagcgtccggaaaagcccccagcccacacctgtgaagtcccagcccgtggctgcggtcacctccctccaccctgtccccagtctcctccagacccagacctactgcctctgacccagcagttggtgacttcacctctcgcttcggagaaaaaggaccccctccccgcacctgtctctgcctttgcatcagggacccaaacattagtggggtgtgtctctgcccctcaagatgtaggcatgactggtggaagccctgtcggaactgcgacctctggaggccccccgggctctgcacgttctggcgtcctggtcctcccacctgtccttgcagccacccactcacgcaaagcctgcaccttcagggccatctttctgtctttctggagcagttggagcggttcccgcagccgtgaaagcagcccagccagggctggcgctgccctactgatcctgtgtggcagtccctggcaccccctctgcctgatctccattccccctttcaggggccctgggcagctgccaccaggcctgagtgtcctttgagctctaaggcctcatcctgggttagagctctccctgagtagcctggatgctggctcatcaccttctctatgtaggcaatggggtcatggcccctggtctggccctcctgctggactcagccccaccttccccagcaggagcctccctcaagccccttccccaggctagcctgggtctgccactcttggaacttgcagcccgtgaaagtccctaagtctgtcctggttcaaaggagaggaggcaacagatacggccagaggccctttctgctcctccctctttcttgcccggcccttgtttctgagaagacgaatcttcactctgtctccacctcctcacctgcccttccctctccagctccttgcccttgccaaggtcactggtgaccgccatttctctaagcagaaggacatctgtcaggctgtccaagtggacctctgtgctgcgtggcctgccaccctctccacacactctcctctctcctgcggacttcctaaatctcagacgccctcattcttcctggagtcacaaggccctgtagccccaattttgctgcaggtcctggcatacccagggctacccctagctctgcccttcccctgcttgatcccatcctttccctggctttgtcccccatcttacgccgtcttgtccctcacctgcaccattccagccccgaccgccctctgagtgagagcaacaccagtgcctgcccccataactccaagccctccaggaaagcctaggccaggaaggctgtgcctggggccgaattcagaccaaggaaaggtggcgcagagcagcccaccatggagaaacagcacagtccaagctcaggggtgggctgggcacggtggctcccgcctgtaatcccagcactgtgggaggccgaggcaggaggattgcttgatcccaggagtttaagaccagcctgggcaacaaagtgagacctcgtctcaaacaaaacattgtagggtgggcaaagagcacctaactccattgtggctgaaacaccaggactgggga

SEQ ID NO: 1242613 - DNA, 4001 bp, Homo sapiens
taacacctacaattattgtactgccgatttttttttttttttgagacggggtctcgctctgttgttgcccaggctggagtgcagtggtgcagtcttggctcactgcaacctttgcctcccaggttcaagcaattctcctgcctcagtctcccgagtagctgggattacaggcgcctgtcaccacgcccagctaattttttgtatcttgagtagagacagggtttcaccattctggccaggctggtctcgaactcctgcccttgtgatccacccgccttggcctcccaaaatgctgggattacagacgtgagccaccgcgcctggcctgtactgcagatttacattaaaatcataacacctacaattattgtattttaacggtaagttttctattttaaaggtatttattttcactttactggtccagtttgcaaggcaaacaataaatgactttttcatttgagctcacttttaacctcacgaagtttctgacgagaaaatgttctctagtgggtgaaacatctggccatcctccccccacccagctaccaattacgaggctatcagcacctctgctcaagagtaccacttgaggatcaggaatcccctcacatcctggccacccttcccttccctaccacctggagcgggagtggttggcaaagactggaattagggacacctctaactcagtacatctgttggagctgtgcctcagaagtcaacgccacggccgggcgcggtggctcacgcctgtaatcccagcactttgggaggccgaggcgggcggatcacgaggtcaggagatcgagaccatcccggctaaaacggtgaaaccccgtctctactaaaaatacaaaaaattagccgggcgtagtggcgggcgcctgtagtcccagctacttgggaggctgaggcaggagaatggcgtgaacccgggaggcggagcttgcagtgagccgagatcccgccactgcactccagcctgggcgacagagcgagactccgtctcaaaaaaaaaaaaaaaaaaaaaaagaagtcaacgccactctggagctgtgtgctgagaagaaaggggaactcggtttctcattactcttgtgctcagaaaccctgtcccaacaggcatccccctcgctgagggggtgggattaattggccaaatacttgtatatgaacttccagacctgcaagggccacccttgttctcccaaacattgccttcaggagatactgcccagccagcagttcagagttgggagaaaaccctcgataaactggctcagcaattccccaggaaggctcaccccgcaggccaacgcgaagacacgatgatcccaaagaccttagtgtcttggcggggggagggggaagaggtgggggacttttccgcttagcttccctaagggttgctacgcgacagctctcgggctacgtcagggtaaagaggtttgtatggccacacctcgcaccgaccaactacccccgaaacaccccctcctcccaaactgcagggtgagcacagcgagagaaaaggtggcccaagcagaggcgaacaactgcggttcttaaagccttgtttgagtttgggcccgcgccgagccacagctagaggtagatcccgctcctgcgcgtccgctatcagccccaggattcccagagaggcctctcaggcccttcaagacccccccttccggcttcccggcctacacctctgaaccctcaggccccggacagcctctatccccgcctttcgcggccccggctcaccctctagcgtctcgcactgcaccaggttgaggtagtcggcctggctgagcaccccggccttcaggccgcgcaccagtccctccaagtagccattgtccacgttaaagtaaagctccgggaagaacgacatggctgctgcgggagcggcgggaccggagaaccaggaccggccggcacgaatcgcgactccccaggtcagctgacgctgcgtcctcagcgggctgtcaagtgcgtcaggtgacgcgcaagcgcctcacgtgaccataagggggcgtggctctgagcggtgcccggcttccgggtggctgcgcggaagcgcggtgcaggcgtgggctggccctgcggcgcctgcgcgctaaaaagaggaagtttgaggccggccgcttggtggcgcctgtggccgcagggatttgactgggccttctctagctttccccggtttgctgcacttgacgctgcagggcgggcggggtaaagaagggagcgagcccttctcaagcttggaaagtttccagactgctgggccagcctcctccccagagggaaactgaggtccgattgaggtaggagaatagggtctggaggcggggaacttgaggccaatacgtgctgaattctgaagctgaatcaagggaaaacaccaaggtctgggggcagggaaccggaggccaactaaggcgagcttactaaagctaaaccaaaaagaaaaaccccatctccccatgtccaagtaacaaaggatcaaaggccactgtccccacaaccctcccccttccaccacgtctcagttgaaagggagagtgccttggattggctgcgggccaagcacgggccatcccttcatctgcatagggcgccaattcaccttagccccatttatgccttgtgttccattattggaacgctaagcatatgggagttatttatatcctactgctcaaggtcatggccaaggtctgattgcaaaaattcaaaaagattgcaacctcaggcataaatggattaattagccatggaccaaacccttcatccagataaggggtaacggacagggaccgcaaaaggagtacttaaaacccggaaaactttgtaactgagccccttcagcctcttgctcaggcccactcccaccctgcgtagtgctttctcgctttaacaaatcccagctgtctgcttccttcctgtgtgtcattcgtttgttactttctgggttttgttcaattctttgttcgaaacgctaaggacctgaacaacgcacactcctggccttccctctggtaacaggatgaggggcaggctttgcgtggaagtagcagcaagccctggagcctaaggcttatttgttagccaggagtgatagcccctgtgccacgctgcgtcctgcgttccccgcacttgctgtacaagattttcgaaagctggagtgcggctcttctctatttttcccaggggcaccaggacccctaaaagcgcccgtgtatgtgcctcctatgatagggtagcccaggccctgggataagagtatgtgtggtttcttggcttggtgacactcccaccccctccatgaaccctccctcctttgacggccacgtttgaaataaccacagccttggggttggtcccatcctttattcgagtttccttgcccctaccctagccccgaccctgacgttggccagctaggtgcggctgcagggattcatggcagtacccagcttgcggcagtagcagaaggcattgaagaagcggcagtagcacgtggcacatgggtcacagcaaggcacctgctgtcccaggcaggactcatgcagccttacgcagcgacgtgaggagcggggctcgcggtcctgcaggtctagtacctgcaggggtggggaaccagcacaggcctctaaagacagatccagggatcttacctgtcccaacctgtgcaggatggcagtggagcatgggaaggggtggtcggtagtgtcgtcgctggtgagggagtttggagctggggagaggagctaatacccaatgccccctcccaagggccaccaccttacccttttccctgagcagttacctctgccaaggcctgagcctcctgcaacagatcctcttctgcctgttctgcagttgtcttcttcagtggggcccgcaggcccaggcctggggcagaggatgtgagggcaggaacccccatgcacaaagcacccacctcccaggggagggtttgggaagggaga

SEQ ID NO: 1242614 - DNA, 4001 bp, Homo sapiens
aatggagtaagcggctgcctgacctctaattctccccagggtcaccatgaaaggtaattccaaagcattagagtatacacgtccttgcctcatcttcttctccacaggtaaacagtacatttacccagagtgcccaggcagttgaacagagagaaaaacacctctaatgctccaacttgtaagaagacatccctgaaaaaaaatttccatgtatcaaatttcattggttttccgtaacatcatttccctaacatctacctgtgcctgttccccaaaggttaaatttgctccaatccaaatttcagataaacgcacaaataaaaatggaagctttaacactgttcccatatgaacaatgggaagcaggaaaaatcaactctatggatttcccctttattctgggcctatgaaaacataaatgtggagttatttaaatgaaaaaaagcagcagtagatgaaaaagaacaattatttatgtttctggggcagaaaaagaggtcaggggggagtcactcaaggagaagacttattaagagattttcagggttaaaaaaaaatgagcatatgtgtgtgtgtatgtaaaattttctgagtgacagtataccaagtgctgaatcaggtatgaaagaaactgaaaatattgccttggtcctcagctggctaacactggtgaaacaaaactaccactaaaccatcactatgtgaatctacacttgccagaaacgcaaagcgagaaagaatggagccttaacctctgaaaacagagaaggcagtacagatgagtgagtgctctgagaaactgactatcctgtccaagtcctatagaacactctaagcctcaacccaaaccgaatgcaacatttctctcttaagattggcaaggtgcaggtgtacacaaaaggtggaaggataggaaaacacagtgggaaaacaaattcctaattccacaaacacatattattacacagtggcataaataatgactcttttctccaccagcagctttaataactgaaaagcagcttgctttcttcttcattcccaacagaaactggggtcacacttcaatcccaaaatgatccttgctttctgtaacgaaaactttaaagaaaacctgcctccaggtcaccgagaagttagcaaacacaggctagtaaagggaccgaaagaggcaaaaggtctgcagaaaggaaaacaaagagccaagcctgtgcgccaggttcccacaacgcaaaacacacttaagaatccgaaacctccgcctctcgagaacctcactgagcatctcaaagggaaaacgcagcttgtgaccccaaccgagctaacaggctgttcaggagagttgccaacgctgctagcagagcccggaaccaagctcctcatcacgcttgggtcggaatcaaggggctgaacccagctggagacccaaattctctgcgggcgagaggtgcgcccgacagaaagggagaagcttgtcagagactacggttatggctcccagtggtcccgcaatccttgatccaacaagggtagggctcgaaattgggaattctgcgtttagagagtagggggtccacccttcaccaagggggcaggggcgaggccctgcaggcgacgcttccttgtttgggggcccttcccgccccacagactcggacaccttggctcgcaggcacacagcctccggggcgccggggcctgaggccaccttccaggacaggccagagagaagcgcgagggggtctaggtgcggcctctcccctccgtctgtccacggttcatgggccccggcccgccggagcaacgggctcctgagggccacttcctccggagcaccgaccccaggcctgcctggccccggcggccaccacttccagggacactcaccagcccatttcacagcgcttcccaggatccactcactcgtcccggagccgccgcaaccgcggccgccgccatccccggccccggagccgccccacacccagcgccccccacagccgggcgcccggagatggcgtcaagctcgtcccgcccccggcgcggagagattgcgtcacggccggggtgggagagcaacgcccaggactccccgggaagggagggtgccacactgccttcgcgtcgggcgttccctctggtgggtgaacaaactcctctccctgggaccgggtcacgtgaatagggctgggcccggccccctcagcctgaccccacaatgaccccgcaatctttccacctcagtaaattttgggggttcccaaacagagccccggggcgtggtcatcggcgaccccccatttcctggacttcttgtcctgacttgtgcagccccttctggggaacttcgggggaccccgaggtgacctaggctcaggagaaaaggagatacctcttacctcttggggacccaggtggagataggaagtcttctttttttcttttctttcttttttttggagacagtttcgctcttgttgcccaggctagagtgcaatggcacgatctcggctcacccaacctccgcctgccaggttcaagcaattctcctatctcagcctcccgagtagctgggattacaggcatgcgccaccacacctggctaattttttgtatttttagtagagacagggtttctccttgctggtcaggctggtctcgaactcccgacctcaggtgatccccacacctcggcctgccaaagtgctgggattacaggcgtgagccaccgtgccaggtcaataggagctctgtaagtgttgagaagtggcccccgagggagctaagagtgaaccccactcaggatctaggggaaggtgacaaggagtggaacacctgaaagtttagagagagcccggggtttagtacagtgagaagcagcttggtttagtggaaagagggcttgactactcagtgaaatattattcattacaaattaactaattattcattacaaattaactggtcaacttcatagtaacatgaacatctgattaacttaagtgaagacaaaagtgagcgccagttgaatttatgtttgaataacaactgtgtttttgttgttgtttgttttaaagtattaggttggtgcaaaagtaattgcggttttggccaccgaaatggagactttcagtttcttcaaactctgttcaataaataacaattgggccaggcgcggtggctcacgcctgcaatcccagcactttgggaggccaaggccggcggatcacgaggtcaggagatcgcagaccatcctggctaacacggcgaaaccccgtctctactaaaaatacagaaaattagccgggcatggtggcgggcacctgtactcccagctactcgggaggctgaagcaggagaatggcatgaacccgggaggcagagcttgcagtgagccgagatcgtgccactgcactccagcctgggcaatagagtgagactccgtcttaaaaaaaaaaaaagaaaaaaaaagatatgtcattgcagttgcgtgtatgtgtgtgtgtgtgtgtacatataatttttttttttttttagccctgtcgcccaggttagagtgcagtggtgccatcttagctcactgcagcctcaaattcctgtgctcaagcagtcctcccacctcagcctctggggtaggtgcgatgataggcatgcactaccatgcccagctaattttttaaaatttcttgcagagacaaggtcttgctatgttgcccaggctggtcttagactcctgtgctcaagtgatcttccctcctcggcctcccaaagtgctgacatttcagtcatgagccaaccacacccagcgtcggttgtatgtatttctgtgtatctgtacagaaaaggagtagaacacataactaattaacattggttatttttgggaaggaaagtggaattgggtggtggtcaaaaggcaaagaaacaacttatattattgtttgaatatttaggagaatattatcttagaaataaaaaaagtaagttgagatccagataca

SEQ ID NO: 1242615 - DNA, 4001 bp, Homo sapiens
tagagatgggatttcccatctgtgttgcccaggctggtatcgatctccttgggctcaagggatcctcccacctttgcctcctaaagtgctggcattacaggcgtgagccactgcgcccggccaataaataagattttcaaactgtcaccttgtagaggaagaaaaaaatagacattaataagccagcaaacacatttcctccaaatgccagcaaaaagatctcaatcaacaatggttgtcaattgctctaagaaccaacgagaaaggggctagggctgcaggctaccaacagatcaatgctacagtattaaccaaaaagccacgccagctgtgagggcaaaagctccaggagtgcagctttggaactacctagctcaggtacattacctcccaaacagaaaagacaatcattttcagcagcctgacgcctcaaaactgtgggaggaggggtatcccctccacaccccatcccctcgacctcatgactcattcagcccgttacccactctgcggggatcaccaatcgccaggtaaccctgctcgtcgctggctgatgtaaccggcggttgagggcgaagagggggccgctggcggggctgggggacagcgcagccgcaaaagccatccaccgggaggcctcgcccggtctgcgcctgcgcactaaaacccacgggactttccgaacccccacctccagcgatcagagcccactgcgcctgcgtgtgctgccactcttaattccattaacacacacacactcgcacaggaaaaactgagcagggcctccactactcatgcactgccaccagacgagcccctccacgaactagtccctgccctaggtgttcccggggcgcgcgaatgcccgggtcatgagaccgagcatccacgcgcacgtacgggaagggggcgcgcgcgccagaggctcccggcccgcagtcctcccagtcatccctccttccgtccccccgcccacctcgctcccctcctactggccagaccgggaagggggaggcagcaacccgctcccaagtccctccctccccattggccaaactgtgggccgcgcgcccccctccattggctacggccggggaccccttcccgcagcagactccccattggctgaagccggggaccgcgagacccttcgtggtaatggaaccggggaccccgatcagctccttgcccccccccaactccccgttccgacggcgccggcgggatgcgccccgcctcccctgaaggccggggctgcgagccctgactaggccccgagagccgagcgcggcccctcagtgctccggtggccgcccggggaccctttccgtccgacctgttcggacctgagggggccctcccccagcttcacggggactccccacccagccggtgcccctgacggtgccgggtcggggtccgccccaccggaaccgagccacagcctctgggtggccgcggctccctcgcccggagcccacccttctcacctggcgctgccgatggcggctgcccccggcctctcctggtgttgctgcggcggcggcggctgcggcgccaagatgccttcggctccccggcggagcccgctcccggcagcggccacaggccccaggcagggggaggcggccgctggaggcccgggaggagccgcagaggtggccagcggccccgggaggccgccgttgggagggctggtgcccccggggggccgacgggccacggcctgttgcgtggggggcggctgctggggctgggagggctgttgtagcggctgaggcttcaacatgatggcagcgtccggaaggggaattagagagaagggagggagagagggggccggggctggggccccgctggagagcgcgggaagcgagggggatcgggcagccggggcccgccgtgggcgggcggggggagccccgcggtgtcgggggtggagagagaagaccgcggcgcgaggaagcgccgcgaggcggaaggggagggggtctcgcggctggaggaaagcgagagggcgcgagccgggctggcgcgcgtgcgcgtcgccggggagcggagagggaggagcgcgcgggtgggagctcccggggggggggggggggggggggggccaggagcgagcagtggcgcgaggtgccgcgcacaccggcgcggttagctcccggcgggaaagtgggagagaatcaagtcggtgaacctcgcacccctagccctgggagtgggtaaggagcggcgcgggcgctcacgcgcgccaaggatttagggtcttaaggtctcaaaccgccttagaagccggcggccgctgtcgcttcacaatgagcgtgtgaggcgcagggggaggagccgaaggcgccagaggaagggccggcctctccgcccacgccgtcgctgcgtcgcgatgcctccgcgggagtgtgaggcggcacgtcgtgcgtgaggctcttccgccacttggcggcccgtgggcagagccttaagtgccaagaaagtctccgggactggaccacccgagccactgcgcttttaggcaggtggtaggtttcgcaaggagctaccctccaccttgtttgctttaagtaaaagactgatgagcattagtgattcgtttgagcgtgttgatctttgcagataaatttacgcctcgtcctaaattatttcagatttttgtgattttgacctaaattgttcctccatgcccgagaatgaatctttaaactgtaataacaaagactgaaggccaaagttccgagttcaaaatcctccacccgaccctgcaatgaaggcagcttcattcattcaaaatgagttgggcattggagtattcagttagttgttttggacacaaggataattaaactgcttcctgctctggaggagttcatgctagtggtgaattcagagaatttgacgagatctagtaggtgaagcacagaggactacaagagcaaatgggagtgacacctaatcttaatccagttttgggagacccagataagggacaggagggccgggcgcagtggctcatacctgtaatcctaacattttgggagtccgaggcagaaggatcgtttaaggccaggagtttgagaccagcctaggcaacaaagtgagactttgtctctacaaaaaaaaaaaaatttaaattataaaaaaaaactgataagagggcagggggagatgggtttctaggcagggaaataggatatgacaaactaagaaaaactcagcttgtcctaagcataaaattaaaggggggaagaggtagctaatctgggatcaggttttaaaggctcccaagtcttgtaagagacacggacattatcctcaaagcagtggggagcttatttaagaaagtgaaaagaggctgggcatggtctgtaatcccagtactttgggaggtttgaggtcaggagtttgagatcagcctggccaacatggtgaaaccctgtctctactaaaaatgcaaaaattagctaggcgtggtggtgcatgcctgtaatcccagctactcaggaggctgaggcaggagaatcacttgaaccaaggaggcggaggttgccgtgagcccagatcgcaccactgcactccagcctgggtgacagagcaagactccttccccccaaaacaaacaaaaaaacaagtgaaaagaggtcagatttgcatttttaaaggtttactctttgcaacgtggagaatggagtggagctgttaagtccatgtggtcttaatcccagcgaaactctcaatgtctcaatctcttcgctctaaatgttagcattggaactcttcccagcccctgcaccaaacacatgcacacctagctacaacactgccttactttttgggtaatagtccttcgccctgcctcgctcctgccttcagatgtgctagtttcccctcctgtgtgctcgccgagcaatttatcccactgtattctaacagctcctttaattctgtcttcctgctaatgtcagctccctaagggttaggatcttgac

SEQ ID NO: 1242616 - DNA, 4001 bp, Homo sapiens
tcccccatcactgaaattctcaatgaccaatgtaatccgaaaaagtctgcttagcttttctgaaactagaaacccaagacaagtcaacaccagctgaaaatcaaacaaaaacagtctgtttttcatgctttcccatccttgtccctgaatggagatcttaaaactgaaaccaaagccaggtgaggtggctcacgcctgtaatcccagcactttgggaggccgaggtgggcggatcacctgaggtcgggagttcaagaccatcctgacccacatacagaaaccccatctctactaaaaatacaaaattagtcaggcttggtggcgcatgcctataatcccagctacttgggaaggctgaggcaggagaatcgcttgaacctgggaggcggaggatgcggtgagcggagatcacgccattggactccagcctgggcaacaagagcaaaactctgtctcaaaaaaaaaaaaaaactgaaaccgagctattgctgagtatctcgggtagccggtttagactgtgttttctccaaaatagggcctgtggatccaagtaagctcgagattcttcctgaagaagcagagaacagaagtgtgagcaaaaacaaggggctgacatgcacataagaaccctttataaattatcttagaaggggccaggcgcggtggctcacgcctgtaatcccaacactttggtaggccaaagtgggcagatcacctgaggtcaggagttccaggccagcctggtcaacatggtgaaaccctgtctctactaaaaatacaaaaattagccggatgtggtggcgcatgcctgttatcccagctactcaggcggctgaggcaggaaaactgcttgaacccgggaggcggaggttgcagtgagccaagatagcgccactgcactccagcctgggctacagtgcgagactccgtctcaaaaaaaaaaaattatcttagaggacggtggtcacccctgtagtcccaacaccttggaaggctgaggcaggtggatcgcttgaggccaagaattcaacacctgctgggcaatatagtgacaccccatctctacaaaaaatatatatatatatatcttatagatgggctgagaaaaatccccagagaactgacatgtttttctctactttcttcaatgccaagctgaaagtttcactgctcgggcagtgcagctctggtttcacgggggctaaattccaaagtgcggggcgggggtagaatctaagaaccacacccaagagaaagaccagtgtttgggcagcaaggcatcaacctggagggtacggacgccggagcacgcggctactcaggccgaaccccgacccggacccggcacgcggcctcggcgagggcgggcgggagtgtcctcctccgggacagccggactcccgccgacttctgggcggcggggagggctccaggcccggctctcccgggcccccgcacgcgatgcgcggcccctgcagctgctccgtgccccgagacgcgcccgaggcctcggacctccaagcggccaccgcgccgccagtcccgctgcccagggacaccccggccccagctccccgcgcgcccaccccctcggtcccacgcgcgtcagccacccgcgccccccgccgcttccgggtcccgcccgcccggcctaccgcggcctagcccgccccggagcccggccctactcacccgcgcgcggtggtggcgggaccccgggcccggctcccggagcggcgcggcgcggtccgggcccatgcgctcagcggcagcgcggcgggcgggacccggcgggggcgcggcccggggcggcccccatctcggcggctgcggctcggcggcccggaggcggacgcggggcaggccgcgggggcgccgcaggggcccagccgccagctcccacccgcccgctccgcgtggacgcggctccgggccgactccggccggctctggcggcggcagcggccacgatcgcctcccgagccagagcccgagccagagcgccgaagcccaggcccgagcgcccccgccggcggcgtccggaagtgcgggggcggggccggggcgcggggacgaggtgagagcgcggggcggggcctcaacacggggcggggccggcagcgcggggacgaggtaaagggtgtggggcggggcttcaggcgcggggcggggctgaaagcgcgaggataaagtgaggagcgtggggcggggccgacagcgaggggacaggtgaggagcgcggggcggggccggggcgtgggcggggccggaagcgagaagacgaggtgaagagctcggggcggggcctcgggcgtggggcggggaccagggagtaaggcggggcccgcctcgagcagaagaggtaaagagcgtggggcggggcctccggcgcggggcggggccggaagcgagaagacgagttgagaaacatgggccggggtctctgcatggccgggagagggcgtggtcagtgcctgccgggggcggggcgtgccgggggcgcggtcgcgccgtcttcccgaggggcggtgcggaagcggagcccgggaggctttggcttcccagagagcggagtgggagaggcggcgttgcaggtccttggaatggccgcggccgtggggagcactgggcggactgcgcgccccgaagggcgcacgtggggcgcagcccttttctgccgccagtacatcggagggcagtcagggggctgcaggcctcggggctccctgcccagccggccctggagaggaggccctcgtggggaccgccacggcctgcccgccgccgtgagggaagcaggctcccaggagtggggtggtcggcaggcagggatggccagggcccttggaaggtggggtgggctccaccctcctgagtcccaaggcagcctggactcacagcgccagggaacacgttaggccccaatatatggtggctctcacccggacaggagccacaacctccaaagagcccaccggctaggaccctctgccttgatttctcccaggcaccatctagtatcagagaagggttctccttccctccgctgcccaggccagcccgagagcaaggccattggagtgtccagacccctgcaccccttcccctgggctgtctccacagcggccctgccaaggggtccagtccgatcctgccaccctggctgcccagatccgtgtcacttgccctgcaggccacagagcatgaggtcacagccccaggcaccccacggcagagaggcacgggcccccagcagcagccccagcaccagctctggccagcccaaccctgtcagaaccaaccctctgctctccacccaggcctcagccaaccatcaggccctccccaaggaggaggatgtgagtaccaggatctgccgcctcccacaacagcccagggccctgtccttcccagagcactattgggcctggcacctcccgggatgctccaggcagccccctggggtcagctatacccccgtttcacagaggagacagctgcagttcaggccacacaggaccagctcgcctcctgttgggtgagggctccccacctcgtccgccccacacctgagacaacagccctcatctatctgccctctgctttaggcctcccagggctccctgctgcccacagcccttcagggcccttcctaagggcgcctcccccacaccttcccctagatgcgtctggccacttgcccgcctccgtgcttccgtgtccatcatgtccatacctgccagctccctccaggcacctctcacgtcacccccatgtctttccctgggctgtgtcaccctggatgcccagcctcacccttcagagctcccaggcaagcacagaagtcccagctccaggctccccgagcttccagcctacccccaaccagatgcccacaggtgggactgcatggggaaccatgtgtggaagcctcccagccctcgcccctgccagcactcagcatggtgtctgatgccagcatcgctgtgtgggaaaggggg

SEQ ID NO: 1242617 - DNA, 4001 bp, Homo sapiens
ctactaggaggaccagacatatccactgctctgggacctgttggacaagagatggtcatctaccacccagccttggctcgctcaaagggtcaccattacacgggtttcaactggttccagcagggtggaccgccaggagccaagcttaacccccatcccctgggatcctgtggagacaggcacctggtgatcagggaagaaccacatacacggcaataatctgggaaaccggctccattctgggtctgagttaggagcttggggctgtagtggggagctaggagtcccattggaaggggcctgcagcgacaggctgtggatgcgcacaggctggcccatgcggcccgtgcagcaggcgccacataagccagatgtcagcggccgagagcccgtgcactacaaccagctcacggtaaaagcaggggtcgaaggtgctcaaatgcggcgcggctgaaggctgggggatgccaaaggtgcggaaggcagggtgaggctcgggcgtgagccgcaggcgctgcagacacatgcccagaaagacgtcgtcgatggggaagagctcgacctgcgcacaggcgccagccaggcggtgcagcgtggccccggaaagcacaaagccaccgccgcccgcgtaggccggataggcgggcaggccgtacacggcctcggggatgtagtacttgctagcccgcgtgcggatgggccgcgcatgcacaattacgtcaccagcaagcaggtcttgcgccgggtcccgcggcgccaggaactccaggagatttcccacgttcacgaacacatctgcgtcgcccttaaaaacgaagcgcacgtcggggcagaaagctgaggcccaggctagaaagtggatctccttgagcgttaggttaaaaaaggtgtcgtcgaaggcccagagcaggatgtccgcatacgcaaggctctcggcccgcagcagggcgcgccagtgggttcgcgcgccctccccaacttcgtcggccccgcccgagcctgcgcccctgggcacgcccagcaagaacacgcggcgcaccagcgccccctgcacgcgaccctccgcgccccacgtctggcgcacggcttggcgccgctcgaagtcctctgccaccgacttgacagcaataagcaggtccgggcggccaccgggtgcgccgtcgccgcggcacttgtgcggctggttaatgagcagtggaaaccgccgctggtccttggcgcgcaaatagcgggcgaagtcaaagggtcccgtaggcgtgggcggcgccggtgtgtccccttcgtaggccggcggggctgcacccgcgtcgggtaactggaacgcgcggggtccgggggtgggcctcggtgccgccctccctcgccctcgcggcgcgctcgccgtcggggccgcgccgtcgcgctgcgcatagagtaagaggcccagggaggcgccaaggagcagcgtgagcaatgcgtccctgcgtaggcgcagcctcctcctcatctccgcgcggcctgcgccctccctcccctgtaagggtcgcagtcggcagcagggggcagcgagccccgccctccccagctgagggggcgggaggccacgccccggggggggctccagcgaccgacggttgagccccttgcgttgttctcctcctcccggccgtgtcgcaccgccgggaccggcagcctgaagggacaagaagttcacccatgtagccaactcccccgcggcctcagctccggcccaggactgcgacccagggccgggcagggagactgggagcctcggcccctcccccgcccgcctccctcgcgctgaggccgaatcccttccaccctgccatcccctcaatgtcgggccctggggtcccgacactcacgctcggccctcggaagtggcgcagccccggacgccctggcctccggggctcagcgcagggtccgaggggccgccatggaccgggcccgagccaaatgcagcgttggcaggaagggggaccggtgccgtgccacgtgaccctccagctgtgcgcgcccagacttctggagctcagctccgccccggcgccaggagcactccggcctcagagtggggactaatccctgagagggagcctcctcactctcagtccctctgggaagggctggtctgggtgctcacaccccaaattcgcctttctggggattgggaagaagcatcaactcccctggttagctcccccaactatccactccccactcccgcgtctctggagtggggcggagcctgggctgctaggagcccctgagcaggccggttccaaatgcgcatgaacctggccaccatcccgggcgggcctctcctcagcagccctgattccatcaggcagggtgcatacgctgcccccgagacacatggctgtcttcttactcctggttctgccatgctccccacccccagtaaacacacgcacgggacaaacaaggcagcccacccaatcctcagggcaactctgccagcagctctcattcatgcccagatggggacactggggggctcttcggggagttaagtgacttgcccaggatccaaaggccagaaagctctgcccccaggtcttctgaaattcaggccaggattattttatctgtccttgccccgctcattcatccactgggatacagaacagggggccaacccagtctgctttaatttcacaggcaagcacttcagcctgtctccccgggggctaatggacctgagcccaagccaggtgcagttctgagtcccctggtccccagcatagcctactgcaggtagaaatgatcaggcctgtgcagctgcaggtcagacagggctggcaaggatggggacagcttgggaagactcctggcggaggccttggctaaaggattgctctgggatgcaggtggacagaggtgctctgcaatggagagctaagtccttgcgcagctcagctgccagctctctctttcttggtcccagcccatgtggtggagcctggaatagacagcctctactggtctcttaagaacccagccccatcctctgtccaagggctatatctgctcctgacggcttcttcccaccaatgttcaatcttaaaaagccacctctctggctgggtgtggtggcttatgcctgtaacctcaacactttgggaggctgaggtgagtggatcacttgaggtcaggaagtcaagaccagcctggccaacgtggtgaaacccccatctctactaaaaatacaaaaattagctagacatggtggtgggcacctgtaatcccagctacttagagggctgaggcaggagaattgcttgaacctggaaggtggaggttgcagtgagccaagaacacaccactgcactccatcctgggcaacagagcgagactgtctcaaaaaaaaaaaaaggccagtcgtggtggcttactcctgtaatcccaacactttgggaggccaaggcaggtggatcacttgaggccaggagtttgagaccagcctggccaacatggagaaaccctgtctctattaaaaatacaaaaattagccaggtatggtggcacgtgcctgtaatcccaggtacttgggaggctgaggcaggaaaatcacttgaacccgggagacgaaggctgcaatgagccgagatcgtgccactgcactccaacctggcaacagagtgagactctctccaaaaaaaaaaaaaaaaaaaaaagccaaatctccaccctgagccttactctttttggtcacaaagtaatcaggagtcctctgctccagctttctccgcggcctcaccttccattccctcctgtgataaagcttcgggctgcctccaccatgactcagaaagacccctgactggtaagctccttttaactgagtccaacagacactcctcggtcttgactacccgctccattatagtgggtgggtaatcccctggtttccaaatctcctggttttcctccttcctctttggctgttcccattctggttggtgtccttcaggaca

SEQ ID NO: 1242618 - DNA, 4001 bp, Homo sapiens
acacccctccccgcgacagcacagcaggaggcgcctgtttcctggggctgcatcaagaggaccaagatctgggccacagcactcagctcccccagcccccgtgccgactctggggccaggacggatgccaggtacccagctctcctatgtaggaggtaaaaactcgccagaaccctgacatcctgggtggaggatgcccatgtggccaggaggccctggaggggactgcctgggggtcctcgctcaccaagcacagcgggggtcaatgccccctcctcaccccaggagctggtcagcaaacctgaggtggacagtagaaggtggggggcagtgtccccacaaagcagggcctgctccccatagttggtacaaacgagaacatgaagcgagccgggccccgctggaaaatgccgggtgtaggggctacagttccctcccagtccatccagcgtcagttcccctcatgttgccatgacaactgagccaacctgtcagcctcctgcttggagcagcagcagcagcagcagcccagatgtcaccgctgggacagagctgccctctgccaaggcccggagcctgggcccaggcagacccggaagccccctggaaggccccacccactttttgttttgttttgttgagatggagtccaggctggagagcagtggcatgatctcagctcactgcagcctccacctccaggttcaagtgagttgcagtggcgcagtctccgctcaccgcaacctccgccttccaggttcaagcgattctcctgcctcagcctcccaagtaactgggattacaggcgcccgccaccaagcccagctgatttttttgtactttcagtggagacggggtttcgctatgttggccaggctggtcttgaactcctgacctcaggtgatccaccagcctcggcctcccaaagtgctgggattacaggcatgagccagcaccgcccagcccacctgtgtcagggaggaaggccgggtggtcctgccctgcacacccccttcaacaggggtaggatgatggctaagacaccgtagcctcctgagaccctcttcctctgcatgggtgcaggtgcagaccctccacctctgcactgcctctgccccccagcagccccagggaggtctcctccccgctccatggaaactgtcccagagccaggccacctctgccccaccacaagagaggtacccactcttgggttcctgtcccagccttgccggcctctgatttctaggacaccgcgctcccccagccccccggggtcctggccttgctgtctgggtcccttcccttgccagtgctccctcatccacctgcggagggtgcctccgggctgggcacactggccctcgcaaagggcatagtcattctcacgggacaggagaggaaacgaagaccagcaggttctaccgcccactcaggctctcacggacagttggccctgcatgccaggccagctccccacagtggcactagactcataagctcagtgggcagcgtgggggcctgagcacaccatgccagtggtgggttccaaacggactttgtcgagccagctcccgggcccctgctgtgtctgtgggggttcagggtcaccagccccaagctatacccacaccagctcagacaccattcccggatatctcgtcttgattccagggtccctgccagcccccgagccctgggtgcaggctcttacgggaccagaccctagagctgaggacaggaaggagggtttgcgtctcccaccctgtgagaggcaatgcttgcgggggggactcacctccttcaaacctatcagtgccttcccctgtgagcctcccccccaaaagatgggggggcttggtaggctgggtacagtgcttctggaagctgtcacccccacagccagtcgtgaaatcctcaggggcctgggagtcacaagcccccttcccctcccttgctgggtggaagaggctgctccccctgctgtcccccgaagccagtggagcagccgctgctggagctgttgccagggcaaccgccgcggcatgtgcgtgtgacaggggcgatgggggctcgcagtcctggagacaaatgtgacgcaggagccaagtggcctgaactgcggggttggggagggggtgtctttgtgataacaagatgttccaggcagaaaaagggggctcggtaccctccctgcattttcctctccacattcacctcctcatccccagagcggcccgagaggggtgccctttgctccctgcatctcagatgggcaaacggaggcgcagggctgggagcccgcccaaggtcccagagccagcaagtgggctggggacggcagtcaaggtctctttggtgtccccagtgctaagctcctggggcaaccagctaggccagcccccctgaccccaactgcagctcctgcccctcccactgcccgttgctaggatgggtgcaataatggcgtcttggcacaggtgtacagaagacttggctcatcctgggtgcgcagaaacccctttggttcccctggaaaccccaggcttcctgggcagctgatagcctggctgcagccaactgcgtgggccctgggagccacctgccacagaggccggagctgctgtgaatggtgggcatatgcatctgtctgtgaccagtacaggaagcactggctgcctgggtggctctcagcacttacggggcaggagtgagccaggtgcaggggaccccccgtctttcccgtgggcccagacgtgatgtaactccttcccagtctctcaccctgggacagtagcatgaggcaggatgaacccccccatactctgctcatgcctgatgccaggaccagaaccacactcccatctgtccagtgagcagagggaggaccgccaaggagctcctgccttgtggcactggggctgagccacacctgcccatcccaccttgctccctggctgtcccccaggcctgggctgaatggggaatgacattttgcaaggaggatggcacatctcatttcacagcccagggtgggggcgacttgcccagagcccagatgtgaacctgggactcttaagccaagctgtctcctgccaggccatttgggggctcagggttgggggcagtgaggcagctgagtctgggggcagcggagcagaggctgggtcagccttcctccccagtgcaggctgtctaggaacaaacgccttcaacgtgttgggggcgcccttcttaccacatttggggcagggggttagctgatggtgccctgggtgtgtgcctggggcgggaggtggcaggacatctgccccacaggctggctctccacgctgccctcttggtcttctctccagcttccctgctcttcctccctcagccccccgactccccttcaccaggccctgggggtttcccgcaggaatctctccctggtctcaccgactcctccagatggcccctgcgaagccgatggcggtgcccaggtgcaggtcacctggcgggcccgctgcaaacgctgctccccggggtctcattccagtcgaaccccgggaatctgcattctaacaagcgctgccggtggccttgggctccccgaagcctcagacggctgccaaggtccagccgctggcgcccagcaggagcgcaggagaccggagcccgaggcgccttcttcctcccctcgcccgtgtctgcgcagcgctccctcctccctctgctcaccgaccccctccctgccccgcctcgcggcaccccctttcccggggccccgggcgcccgcaggagccacacccccagttctatgggggtctctcccctcggagggggcgggcggtccggggtgagtctgggggcgggtctagtgtgtcactttaaactcctcccccggagaccccggcccaggcaagagcccacagccctttgccgagtggggctgaaggaggggccgctttgcactcgcagggatttcggggggactaaagggccttacgaggacctgc

SEQ ID NO: 1242619 - DNA, 4001 bp, Homo sapiens
tgggagccacctgccacagaggccggagctgctgtgaatggtgggcatatgcatctgtctgtgaccagtacaggaagcactggctgcctgggtggctctcagcacttacggggcaggagtgagccaggtgcaggggaccccccgtctttcccgtgggcccagacgtgatgtaactccttcccagtctctcaccctgggacagtagcatgaggcaggatgaacccccccatactctgctcatgcctgatgccaggaccagaaccacactcccatctgtccagtgagcagagggaggaccgccaaggagctcctgccttgtggcactggggctgagccacacctgcccatcccaccttgctccctggctgtcccccaggcctgggctgaatggggaatgacattttgcaaggaggatggcacatctcatttcacagcccagggtgggggcgacttgcccagagcccagatgtgaacctgggactcttaagccaagctgtctcctgccaggccatttgggggctcagggttgggggcagtgaggcagctgagtctgggggcagcggagcagaggctgggtcagccttcctccccagtgcaggctgtctaggaacaaacgccttcaacgtgttgggggcgcccttcttaccacatttggggcagggggttagctgatggtgccctgggtgtgtgcctggggcgggaggtggcaggacatctgccccacaggctggctctccacgctgccctcttggtcttctctccagcttccctgctcttcctccctcagccccccgactccccttcaccaggccctgggggtttcccgcaggaatctctccctggtctcaccgactcctccagatggcccctgcgaagccgatggcggtgcccaggtgcaggtcacctggcgggcccgctgcaaacgctgctccccggggtctcattccagtcgaaccccgggaatctgcattctaacaagcgctgccggtggccttgggctccccgaagcctcagacggctgccaaggtccagccgctggcgcccagcaggagcgcaggagaccggagcccgaggcgccttcttcctcccctcgcccgtgtctgcgcagcgctccctcctccctctgctcaccgaccccctccctgccccgcctcgcggcaccccctttcccggggccccgggcgcccgcaggagccacacccccagttctatgggggtctctcccctcggagggggcgggcggtccggggtgagtctgggggcgggtctagtgtgtcactttaaactcctcccccggagaccccggcccaggcaagagcccacagccctttgccgagtggggctgaaggaggggccgctttgcactcgcagggatttcggggggactaaagggccttacgaggacctgcgggaggagggaagggacgaggacgctggggggtgcagcccgcccgggaggggtgctgggaggccccgggcccgtctgctcccccggggagggaggcgcgggggtcgaagcctcgcttggcggctcaagtgcgggggaggccgtcgccagcgcccggataccctccccgtccgctccgcagtgcggaccccaccgccgcaccctctcctgcgcgttcggaggggaaatgcccccgagaccccgcccctccaagcatgcgcggcctcagtttccccagggccgaggggacgtcgagaccttcccaccgccccccgcctcggaggccacccccgtgcctcctgggggacccggaccaagggggcggcggccgtcggtccgtccgggttggggcgcggggccgagcccagacggcggcccaacagcactggccgcagcccgcggcacttaccgtgggccggcgcggggatgggggggctcctggggcgctgcgctcggcaccagctcggggacgccgaggcacagctaccgctcccagccgcgcgcgccgacgactgagcaactgctgggcggacgccgctgcgggggcggggtctgactgggggcggggccgggcctgaccggggcggggcctgaccgcgctcgccccgccccccgcgtccacggcgccttaggggacccggccggggtctccgtgccttgagccgggccggagccccctcccccgggatgcggggctgtgagtcaacccacaggtggctgcgggacggggagcgggcttggctgcctcgggaccccgcctggccgcgcgcgccctccccgtggcgcgtggggtctagaagggggtggtcggcggggtctcctccgcggaccccagggaagccacggtcacgaagaccagcagcggtgcagacctttctggaagggcctgactcagggacacctcgcgggccccgccgctctcttctcggggcggggatgcgtcctgcagggatccactcgggacgccccacgcccacgcggacggtctgtggggcgatcgtccctggggctctggtgagggcccagttggcgcttgtggggtcacagccggccagagcccccggagcccctggggtctgcactggaccccgccagcccctcccgggtggctccccgctcttcctccgctgcgctgtcctggaaccccagcgggcccgcggtctcctgcagggtttgttaaggcattgatgggtcctgtccccaacccgctggtcccgaagtctgggtgggggcgcgatctgcgttttttccctttttttttcagacagagtctcgaaaaagctctcaaaaatagctctcaaccaggttggagcgcagtggcaccatctccactcgctgcaacctcgaactctccggctcaagtggtcctcccgcttcagcctccccagtagctgggaccacccgccggctaatgttttttggtttcttttgtggagatgggggtctccctatgttgcccaggctggtctcaaactcccaggctcaagggatcccccttccccggcctcctaaggcgctgagatcacaggtgtggtccccacgccagccagcgcctgcacttcccagctccagtctgctgccgccagtccagggaccacactttgagaagtccgtgctaagcatggtcctgtcgggggcctgaggctctcagacttgccgagggcgcagcggccccccggtcgcacctgcccttggtcgaatacagctggacactcgcagccctttggggacaaggggtggggggtggtcagactttggagttttcacccgaagggcacctgggcagcccaaggccagacaggcttccagaacacagctcttcaaagggagggggcccgtctgccaacaactgtcttggcttctggatcccaactcactcaaatccatgcccgccccacacctgtctgtgcaggatcgggggcaggacccctgggtgggctctccttcgggacgctcggcccaggctctgccggatcctgacccagcacagccaggccggtgggggagggcagggagcttgcaggaaatgcagggactggctgggacagggacgcggtgggggaagcaggggagggggcctgggccctcagccccactctgtagcagtgttctcctgaggggctggtgggtctggagaccgggtctgggagtgacgcccctgcctctgcggtcttgcaccaggttctgcccacctgttggaacaaacacaggccggttgccatggtgatcacactggctttaagtgaagggacaggctctgcagctacggtaaacaggaagttgggaggggcagccgctgctccggcccctacgagagcaccaaccctgaaaccaacactgcagtccgttgggtgcgggagcacccttggagacctctccccactcttttctaggtagggagactggagtccggagacgggaaagggcttttccagggccacatagtgataggttgagtcccaaaccagccctgggcctccgtttccccaggagaggacggtcactaggactgtcccctccacaaacatttggtgaggagtcgaggaatgaacga

SEQ ID NO: 1242620 - DNA, 4001 bp, Homo sapiens
gccctgggtgcaggctcttacgggaccagaccctagagctgaggacaggaaggagggtttgcgtctcccaccctgtgagaggcaatgcttgcgggggggactcacctccttcaaacctatcagtgccttcccctgtgagcctcccccccaaaagatgggggggcttggtaggctgggtacagtgcttctggaagctgtcacccccacagccagtcgtgaaatcctcaggggcctgggagtcacaagcccccttcccctcccttgctgggtggaagaggctgctccccctgctgtcccccgaagccagtggagcagccgctgctggagctgttgccagggcaaccgccgcggcatgtgcgtgtgacaggggcgatgggggctcgcagtcctggagacaaatgtgacgcaggagccaagtggcctgaactgcggggttggggagggggtgtctttgtgataacaagatgttccaggcagaaaaagggggctcggtaccctccctgcattttcctctccacattcacctcctcatccccagagcggcccgagaggggtgccctttgctccctgcatctcagatgggcaaacggaggcgcagggctgggagcccgcccaaggtcccagagccagcaagtgggctggggacggcagtcaaggtctctttggtgtccccagtgctaagctcctggggcaaccagctaggccagcccccctgaccccaactgcagctcctgcccctcccactgcccgttgctaggatgggtgcaataatggcgtcttggcacaggtgtacagaagacttggctcatcctgggtgcgcagaaacccctttggttcccctggaaaccccaggcttcctgggcagctgatagcctggctgcagccaactgcgtgggccctgggagccacctgccacagaggccggagctgctgtgaatggtgggcatatgcatctgtctgtgaccagtacaggaagcactggctgcctgggtggctctcagcacttacggggcaggagtgagccaggtgcaggggaccccccgtctttcccgtgggcccagacgtgatgtaactccttcccagtctctcaccctgggacagtagcatgaggcaggatgaacccccccatactctgctcatgcctgatgccaggaccagaaccacactcccatctgtccagtgagcagagggaggaccgccaaggagctcctgccttgtggcactggggctgagccacacctgcccatcccaccttgctccctggctgtcccccaggcctgggctgaatggggaatgacattttgcaaggaggatggcacatctcatttcacagcccagggtgggggcgacttgcccagagcccagatgtgaacctgggactcttaagccaagctgtctcctgccaggccatttgggggctcagggttgggggcagtgaggcagctgagtctgggggcagcggagcagaggctgggtcagccttcctccccagtgcaggctgtctaggaacaaacgccttcaacgtgttgggggcgcccttcttaccacatttggggcagggggttagctgatggtgccctgggtgtgtgcctggggcgggaggtggcaggacatctgccccacaggctggctctccacgctgccctcttggtcttctctccagcttccctgctcttcctccctcagccccccgactccccttcaccaggccctgggggtttcccgcaggaatctctccctggtctcaccgactcctccagatggcccctgcgaagccgatggcggtgcccaggtgcaggtcacctggcgggcccgctgcaaacgctgctccccggggtctcattccagtcgaaccccgggaatctgcattctaacaagcgctgccggtggccttgggctccccgaagcctcagacggctgccaaggtccagccgctggcgcccagcaggagcgcaggagaccggagcccgaggcgccttcttcctcccctcgcccgtgtctgcgcagcgctccctcctccctctgctcaccgaccccctccctgccccgcctcgcggcaccccctttcccggggccccgggcgcccgcaggagccacacccccagttctatgggggtctctcccctcggagggggcgggcggtccggggtgagtctgggggcgggtctagtgtgtcactttaaactcctcccccggagaccccggcccaggcaagagcccacagccctttgccgagtggggctgaaggaggggccgctttgcactcgcagggatttcggggggactaaagggccttacgaggacctgcgggaggagggaagggacgaggacgctggggggtgcagcccgcccgggaggggtgctgggaggccccgggcccgtctgctcccccggggagggaggcgcgggggtcgaagcctcgcttggcggctcaagtgcgggggaggccgtcgccagcgcccggataccctccccgtccgctccgcagtgcggaccccaccgccgcaccctctcctgcgcgttcggaggggaaatgcccccgagaccccgcccctccaagcatgcgcggcctcagtttccccagggccgaggggacgtcgagaccttcccaccgccccccgcctcggaggccacccccgtgcctcctgggggacccggaccaagggggcggcggccgtcggtccgtccgggttggggcgcggggccgagcccagacggcggcccaacagcactggccgcagcccgcggcacttaccgtgggccggcgcggggatgggggggctcctggggcgctgcgctcggcaccagctcggggacgccgaggcacagctaccgctcccagccgcgcgcgccgacgactgagcaactgctgggcggacgccgctgcgggggcggggtctgactgggggcggggccgggcctgaccggggcggggcctgaccgcgctcgccccgccccccgcgtccacggcgccttaggggacccggccggggtctccgtgccttgagccgggccggagccccctcccccgggatgcggggctgtgagtcaacccacaggtggctgcgggacggggagcgggcttggctgcctcgggaccccgcctggccgcgcgcgccctccccgtggcgcgtggggtctagaagggggtggtcggcggggtctcctccgcggaccccagggaagccacggtcacgaagaccagcagcggtgcagacctttctggaagggcctgactcagggacacctcgcgggccccgccgctctcttctcggggcggggatgcgtcctgcagggatccactcgggacgccccacgcccacgcggacggtctgtggggcgatcgtccctggggctctggtgagggcccagttggcgcttgtggggtcacagccggccagagcccccggagcccctggggtctgcactggaccccgccagcccctcccgggtggctccccgctcttcctccgctgcgctgtcctggaaccccagcgggcccgcggtctcctgcagggtttgttaaggcattgatgggtcctgtccccaacccgctggtcccgaagtctgggtgggggcgcgatctgcgttttttccctttttttttcagacagagtctcgaaaaagctctcaaaaatagctctcaaccaggttggagcgcagtggcaccatctccactcgctgcaacctcgaactctccggctcaagtggtcctcccgcttcagcctccccagtagctgggaccacccgccggctaatgttttttggtttcttttgtggagatgggggtctccctatgttgcccaggctggtctcaaactcccaggctcaagggatcccccttccccggcctcctaaggcgctgagatcacaggtgtggtccccacgccagccagcgcctgcacttcccagctccagtctgctgccgccagtccagggaccacactttgagaagtccgtgctaagcatggtcctgtcgggggcctgaggctctcagactt

SEQ ID NO: 1242621 - DNA, 4001 bp, Homo sapiens
gttcgagtacggcctgggcaacatcaggggatcctatctcaagaaaaaaataaaaaggatcagcttactcagagctgtggagaatgacctaaagaaaccactcaagatgtaaacctctttgaagaacggggctgagaggtggggcaggggaccattgcttttcattgtaagtctttcattgacgttcctattgtatacattatattgattaaaatactaaatatatgggcttttttttttaagaacataggcttcagacagactgaattcgaaccctggctctgtaaatctgagcaagtcccttagtgtctgcgggcctagtcacctcatctataaagtggacgcagcctctgcctcctgggtcatgatgaagcacccgagatgttgagctgcccccacgcagcgtggaatcacaaatggaagctcttttttaaaaagattaaagccccaggctggacaacaaggcgaaaccccctctctacgaaaaatacaaaaattagccggggtggtggcgtctgtggtccgagctactcaggaggctgcggtgggaggatcacttgagccagggaggccgaggctgcagtgagccaagatcacgatactgcattccagtctcggggaccgagtgaaaccctatctccaaaaaaataaaaatattaacgccaatgatgacagaatccaacatcgcaagaatatattcttattttaatcgccagacacgggaagtggacccacatacagaattttaccgcgttttggtgttttcttctagcactggatatctgcgagctgcgtgttaaatgaccagatccagtttttatttgacgtttcctgagcttactcagaaccactcactactccaagttatttttctgtcccctaagaacttccagctaaaagtgaaccctacaactgcctcctcttatcaattatttactgtagtgcgagttccagcatcgccatcaggccctggagtacattcctgggcagaacaggcaactccaaacagggcaattacctgttccacatcaacaactgtgtgacccgggccctccccggtcagggtgcaagctcgctacccttcaaagcccacactcgctccacttgctcacagttcttcagggatgatgtatttctccaatagcaagacaacccctaccatctcatcagtgaaaaacatcagtcctctatcaaggcaatctctccaatttgctcacacagtgtggatggaatgtcatctactttctgcatcctaggggggaaaaagaaaacggccaccttccttaaggactagatcacagaaatcgcacaaacgtgctggggagggggcaccccgaggtcctcgttcatcggggcccctcgggggacgggctggggtcgtcgccgaggtctgcggtccccgagagcgccccttgcgtgtgcaagtcctgggctatggggctccggtccacagccacggaggaggcacaaaaacgatgcctgtcgctcccgcctggctggcaggagcgacccccttgggagacttcgggccccagaggagcccgggcgcggttctaggcctttccagtctccccgccgtggctccgggtccttcccgcggggcgaggcccgggacagaggtcgggagcgcgaggcccccgggccgggctgcggcagccgcggctcaacggacgccgggcgcggtggggccgggggtgcggaagcgaggaagcgggagcccctcttccggggcgcggccggggacggggagcggggcccggggggcgatcgcccggcccgggcggttggcggcggcggggctgcggcgcgggcggcccggcgggcgggaggaggagggaggagggagatctcgctctcgctctcgccccgcgggaagggggaggcggaggcgcgaccggctgcgggagctgcaattaccgtgtgggctgcggaattctcgtggtgtttgtcggggagatgcgataatggcgtccgtcctcgcgagagaagccgccgctctgcgcaggcgccgcgagcccctccccgcgacgctcggcccccgccctccgcgcaggctcactgggcgcgcgggcccgggggcggggcacccctgtggcagtgaggccagctgcgcgcgcttttcccgctcggcctcctggtgagcatgcgcaggcggccttcttccgcgacggtaccggcttcccagggcttttttccccccgtttttcgcccacgcccatggcctgcgtgagaacaatcacctcagtggacggtctgaggaatttgcatcttctttgagacggaatgaatacgcattagctccctcaactactacacctcccagggtgccctgcgcaagctgggagccatgcattcggggactcgtagtccctgcgtctgggccatgcctgccgggacttgtagtctctccggactccggtggcccgtcctgtccccgcaccaagggttgctgggacttgtagttacgatgtctcaggtgggctgtgcgcccccagcgggtcctacctgctgctgcggcgggtcctgccctgaggttccggagcgcttggtggcgttttccctgacataagtggtcaggggtccccagtgtctatccagaggggcctgagtgcacgcgcgcgggacttagcacacgcggcagtgattatggtcttagataagtcctataggtaacacataatataaataagtgatggcggccgggcacggtggatcacgcctgtaatctcagccctgtgggaggccaaggcgggcggaacacctgaggtaaagggttcgcgaccagcctggccaacatggcgaaaccctgtctctactaaaaatacaaaattatgccgggcgtggtggcgggcgccttgtaatcccaactactcgggaggctgaggcaggagaatcgcttgagcccgcgagtcagaggttgcagtgagccgagatcgcgccactgcactccagcctggcgacagagcgagactctgtctcaaaaaaaaaaaaagtgatgacgtgaatgtgcacacgtagaataaatgtgcaaatgtgcgtttgtgggtaatcacaggaaaaaattcccaaaccatagcgcagttcccagaaatgtcattcctggttatctccctctgctaatctaggattaccttgcctttcattttcttctttatactcgcctctgtttcctcaattatttgcaatgagcaagaatgcctttgagctcccaaacacagggcgaggcagctattttcactgggaaaaagaaaatgctggccgggcgcggcggctcacgcctgtaatcccagcactttgggaggccgaggcgggtggatcacgaggtcaggagatcgagaccatcctggctaacacggtgaaaccccgtctctactaaaaatacaaaaaattagcccggcgcggtggcaggcgcctgtagtcccagctactcgggaggctgaggcgggagaatggcgtgaacccgggaggcggagcttgcagtgagccgagatggcgccactggactccagcctgggcagcagaacgagactccgtctcaagaaaaaaaaaaaaaaaaagaaagaaagaaaaacaaaatgctttaccttgaatttcctgcccaactcccttttgccaataataaaaacaggattcagcgcagtcatgggctatgcgaccttgggcaaccttaccgagttaaagtctcctccagaattaggcttggaggttccactgaggctggtggctgggttacttcgtggcaaaagtgccttacaaacactccaaggaggagccttggcaaaatggcagcgctgggacaggtgttgatctgaagatgggacttgtcctttttcaacatgaagatcagctccaaagagattagaaaaattgtccagcgaggccacagggctggagagaggcacaagctgagtttgcagtccagagcgccttgcttagagtgtggagtccactcacatggagggaaagggtgcgtgcgatagctgacacagaatattccctcc

SEQ ID NO: 1242622 - DNA, 4001 bp, Homo sapiens
atatgagagacacccaaactggcttttataacagacgccctgtcatgatcactaacccaccacgaggagagcccattagtctataaatgcactgaacgcattcctgagggctgagccctcatgatccaatcacctcttaatactgtgacactggggaccagctttcaacatgagtttcaaaggggacaaacattcatggtacatacaaaacatgttttatgaaaaataactatagcttccaaagaacaacaaaaccttaatgagaagagggataatattgttttacatttttacaaatttctaatgcccggcttaattgaaaacaactagagtttcctatctgcttccaccggtggtctgctccgatatgttgttttggtcgatgcatatgacaaaaaggcagcctcaccaggggaagtggctcacgcccgtaatcccagcactttgggaggcccgggggggtgcagattctgtgagtccaggagttcgagaccaacccgggcaacacagcaaaaccctgtctctacaaaaagtacgaaaaaataaaataaaatgcagccttacaaggagatgcagttagacaagggaaaagtatcttaataggctcttcagataattatggagattcctctttgacaccacaccaacacgcaacaagtgtgttttatttttccttaaaggctgtttgcaatatggaatgtgaactgtatccatgagcttctgcactttatggctttaagatccattggcttgacttgtactctaaatggatcttttacccaggcgtgatcccgcatcgaccatctggaaaatgttgcttcaccgagttaggcagctcttgcaaatgttgttcagtctataatatcaaaagcatacggttcatcagcattagcactggcatctgatttattgggagctctcgggctcacggtggcaaagacaaactttccaaaactccaacttcacttgacagctcaaactttatcactggcaacaaacactgttagctgacttctttgaggtgagaggctaacttcactcatttagtaagagatgtcagtaatctgtaaattatttttttatagtgttccatgaaaagagcagctagttcaactacaactcaaataatccctcaacaaccacccaacttcaaaatacaatgaaagtgctttccgtggacttgccattttatcagagcagaatcactgattttgtgaaacagctcatctgctgagttggccggggcacacccaacactgtgccatgaactgctgtcatgcgtcttgttagcaacgggagaaactgggtaccaggcacaagggcactccctatgctatctctgccacatatgtatacatctcaaaatgttccaaaatagaaggtttgcaaataagtatgtctttaggataaaaataacaaaaccctgccaatacacgatgtgccccacctgctaccaccaaatccttgcctgccaacctctttaagcacgttccaaaccctcacccaagcccatcctcaagtgtggctcttcccaagagctgctgaatcccaagcaagccatctgggtccagatccaccatcagactgaaattcatctcccaggtgtcagacaagagccccacaagcaagctcctgactgcgtgggcacctgccacggccagtgtttcgcatctcccctccctgtggccatcctcacggtccgcggggcctctgctctgctccagaagcccccagaaggtgggcaggaggtttggctggtgtgcatgagggccagcccccagtgaaggtgccccttgggactgtctcccagggtgggggtaggaggtgccggggacacctgtcacccccaggtctccatctcctgccttgacctctcaccggcactttcttcagtccagggtttaaaccccgtctaggccatggtcactcggatcagccatcccagcacttccacagctgaaccctcctcacttccctgttatctttctccccaagaatactaccaggagtcccggccacctccctgcggccccaccctcatcgccctgctctcgcccttccgcatcccgaggctcctccctctctgactccccctcagcccaccccctcacccgggacctgggctctcaccgagtaccctggcacccatcgctccgaagggtggcatcgcccctctgccacacacactccgatctggccgtctctttgtcctccaatgctccatgtgtccctcccaaaaccacacgggctgcagcaggaagaccatggccgctaagcccttctgtggctgacgccagcgctgttcctccagggggcctcctccccggagagcctgctagtaccaagcctggtcagccgcctccctcgcaagcagcctcacacctcagctcctctgtgcagggcccaggcctctccccatccagccactgcctctctacacaacctcgtcttattccttcccagggcaaacacactctaggtcagggggtggcacgtgagggcccacaacccagcccagctctccacctgcttctatgcagcctgtgagccaggaatgggttttacattttaaaacagaaaaataacaaaagaacaatatttcatgatgagaaaattacataaaactcaaatgtcagcgtccacaaacaaggtgcctgcttctcagcccaacagcagagtcgagcggcttcacagtggcacgagacatcccacgccccacaaggccagaaacacttacactctgaccctcacagaaaagcgtgccatcccgtcctgggcctctgggatccatcagtgaactccacaaagatctccacccctgtgggcatgcacggtgtcaccacccagtccccagtgtacgtgccaacatcatgctgaggttgctcccctcactgccaaggcgccgcaaggtcctccctcccccatgagaattctctatgtctgcaaaggatggatcccgaagcctccacgcattctgggccttcccctctgcaaacactgctgggctgtgagtttgtgccgctgagctcactggtggattttctactgtgaggttattagtctgatctccatagagattaaaatcaacttggatgagaagccacatgttcaatcacagtcacccctaagcaagcggcttaacgggaatagtttttgcttgttttttcttgagacagggtctcactctgccgcccaggctggagtgcagtggtgcaatcatggctcactgcagccctgcagcctccaattcccgggctcgagtgatcctccagtttccgcttcccaaagcgctgggagctttgggccaccatgcctggcccagtggatggccttttaaaaagtactttatacactacatccagagttacccaaattcagtcaaatgctgtgcataaccacccgctagtagacacacatcacagaagagtggtttccacgctctcgactggggcctacgatggtaagttcatacactcatcactgcaagtttcctgagtcgatacctacccgttagccactccgaaccatgctccttttatccaaggcatgctccattttatccagtattcttaacactggccatggcccactcaattgatgtgggttcagacccaaagtttgaaaaataatgcactcaaaataagaccaatgtcagtttctagggactcagagttcaagaacatgagggaacgtggcacaaacgaccaaggaccaccacctaacatgacctacaccacaaagaggagagccagaaattgtaagacaacaggccaattattgcaaactgtgtttgcccactgacagtcacaactgttggctgggaaacagggcacccagccttctaaaaacacttagggtgtgaactttctcaatctcagggacgcatttcggcagaaaacgcagactggcagcggcagcactctgctcagggacccaccgccagctcccaccgacacaagagctgagctcacttgaggacacgtagcggcaggggttgtccg

SEQ ID NO: 1242623 - DNA, 4001 bp, Homo sapiens
tagctcaagagcagcctgggcatgtaccgagaccccgactccataaaatattttttaaattaactgggtacagtggcacctgcctgtggtccctgctactcaggaggctgaggtgggaaaatcacttgagtctgggagggcaaggctgtggcaagctgtgatcgcaccactacactccaccctggacaacagaacgagaccctgtctcgaaaaaaggaaaactaaagcaatgaaatggaataccaaaaactgtaattcaagaaagctctccagaaaacaggacggagggtgcttgaaactactcgttaaaataatacactacaacctagggggaaaaaaacaaaaacaaaaccaccaacaccaagacacaacaccaagatacaacaccaagacagaacaccaagatacagcccaataaaaacactatttaaagaaaaattttttagccatccaagcaaaagactaggtgacttataacggaaagaaaattaactatcaaactccaacagaaaaaaaaaaggattaacgtatttaagacacacaaggaaagatatgtgagccaagaattttatatccagacaaaattactttcaagtataaaggcagcatccagtcctcagagaacagtattcccaaaaattccctcctgaaggcactggcaacaaacaagcttcggaaaaccaaaccactggagaggcattgggaagagcggctagcggagcaccctatctccacgcaggactgagacagaggagatgaaggctatgtgctaaacgcagacacaatgtaactgcttgaaactgggaggaattgggagtacatataaaaaacaaatgtaacaactttcaaaaacaaaaaccaatgttacaatgttcacaatgttcaatggctataaggagtggtagagttctttctgagcaattttcaaaaactaacaaaaacaaatgttacaatgttcattcagtggcggtaagaagtggtagagttcttttttttttttttgagatgcagtctcactctgttgcccaggccagagtgcagtggcaggatctcggctcactgaaacctccgcctcctgggttcaagcgattctccagcctcagcctcccgagtagctgtgattataggtgcccaccagcacacctggctactttttgtattttagtagagacggggtttccctctgtggccaggctggtctcaaactcccgacctcaggtgattcgcccacctcagcctcccaaagtgctgggatgacaggccgagccaccgcgcccggccggtagagttctgtctgaggacgccttgccttgtgtgcaattctgtcatccctgatgcccttgtgaacaagaaaagcagactatcaacaacggtaacaacttcactgggttgaaagggaaatatttttaaattcatgagttaataatattattaagcctttaatttgtttaatggtaataaaaagaaaaaatcaagcatttattctgcctttctatacaaatcacgtcactgaaaaaccacatcataagcaatagaatgtttctctgtataaaagcattctaacaaaagaacagtcatcgttttgcaatccctgatgaattaagaatctaggtaacagagttaccatcagaaaaagaaaaacacacactatctgcctcattaatgaagaattcagcaccatctatgtgggaggctcccctaccgaacaaacaaaaatgctgaatctaattaagcttctagaatcctaacatttcctaagtgacaggatatacagaggccagaagaacatgctaaactataccacagaaatgcaaataggaaaatcaaaatcaagactaggaaactcacatctgtcatcccagcactttggaaggccaaggcgggtggatcacctgtcagcctggccaatgtggcaaaaccccatctctactaaaaatacgaaaattagcagggtatggtggcacatgcctgtaatcccagctactaaggaggctgagaaaggagaatcgcttaaacccgggaggcggaggttgcagtgaactgagaccgtgccactgcactccagcctgagtgacagagcaagactctgtcaaaaaaaaaaaaaaaaaagaccaatcaacctaatcaaaaatgagcataaggaaatgaaaatgaattcacagaaaaacaagttatgtaaagatagtcaggccaggcgtggtggctcatgcctgtaatccagcactttgggaggctaaggtgggtggatcaagaggtcaggtgttcgagaccagcctagccaacatggtgaaagcccgtctctactaaagatacaaaaaattagacggggatggcggcgcgtgcctgtaatcccagctactgaggaggctgaggcaggagaatcgcttgaaatggggaggcagaggttgcagtgagctgagatcacgccattgcactccacactgggtgacagggggagactctgtctcaaaaaaaaaaaaaaaagtcaatctcgatgtgtaatctttttaaaacaatttaaacaagacaacatttttcaccaatcagattggcaaaaatcacaaaatatgacacacttcgccagaagatatcagaaaacatggctgttgcgcttttgctgggggtgtaaatgggtacaacctctttgaagggcaatagctatcaaaatgctaaatggccacagcccttaacctggccatgccccacacaacattcagccagcacagacattcacatatgtgtgcaaagacctacatacaaacaacaacaacaacaacaacaacaacaaaacaacgtaaggcattgtttttagcagcaaaagaatggatgtcagcattgcatagctaagaatggaatataccacgcagcttcaggagtcaacaagagcccccgaaaagcggctcccaaggtgcaggatcccgtgaatatcaactgggcagggcagtgtggacgagggcagtgcagacgacatgctttatttttaagaagtatgtcagatatgcacagaatatttccaggttaagatacagaagacctacaacagcctggggcatgggtgaaaaggaaattatttttcacttttcatcctctaataatatttccatttttatcctgtgcatttatcactttttcaaaaagaaaaagaagtatacttttaaaaaatgatcggacaggaaaatatgcagatctaagctgtggggggagggtccattccaactccacctacgcacgctcatgttcttcaaacactggtgctaggatcaacactgggatcttgctcagccttcggagctgctccagggaagcagaaaccacatagcctgactgaggggccctgtcaggcgcaactagcatgaaacttatgtggtgacactaaacctgcgtcctctgaagaggatctttcagctcagagtcgtcagtagtcagcttgaagatcaaagctacatgtcatcaatacagccttcttttttccagagtaagaaccagaagcaaagattattaaagggataaactaaacttattttttttttttttgagacagagtttcactcttgttgcccaggctggagtgcaatggcacgatctcagctcaccgcaacctctgcctcctgggttcaagtgatcctcctgcctcagtctcctgagtagctaagactacaggtgcacaccaccatgcccggctaattttgtatttttagtagagatggggtttcaccatgttgggtcaggctggtctcgaactcccggcctcaggtgatccacccacctcggtctcccaaagtgctgggattataggggtgagccactgcacccagccaactaaatttcctaatgaaaccagtagtcttcagtcaaaagccacccagccaaccttggcattggtgcatttaaaacgttttggggtcacagattgctttcagaacctttaaaaaaaaaaaggcaaaaaaacctgtagaaccttttctggccaggcgtggtggctcacgcctgtaatcccagca

SEQ ID NO: 1242624 - DNA, 4001 bp, Homo sapiens
atgagtcactgcacccagcctgtcagtgacttctaactgtaacaataactaacatcatgatgtgccagaccccgtattaatagcttaactctgttatactacttaatgaaaatgaagccttattttttacttctgtatcccaaggcatataacatacaatatacatggaagtgtcctaaaaactataaattgttacacaaatcctagcttattaaatccacactggatcagagaacatgcactctgaccacattccacactttctagttgagtggctccaagcactgtattgaacctctctgaactgcaatttctagtcaataaagtgagaaccataaaaagaaaataacaggtaacaatcagtgaccacttcctatatgtcaagcactttacatgtattaacttttttaaagctcatgaccccacgtattaggtactattattaagtgccttgcccaaggtcatgaaattagtaggtactggagccaagaaacaccatccctatgccatgctgctgccgttggccttgtgacaacgacgctgagatgactcatgtaataaagttttgtgcctgttataagttattagcgttgtcactacattccatgtattttgggcatgcctccgtcaaatacacagggctctgatttgccttgtctgttagcttctggactataagctttctgaaagtagggactccttttacatccgagtctccaaaatctatacagaaggtgtttagtagaagtctggtgaatgttacatgatttctcttttatctctttgactctcacatcttgcccagtaatcgcacatagtaaacacctaatacttagtgaataaattacggggaaagaactgaatgtacatgggcaaggatcaaaagtgcaatttgaataagttaatttttgtattgcattcttttgtcgttgttcggtaaaggactgtgaaaggctgggtgcagtggctcacgcctgtaatcctagtactttgggaggccgaggcaggtaaatcacttgaggtcaggagttcgagaccagcctggccaacatggtgaaatcctgtctctactaaaaatacaaaaattagccaggcgtggtggcgggcgcctgtaatctcagatactcgggaggctgaggcaggagaattgcaggaacccgggaggcggaggctgcagcgacccgagattgcgccactgcactccagcctgggcgacagggcaagactccgtctcaaaaaaaaaaaaaaaaaaaggaagaagaagcagtgttagagagtcagaggaattccgagttccaagtgacaagcagaggcccctggcttgaatctggggtcggttattactgctaacccgaaccaaaccccttccctcaggagacgtctcttttctaagctccctatgtccagggaccccgacctcgcctgactccaagtgcctgatgacaagaaaacgtcaacttctcagaaaagctcttcctctaagaccccactgtcctctgcaggatggagccacaaggtgctcgccgaccggttgccgggcaacacgggctgggggcggggtcggagaggggacgggatcccaggggcgcggccggcggagatcctgtggttccctggggcccgggctccctgcgggtgggagcggttaccttgcccgtttgggtggcggccgccaggcacgggtgagtcccgtcgtagcgccctatggccaccattcgggggctgattttgtggcgcagtttcagggtgaacacaggcagcagcatgatggcggcggcttaggggaggagggctggaagctggagacaagcgcagcggagctggcctcacgcgcccgggcaagaagtgcagggacactacctgcgcggccccagccgcctcaggccggacgcgaaacagcccgggacgaacccgtccaggtaccgcctgctcctcctgcggcggcgcagacccgtccgctctttttgcggctgcgcggtggagcctcggcgccttctgtggctgcgcagtggagcctcggcgccttttgcggctgcgcagtggaacccctgctgggccgcgggtgcggttgtttcccactgcagtaatttactcctgcgggttgaactctactgacgagcctacatgctcagcccagaggcttccccttctagcaccacatccaagctgcaccctgcaaacttgacacaatgctaccccactccagaaggtcattaattcaagaaatattccttgagtgtcggctctgtcccttgctttagccgttgtatggaggaaaaccataccaatccttagactcacgttcggtctagggctcctggtaaggctccctatatatttttaagtgcaaaccagcaaaattgaaaagtgaccaacagaatttccttgagggcctattgtgtgtcagacactgtgctagataataaatagtagtaaacaaaagacaaacctctgctttcctggaactgacatactagtcaggggagacaagcactaaacaagaaatgcatgtcatttggtagtgagcactagagaaaattaagggaaggaagaggggagagaggattggagggaatgcagtgttaagtagggtggtaggaaagagacctctctgagaaagtgaccttcagcctaggactattaggaagtgaggaagccagcctcgagggaggctgttcctgcagaggaacttcaggtgaggcccccggggctcactctgctgccttctggaaatggacaatctggggtggatgatgagatgagcaaggaccactagtggagacttggagtagccagcaaggaagtacaatcaggagagtatagtgtcctggaagctcgaagagagggtggccagaaggaggaaaacaactgtgtcagatgctgcgggccagttttgaaagatgagttctgggccaggggcggtggttcacccctgtaatcccagcactttgggaggccgaggcgagcggatcacttgaggtcaagagttcgagaccagcccggccaacatgatgcaaccctgtctctactaaaaatacaaaaatttactgggtgtggtggtgggcacctgtagtcccagctactcgggaggctgaggcaggagaatcgcttgaaccaggaggcggaggttgcagtgagctgagatcttgccactgcactcgagcctgggtgacagagcgagactccatctcaaagaaaaaaaagaaagatgagttctggaatattcttgatacttgcattttgtaattacagttatacaaatgagcatttttttcaaccctgttggtgtgtctgtgactatttgtaacctcttttggagataatatcaaaatactaaataatgttaaaagactaagtttgaaagttgttactttttaaaagttgatttttattttattttatttagagacgaggtctcatgctgtcacccaagctggagtgcagtggtgccatcacagctcactgtaatctcgaactcttgcctcaagtgatcctccagcctcggcctcccaaagtgctaggattataggtgtaagccactactcccagcctaaatttaaagatctcgatggaatgtaagacctgagtcagtggccctccaggccccctctgatggaccatgcttctaagacccagcctctttctatcctgtctccacccccacccttctgtcacctgtctacacccaagtcctatagcagctccctgaccagcggtgccatggaaattaccctgggtcattggaacttacttcgttttgtgatgtcccttctctttagtccccagattctacctacacaaagtcatcatctcactgaattcactcagctgtgttactagctgatcacagcttgatcagctacctctcccaggaatagcttgaaaggaatgactctaatagacatcatttcagatcctttattttttcctggaaaacatttattgagggtatccatgttctagacggtgttgaaggacctagggatacagcagtgaacaag

SEQ ID NO: 1242625 - DNA, 4001 bp, Homo sapiens
cagcagaattctcctgggctgtgactacaagggagagggtaggagatgactcagagcccgtgatggtgtggccaggctgcaggtccccacgacagtgcctatctgtccaagtcctacccagcccgctgttcctctcttgttacagatgaggcacagtgccaaagaaggctgcccaaagtcctgtaaggcaaggggtcagggtgccatcccagactccatgcccagagcttggctctgactgtggacaaccaaaccaaatcaaacggggacctccccatagaggcccgcccaggctgggatgtggccagagtgacattccctaatcactactgccctgggataccggccctccagcaggctcaggtggtccgccttgtccctctgcccagtgcccacaggagcagggctggccagtcccctgaggccctgggccagagaagtccagaactttccaggagagcagaacagaagagaggaagggcttggcaggcatgttctgtcttccttctttctgaagacgagacgattatgctctgaaccagaacggatggcggggctcacatcagcacagtctggaagccctcattttttcatctgtaaatacattaccacttctggaggcgagcaggagcgggctctttaattccacaataacaatgctttgcacttggccagcttccctctggtcatctgcactcactctgggatagttaatgaagaggccacttgccagaaagcccccactgcctgcttcacggaaaggatggggtcctccgggtgaggagcagttccagaaacaaggccagagtggacagggctctggagggaaaagcccctaactaggcagggaaacgatggctggaggccacagctcgccaggtgcagatggtgtcccttcctggcaggacgccggggtgtccgcctcccacctcccacttcagtctgtccatctgtcatgtggggcctgcacctgaggcctggttacccggggtagccaggatcacttgctgttctcaggaggtgagactgagatgctcagagatgccagtgcccaagtgtggaaacatggcccgggggtctgccgaagccaggctgcccggccaggaagagggggtgtcggacagaaaactccctacggccagcggggaggaagcggccagtcagggccccgggggttccgcagcgagaggaaaacttcccaggaaagtgagcccatccgccgtggagggcaggcacggctcccatccagccaagccgtcctgggggaggggtggctccggcgactggcagagaccgcgccccaacctggccaccccgggggagtcccgggagcgccgcagggcagcaatccgagggaggtcttgcgggacagcacaggcctcccaccccctcatccggcccagcagtcccggaggggagtcgcgggagcggcagagacccctccccgctaggcctagccgtcctggtgcggggtcctggcgggcaacagactcctgcctggcccagctgtcccaggggtttcccggggaccaacaaagagtcttcccgacctagccatcttggggggctccccgaggggacagtacggaccccagcccgatccagctctcctgaaagaggatggaaaggcgggggcagagaggccggcttgggggagcctcccccagccggtgcgctctcccccggggccgaggaggccccagtgaggcgacccccagtccgggagccaacgcggcatcaggcccgcagcgggcggggcgaggtcgcagccgggcgggggacagccggcccggggtcccgggcggcgcggtactcacaggcacggacatcttggccgccgcccccggggcctggcgggcagcggcgccagcgggctgggggctcgggtccgcccgcgccgctcagaggccccgcgaggggtcccggcgctttccggctcctccggctcctgagcgttcccggacgccggactgtccggccgctccagccgcgccgcgcatgcgccgcccgcgccgccccccccaccgtctccgcggccagggacgcgttaaaggtgaggaccccggacctaggcctttttctgtcggcccaacgcggcggggaggcgcggtctcctccgctcctcgccgatccctcgcgggccacctccagtcgcaccagctctgggtcgcccaaccagtcccctcccccaacactacactgccctgtggccctggccgggctcctaggccctgtgtccgggcgcagaccgggagggctcggccggcggaaggtgatcgcggggcagcatagcaggcctcccggagcccctctgccctcccccagctgagagcgagccccgagacccccagggaagaggagctccccaccccggaaacagtctagctcatcctggggtcgccctgacagtgacatctgacctggcttctagggaggatcctgtgtccctgtaacccccactcctgggcccaccctcagcccaccgtcctcccagaggctggaagacgagccttcgtgggcctgagacttcctttccccaggctaaacacccccaatttcagctgtttcgcatctaccatggtgcccacacatggcacctgcagccactgggcacgtgcatgttcgtccccatcgctccactcctgccaggcaggccttgctgatgccccgttacatttcataggcccaggcactgagatccctcacccactcaaaggaaggaccaggggtccgacccctctgttctgcttcctggggacggtgggtgagcatctagagcaagtggggctggggtccagagcactgtcccggaggtcagcgctgcccaccccagggaggaaagacggagccagctccatgaggctggtttgccgcagcccgggctcatggcggggacctgggggcagaaagctccagctgcctagggaatctctgtgtgggtgcccatgtggggggcgggcccttctgcctgccagggatgctgtgccaggaggccacggtggctggatggaggaagcagagccaggcagcaggctgacttcccccagctcccaaaagcccccagtagcaggtcaccgactgggttttcagcctttttccccaaggggcgtgcagccttgatcttttctccaggagtgtcccggtgaggatcccaagaggccagcagcaatgagggggtatgaggtatgagagaaagagggaaatccaggcctcccacgagagacccaagtccctgttctggcagtgatgaggggtccttccctgctccagtagagtatggttgccccttcacctcttgagtggggttcccaactgtgcacatcagcgtccgcagcccagtgctcagcaaggcattgttggaggggccaagcagggccacagcaagccggggggggggtggggggcctggaccgacagctgccacctcctcaaagggcgctctgtgcatgtctggcacgtggccctgcccgtgcccacccgcccgcatccagctggcacaggggctcctgagctgggagcagcagctctgcctggcgcccgggctcctggccacacgccctgctgtctctgatgcccccacccaccaccaccctggccctctcctttgctcctcgcccagaccccacctccctcccttgctcctgcttggggcccactgttcctgtctcctttcccatctcccccatatctaggtgccccagccagaatggggcgggcggtggagaaagatcccttctacctgcctgggcacagggaaaggagagcccaagggaggggcgcagatggagctggaccctccaatccatctcatcctgcctcttaccgccccaggggctgcttatttagggcatcagtaactcagcccttagcagggagagaggggaccctggctagagccctcacttactctgaggcagggatccttgggtgtgggcctgggggcagccagaggagcctcaccagggcagtgcatgccctctcctgacactaccaggtgtctg

SEQ ID NO: 1242626 - DNA, 4001 bp, Homo sapiens
gttaaaggtgaggaccccggacctaggcctttttctgtcggcccaacgcggcggggaggcgcggtctcctccgctcctcgccgatccctcgcgggccacctccagtcgcaccagctctgggtcgcccaaccagtcccctcccccaacactacactgccctgtggccctggccgggctcctaggccctgtgtccgggcgcagaccgggagggctcggccggcggaaggtgatcgcggggcagcatagcaggcctcccggagcccctctgccctcccccagctgagagcgagccccgagacccccagggaagaggagctccccaccccggaaacagtctagctcatcctggggtcgccctgacagtgacatctgacctggcttctagggaggatcctgtgtccctgtaacccccactcctgggcccaccctcagcccaccgtcctcccagaggctggaagacgagccttcgtgggcctgagacttcctttccccaggctaaacacccccaatttcagctgtttcgcatctaccatggtgcccacacatggcacctgcagccactgggcacgtgcatgttcgtccccatcgctccactcctgccaggcaggccttgctgatgccccgttacatttcataggcccaggcactgagatccctcacccactcaaaggaaggaccaggggtccgacccctctgttctgcttcctggggacggtgggtgagcatctagagcaagtggggctggggtccagagcactgtcccggaggtcagcgctgcccaccccagggaggaaagacggagccagctccatgaggctggtttgccgcagcccgggctcatggcggggacctgggggcagaaagctccagctgcctagggaatctctgtgtgggtgcccatgtggggggcgggcccttctgcctgccagggatgctgtgccaggaggccacggtggctggatggaggaagcagagccaggcagcaggctgacttcccccagctcccaaaagcccccagtagcaggtcaccgactgggttttcagcctttttccccaaggggcgtgcagccttgatcttttctccaggagtgtcccggtgaggatcccaagaggccagcagcaatgagggggtatgaggtatgagagaaagagggaaatccaggcctcccacgagagacccaagtccctgttctggcagtgatgaggggtccttccctgctccagtagagtatggttgccccttcacctcttgagtggggttcccaactgtgcacatcagcgtccgcagcccagtgctcagcaaggcattgttggaggggccaagcagggccacagcaagccggggggggggtggggggcctggaccgacagctgccacctcctcaaagggcgctctgtgcatgtctggcacgtggccctgcccgtgcccacccgcccgcatccagctggcacaggggctcctgagctgggagcagcagctctgcctggcgcccgggctcctggccacacgccctgctgtctctgatgcccccacccaccaccaccctggccctctcctttgctcctcgcccagaccccacctccctcccttgctcctgcttggggcccactgttcctgtctcctttcccatctcccccatatctaggtgccccagccagaatggggcgggcggtggagaaagatcccttctacctgcctgggcacagggaaaggagagcccaagggaggggcgcagatggagctggaccctccaatccatctcatcctgcctcttaccgccccaggggctgcttatttagggcatcagtaactcagcccttagcagggagagaggggaccctggctagagccctcacttactctgaggcagggatccttgggtgtgggcctgggggcagccagaggagcctcaccagggcagtgcatgccctctcctgacactaccaggtgtctgtgaaggcggcggctgctcctccctcacccactcctggcaggcaaatgatcccaggatgactcactccgtcctatagggaacagcctctggggcttcaaggctggcagttccaaccagaagcaacagctgggctgccagagcaggtgccagcgccctgagagggtccttgagagctaagcgaggccctcacaccgggactatttttgtccctggcctctggagggaaaggaatttggacctggccatggagtaaatctgtgcagagacaagcttcacaaccagctctcctgacatccaagctggcctctgtccccagggccttgccatgtctagaggggctgagggctgggaagtggctccttatctccctgtaccccccttcaggtgaccagggacttctctggcaaaggagctcctgccctgggagagtgcaatgattacccggcactagtaataatctcccgtcaggtggggcgcagtggctcatgcctgtaatcccagcactttgggaggccaaggtgggcagatcacctgaggtcaggcattcaagaccagcccgaccaacatggtggtgaaactccatctctactaaaaatacaaaaattagctgggcgtggtggtgcacacctgtaatcccagctgtttgggaggctgaggccagagaatcacttgaactcgggaggcggaggttgcagtgagccaagatcgcaccactgcactccagcctgggcgacagaaggagactccatctcaaaaaaaaaaaaaaaaaaaaaaaaaaaaacaactcagcatggaacatgtggcattagtaatgaaccaatactgatacatctttgttaactgaagtccacacttgattcagatttctcttttttttctttttttgacagactttcgctcttcttgcccaggctggaccgcagtggcacgatcttggctcactgcaacctctgcctcccgggttcaagcgattctcctgcctcagcctcccaagtagctgagatttcaggggtatgccaccatgcccagctaatttttttttttttgagatggagtctccctctgtttcccagggtggagtgcagtggctccatctctgctcactgcaacctctgcctcccgggttcaagcgattctcctgcctcagcctcctgagtagctgggattacaggcgcgcgccaccatgcctggctaatttttttttttttttttttttttttgtatttttagtagagatggggtttcagcatgttgcttaggctggtctcaaactcctgacctcatgacacgcctgcctcagcctcccaaagtgctgggattacaggggtaagccaccgcaccgggccaatttttttcttgtatttttagtagagatgcggtttcaccatgttggtcaggctggtcttgaactactgacctcaagtgatccacctgcctcagcctcccaaagtgctgggattacgggcgtgagccactgcgcctggccaaagatttctccagtttttacctaacgtcctttttctgttctgggattccaaccaagattccaccgtctccttgggttcctctgggctgtgacagtttctcagactttgtttttgatgaccttgacagttttgaggtgtgcgggaaacatttacagaatgaaataaaacatttatagatgtccctcaattaggatttgtctgacgtttttcttacgattagactgggttgtgggttttggggaggaagaccccagaggtcaagtgccattttcatcccatcatattggggtgcatactgacaacatgaagtatgatcactgttgaggctcaccctgaccacctggctgagggagtgtttgtcagggttctccactgtaaggcgactctttttccccctgctttctgtagggtacttcctggaaggaagtccctgtgtgccatccacagccaaggaggagggagttcctatgctccacctcctgagggtggactctatggagatgatttggaattcttctggatgagagattgcctgttctccctcatttatttatttatt

SEQ ID NO: 1242627 - DNA, 4001 bp, Homo sapiens
ccagagtggacagggctctggagggaaaagcccctaactaggcagggaaacgatggctggaggccacagctcgccaggtgcagatggtgtcccttcctggcaggacgccggggtgtccgcctcccacctcccacttcagtctgtccatctgtcatgtggggcctgcacctgaggcctggttacccggggtagccaggatcacttgctgttctcaggaggtgagactgagatgctcagagatgccagtgcccaagtgtggaaacatggcccgggggtctgccgaagccaggctgcccggccaggaagagggggtgtcggacagaaaactccctacggccagcggggaggaagcggccagtcagggccccgggggttccgcagcgagaggaaaacttcccaggaaagtgagcccatccgccgtggagggcaggcacggctcccatccagccaagccgtcctgggggaggggtggctccggcgactggcagagaccgcgccccaacctggccaccccgggggagtcccgggagcgccgcagggcagcaatccgagggaggtcttgcgggacagcacaggcctcccaccccctcatccggcccagcagtcccggaggggagtcgcgggagcggcagagacccctccccgctaggcctagccgtcctggtgcggggtcctggcgggcaacagactcctgcctggcccagctgtcccaggggtttcccggggaccaacaaagagtcttcccgacctagccatcttggggggctccccgaggggacagtacggaccccagcccgatccagctctcctgaaagaggatggaaaggcgggggcagagaggccggcttgggggagcctcccccagccggtgcgctctcccccggggccgaggaggccccagtgaggcgacccccagtccgggagccaacgcggcatcaggcccgcagcgggcggggcgaggtcgcagccgggcgggggacagccggcccggggtcccgggcggcgcggtactcacaggcacggacatcttggccgccgcccccggggcctggcgggcagcggcgccagcgggctgggggctcgggtccgcccgcgccgctcagaggccccgcgaggggtcccggcgctttccggctcctccggctcctgagcgttcccggacgccggactgtccggccgctccagccgcgccgcgcatgcgccgcccgcgccgccccccccaccgtctccgcggccagggacgcgttaaaggtgaggaccccggacctaggcctttttctgtcggcccaacgcggcggggaggcgcggtctcctccgctcctcgccgatccctcgcgggccacctccagtcgcaccagctctgggtcgcccaaccagtcccctcccccaacactacactgccctgtggccctggccgggctcctaggccctgtgtccgggcgcagaccgggagggctcggccggcggaaggtgatcgcggggcagcatagcaggcctcccggagcccctctgccctcccccagctgagagcgagccccgagacccccagggaagaggagctccccaccccggaaacagtctagctcatcctggggtcgccctgacagtgacatctgacctggcttctagggaggatcctgtgtccctgtaacccccactcctgggcccaccctcagcccaccgtcctcccagaggctggaagacgagccttcgtgggcctgagacttcctttccccaggctaaacacccccaatttcagctgtttcgcatctaccatggtgcccacacatggcacctgcagccactgggcacgtgcatgttcgtccccatcgctccactcctgccaggcaggccttgctgatgccccgttacatttcataggcccaggcactgagatccctcacccactcaaaggaaggaccaggggtccgacccctctgttctgcttcctggggacggtgggtgagcatctagagcaagtggggctggggtccagagcactgtcccggaggtcagcgctgcccaccccagggaggaaagacggagccagctccatgaggctggtttgccgcagcccgggctcatggcggggacctgggggcagaaagctccagctgcctagggaatctctgtgtgggtgcccatgtggggggcgggcccttctgcctgccagggatgctgtgccaggaggccacggtggctggatggaggaagcagagccaggcagcaggctgacttcccccagctcccaaaagcccccagtagcaggtcaccgactgggttttcagcctttttccccaaggggcgtgcagccttgatcttttctccaggagtgtcccggtgaggatcccaagaggccagcagcaatgagggggtatgaggtatgagagaaagagggaaatccaggcctcccacgagagacccaagtccctgttctggcagtgatgaggggtccttccctgctccagtagagtatggttgccccttcacctcttgagtggggttcccaactgtgcacatcagcgtccgcagcccagtgctcagcaaggcattgttggaggggccaagcagggccacagcaagccggggggggggtggggggcctggaccgacagctgccacctcctcaaagggcgctctgtgcatgtctggcacgtggccctgcccgtgcccacccgcccgcatccagctggcacaggggctcctgagctgggagcagcagctctgcctggcgcccgggctcctggccacacgccctgctgtctctgatgcccccacccaccaccaccctggccctctcctttgctcctcgcccagaccccacctccctcccttgctcctgcttggggcccactgttcctgtctcctttcccatctcccccatatctaggtgccccagccagaatggggcgggcggtggagaaagatcccttctacctgcctgggcacagggaaaggagagcccaagggaggggcgcagatggagctggaccctccaatccatctcatcctgcctcttaccgccccaggggctgcttatttagggcatcagtaactcagcccttagcagggagagaggggaccctggctagagccctcacttactctgaggcagggatccttgggtgtgggcctgggggcagccagaggagcctcaccagggcagtgcatgccctctcctgacactaccaggtgtctgtgaaggcggcggctgctcctccctcacccactcctggcaggcaaatgatcccaggatgactcactccgtcctatagggaacagcctctggggcttcaaggctggcagttccaaccagaagcaacagctgggctgccagagcaggtgccagcgccctgagagggtccttgagagctaagcgaggccctcacaccgggactatttttgtccctggcctctggagggaaaggaatttggacctggccatggagtaaatctgtgcagagacaagcttcacaaccagctctcctgacatccaagctggcctctgtccccagggccttgccatgtctagaggggctgagggctgggaagtggctccttatctccctgtaccccccttcaggtgaccagggacttctctggcaaaggagctcctgccctgggagagtgcaatgattacccggcactagtaataatctcccgtcaggtggggcgcagtggctcatgcctgtaatcccagcactttgggaggccaaggtgggcagatcacctgaggtcaggcattcaagaccagcccgaccaacatggtggtgaaactccatctctactaaaaatacaaaaattagctgggcgtggtggtgcacacctgtaatcccagctgtttgggaggctgaggccagagaatcacttgaactcgggaggcggaggttgcagtgagccaagatcgcaccactgcactccagcctgggcgacagaaggagactccatctcaaaaaaaaaaaaaaaaaaaaaaaaaaaaacaactcagcatggaacatgtg

SEQ ID NO: 1242628 - DNA, 4001 bp, Homo sapiens
tctagctgaccagttggtttagccggctgtgggctcctgggggcaagggaaggagttgtccaggctcagaagaaaagggtggtaggacctcctaaagggacagcagatgccaggagagggccgcaaaggcacagcgttggaaccagagggttcctaccaagttgacaactccaaaagagcatggtggtcccccaaggaccagagctcccccaatcccagactgggaattcggaggccacatgtggtgctgcactggggggccatgccagaagacgaggttctggatccaattctgaggacaactgactgtctctctgtacctcagtgtccccatctgcaccatccgtataatgggaaaggggtttgaggagctgtctcagggcccctcctgtacagacaggaggccctagtggcactgtccttatttccatccctcgcctagacctggggccatggtaccagtacacagtgctcaccctcctgctcagacaaacagtaacggccagaagctccaagcctcctgccccagcccaaggtgactttcctggcagaacctgggactgccctgccctgccctgcctccacccagctcccgggcaagcagtgccaggaggaagtgtcagcagctcctccccaaagctcttttccccacagccccgccacccccgtacctgggccccgattctccaggcaccccgacacctgctctcacaggccggccagcccccaccacccaactctccaccgagggaaaggaatgggcacaagagggggcgtgtcccggcccagggcgatgggaaacatctcactagcaaagaagagatcaacccatggtcattctgagaaggtgaccaaagctgcggcgggccccgggaggggtgtgggaaaggaaaccagggactctcaggagggaacgggagccttgtggtagaaaaggagctgctgtccccgatctggaactcgaaaccccaacatcttccaggccgtaagcccctcaccccgcacccctaggcaaatctccgctttcccaactccctcacctcggtccagcgatcagcctctcggaccctcgagagggagctccgaccctgctctagctcttgcgggtcccccaaccatggactccaaagccttcatgtccacactgcagaacccggccctggccccctcccgcgacactcgcgtgcggctaggactcctgtggccaggacccggcttccaccggcgctcggcgtgcggggctgcaaagcccgcggcgcgcccgcccccactcccgctccgctcccggaaccccgcgccggcggccggagtgaatcattaactggagccgggtgctccggctgcgcagccttccccgctggcgccacgcacttgcccgcccggcctcggtcccccggagctcctccctctccgggagccggtgggcagtccccacgccacaccagccggaccacccgccagaggctcaacggcccctcctcgcagccgaggaaactgaggctcggaggcagggcgcagaggcccaaggtgacacagcaggcggccgtcggccggggagcgcgggccccgccagccactttcccgacacaggaaccctcctaccggctggcggcccccgcgcccggccccgccaacgcacccgaggcgcacaggctccggagcccccgcggttcctgcctcccggcttcccggccagggcagaaggagatcccagggccgcggaccccggccggcggttcccaggccccgcaggtccggcaggaaatgccgctcgcttaaccccttccagcccgctgccgcctccaagcccgtacgcggcccggccccacctggcgccctcaccaggtggttcatggtgtccggcgggcctggggccccggctctcgcgggggcgcacaccgagctgcccgggccgcgtgccctcggggctccgagcgcgccgcagccgccccggtgccgccgcgcagctgccgcctcggccacccagagccggtccagccgctctccgcctgccgccacggcccagccggcccagcccgatcccagcatgcccggccgcgcgcgcccattggccgccgccgctctccatgcaaataagccgcctgtcgggggcgcgggcgcgcagacagaagcccgcccagtaggggccgccccccgccccgccccccacctccaaccccgaggctccaggcccctgcccgaggccaggcttccagcctagggcgcaggacaccgctctccaacaaatgcacgtccccgccttccacccaggcgagaacgcaccgaaggcctacgcaaactcctccacttctgggaaggctgcccggtttgccttcttcctccagagccgagacatggcctcaagtcgacttgtctttcccgctaaccaaccccagggcattcatcgcgtgtccatgggccgtgggactcaaatctgaatctagagggaaaggggagggggcgtgccccagcctgtaggagacgaatcatcaccaccacagctccgactgtagacggtcccaccgtgtaaggaccccaggaaatgaagcctcaagcagggaggctggcgagctctcgacccagcgcttttcacgggcagcacctaccttcccctgcattgtgccgacatctggggactcgggctggtcctccagctgatctgcctcctctcattactcattcctaggttcagcctaaaacctgggcctagtaccctcctgagtcctgctccaactcatctgcttcagcgacatggggtaggagagcggcactgggggaatgagggagatagaaggaagaatcactcgggggaaaccgagtggagacaaccttggctctcctgagttgccccttgctcggttgcaggtcagtgactgtcaccccatgcagcagaaccagggtgccagagcccctgggccaggccagggaggcacaatctgcagggagatgataggaccgagcctggtccagaccagacaggaccctcagtcaacaatcctgggccactggctgagcaatgggatgccacgaggcagccctggtggcagggaagcagcggggtagacccggcttcacgcagcagagaattctcaagcatggcctatggaagacacaagcccaggtgggcctgcagctgcccctctgtctgacccccagggctcagcctacgcagcgcctggccagatgtgccaccttggcaggccctctcccctctctgggctcctttctcatctgaaaaggggctaggacagcccatgatttgctgctcaggtgctctggggagctagttaaaaaacagactcctgtgtcccacccctcccaaaaaactggacgtctgcatttcttcaatatttggcttgggaagcattggccagaactcacagcacagcgggtgaggaaggagcagtgggatgagacagagcatgacccagagtcctcaggaggaacagaacagctagccaacaccctgtgcctccccgacacagcccgcctcgcctcagaagaggagccagccttcagggaagctgcctggagcatctcctcctgcttgttcccaagagctgtgccgggcccctcctgcaccctgaccctgtccagccacccactcctcagcctggctggcacaccagcttcccagagagcaggtctgaaccagcgggaccctcaggagcctgaggtcatccctgggcctccacttctgtggggaggggagaccaggcctcatgggcaggcagtgccctgctggcagggccccaggcagcagtctctgcagggacgggcaaggacacaaaaggcctggccctcaagggagctggcccctgctccatcctagttggccaaggagggcggtgcagagaggaggtggatggctggaaccttgggggatgagaccctcctcccccagtagctgcattagaacagcactgggggtggggctgctggtgtgagcaggaggcagcaagggaaacaggctccgacacaggcatttcaaaaatttgctc

SEQ ID NO: 1242629 - DNA, 4001 bp, Homo sapiens
gagatagcgcaggcctagtggacaaggcctctgtctgaaccgggcctatactgtagtgggacagaaagacaccaaacaatttgctttcacggggaagaaagtggggtgccaaaaataatgtgggagaaggcctttgcatacagggtcagagacggcctccccaaagagatgacattccacaggattcctgtctgagaagagcatggggcagaggaagggcctcagccagggggctggagcagggaggcaggctgtgaccctggagcggcaaaaggactcacaccgcagactccatggatgatgcgtgcacagctcagtgaacgtcatccgcacaaccagcttccccacggccagataagcccagacgagcaaagcacacaccaccccaagcattcctgctctggacatgctcgcaggccccccagcagcctcccccggaacccctgccatgcttcaaactggaggagaggccagcctccccaagcctactttcctggcctcccgcactgctgggcctagggcatgacccaagctgggccagtcaggtgctcctgcccaagttttcaagggacacaactgtgacctcagaaggggtgcaaagccagtccaggtggacactgtcagccacctgtgtccaaggcgcagtggaggctgctgcctgactcactcattctctggtaccctactcctgccgcaccctactcccacttcagaacatgctggactatcatcccctccaggaaggctcctcctgggacaccttctcccctctgcccccacctcacagtactgcccagcatatcttgacatagcccaattcacacccctgcaccccaggcacccaggacaggaggacaagtctacctccttcagaagggtaactccagggcacgtgcaccagaggaacccaggaaggcctttgggggcttgctcatcccaaagggcagggccagaggaggagagccccagcctgatgccagcactccctaaacaatatcccagctgttgcacataggactgacaggactgccccacacgctctgcctggctctgagaatggccctcattgtgtccccggggcccgcctgggcaccatatccacccgggctgggcaggcaggccctgagaagcacagcggctgggaccagggctgcgggtgacacacgtcagggagagctgcagccgtcggatgggtgttggggtctcctcattggctctgccagctgccttgggagccctggacgtgctgtggctgtccccaaactccttctctgggtcaggcggaagctggtgtcggcgagtggtaaggggagatgctgctgctccaaggagccttccctggttgcctgaagggacaacccaggagttctcaggagcagggccagcccaaaccaactgcagagaacactgcaggtatcactgctgaccaaaaccctctctgccaggcctggctcatatctggcctgcaccctttcacccagcaaatatgacctcagcacccgcaagccagcacaaggtgggagctgggagaaaatggcaagaactcctgttctctgcccaagaccccagggttgggggcagacaaggaaatgggtaatagtgccacacttgtcactaagttcacaataataagaacagcacagttcctccctgcgggaggcagagctctttcccacacagccaccagctcatttaaccctcaaaacaaccccataagacacgattacctccatcttactagacaggaaaaccaaggctcagaagctccctgacagcccagggtcactgagtccagaagcagcagaggccgaccccaggctgagacacggtggagctgggtggctccactttatctccaccgaggggtgacgcctgggttcgtggaaaccaccagaggaaatgtcacaggcctttcccacccctcctgtccacgcccccaacgcacacatgcacccgccccagcacagagcctcgcacatagcaggcacttgggaaacactgacttctttcatacccagaaccatcacaaacttgggccaagtttatttctggggcattctatttgcttgtcccaaagagcctccgtggccaacggatgcaggcccaataagcatgcgcccaactggccatccgcacccgggacccacctggaggggtcctgatcaccccacttggtcctggcctcaggctctgaggggcacctcctcttccctcccccatgtccccatcctgggtggaactccaggacctgccagccttagtggcaacttcccctaatactcccacaacaacagggtggccagggtctgggctcaagtcctgggtgcccgggtggcaggcagcaagggtgtgagcagactacatagcctgtgcacggggcccacgttccagagccaccccaggggagcatggctcctatcctgccagccttaggagggcgtgaatcgtcggagaggatgaggccgggaaggcgtgcaggccctcagccccacgcgtgacactcagcagcaggagggaataaaaagccacctgtggggtggccactgccaagggctccccgacacaagcacagagcacagcctggccttggctgcagcaccacagcagatgcctttatgcccagggccagctatgggctgaaagcacaccccagtcctcactccagccagggcatcccaggcactgtccctaagaggctgggcagaggaggtggcatggggagggctctcctgcttcaggacatggaacctgcaacccaaaacaccccacagacagtgcggacggctggcaggccccaggcctatacccctgcaggcaggatcagcggtgttcactcaagcggacctgctggagctcatgcttgtgatccggggttttggcagagagctcggtgtgaggctgacccctgacttcagggacagcaccaggcccagaataggggtagcccccacctccaaccccaactgtgtcatcaaggaggctagacccacccctccaccctacttctgccccaggctagaatgtagaggtgggaggaagtcagggaagcaagacacaggtggagccagggcctctcctgtgctcggagggccaggaagggcctgacagagggcagagccccaccctcttacacggagaccaccctgcagccctttatctgggggccaaggaagaggcttgcccagtgtctttgctggagaaacttccctatcacccaatcccactccccacacttcacctctgactccaaaactgcctcctcttagaagcccccctggagcgcacctcccctgctggttggttctagctgaccagttggtttagccggctgtgggctcctgggggcaagggaaggagttgtccaggctcagaagaaaagggtggtaggacctcctaaagggacagcagatgccaggagagggccgcaaaggcacagcgttggaaccagagggttcctaccaagttgacaactccaaaagagcatggtggtcccccaaggaccagagctcccccaatcccagactgggaattcggaggccacatgtggtgctgcactggggggccatgccagaagacgaggttctggatccaattctgaggacaactgactgtctctctgtacctcagtgtccccatctgcaccatccgtataatgggaaaggggtttgaggagctgtctcagggcccctcctgtacagacaggaggccctagtggcactgtccttatttccatccctcgcctagacctggggccatggtaccagtacacagtgctcaccctcctgctcagacaaacagtaacggccagaagctccaagcctcctgccccagcccaaggtgactttcctggcagaacctgggactgccctgccctgccctgcctccacccagctcccgggcaagcagtgccaggaggaagtgtcagcagctcctccccaaagctcttttccccacagccccgccacccccgtacctgggccccgattctccaggcaccccga

SEQ ID NO: 1242630 - DNA, 4001 bp, Homo sapiens
cacggtgatctgccagccagccacgtagggggcagatggcaaagacctctgcccacccccagcagaattctcctgggctgtgactacaagggagagggtaggagatgactcagagcccgtgatggtgtggccaggctgcaggtccccacgacagtgcctatctgtccaagtcctacccagcccgctgttcctctcttgttacagatgaggcacagtgccaaagaaggctgcccaaagtcctgtaaggcaaggggtcagggtgccatcccagactccatgcccagagcttggctctgactgtggacaaccaaaccaaatcaaacggggacctccccatagaggcccgcccaggctgggatgtggccagagtgacattccctaatcactactgccctgggataccggccctccagcaggctcaggtggtccgccttgtccctctgcccagtgcccacaggagcagggctggccagtcccctgaggccctgggccagagaagtccagaactttccaggagagcagaacagaagagaggaagggcttggcaggcatgttctgtcttccttctttctgaagacgagacgattatgctctgaaccagaacggatggcggggctcacatcagcacagtctggaagccctcattttttcatctgtaaatacattaccacttctggaggcgagcaggagcgggctctttaattccacaataacaatgctttgcacttggccagcttccctctggtcatctgcactcactctgggatagttaatgaagaggccacttgccagaaagcccccactgcctgcttcacggaaaggatggggtcctccgggtgaggagcagttccagaaacaaggccagagtggacagggctctggagggaaaagcccctaactaggcagggaaacgatggctggaggccacagctcgccaggtgcagatggtgtcccttcctggcaggacgccggggtgtccgcctcccacctcccacttcagtctgtccatctgtcatgtggggcctgcacctgaggcctggttacccggggtagccaggatcacttgctgttctcaggaggtgagactgagatgctcagagatgccagtgcccaagtgtggaaacatggcccgggggtctgccgaagccaggctgcccggccaggaagagggggtgtcggacagaaaactccctacggccagcggggaggaagcggccagtcagggccccgggggttccgcagcgagaggaaaacttcccaggaaagtgagcccatccgccgtggagggcaggcacggctcccatccagccaagccgtcctgggggaggggtggctccggcgactggcagagaccgcgccccaacctggccaccccgggggagtcccgggagcgccgcagggcagcaatccgagggaggtcttgcgggacagcacaggcctcccaccccctcatccggcccagcagtcccggaggggagtcgcgggagcggcagagacccctccccgctaggcctagccgtcctggtgcggggtcctggcgggcaacagactcctgcctggcccagctgtcccaggggtttcccggggaccaacaaagagtcttcccgacctagccatcttggggggctccccgaggggacagtacggaccccagcccgatccagctctcctgaaagaggatggaaaggcgggggcagagaggccggcttgggggagcctcccccagccggtgcgctctcccccggggccgaggaggccccagtgaggcgacccccagtccgggagccaacgcggcatcaggcccgcagcgggcggggcgaggtcgcagccgggcgggggacagccggcccggggtcccgggcggcgcggtactcacaggcacggacatcttggccgccgcccccggggcctggcgggcagcggcgccagcgggctgggggctcgggtccgcccgcgccgctcagaggccccgcgaggggtcccggcgctttccggctcctccggctcctgagcgttcccggacgccggactgtccggccgctccagccgcgccgcgcatgcgccgcccgcgccgccccccccaccgtctccgcggccagggacgcgttaaaggtgaggaccccggacctaggcctttttctgtcggcccaacgcggcggggaggcgcggtctcctccgctcctcgccgatccctcgcgggccacctccagtcgcaccagctctgggtcgcccaaccagtcccctcccccaacactacactgccctgtggccctggccgggctcctaggccctgtgtccgggcgcagaccgggagggctcggccggcggaaggtgatcgcggggcagcatagcaggcctcccggagcccctctgccctcccccagctgagagcgagccccgagacccccagggaagaggagctccccaccccggaaacagtctagctcatcctggggtcgccctgacagtgacatctgacctggcttctagggaggatcctgtgtccctgtaacccccactcctgggcccaccctcagcccaccgtcctcccagaggctggaagacgagccttcgtgggcctgagacttcctttccccaggctaaacacccccaatttcagctgtttcgcatctaccatggtgcccacacatggcacctgcagccactgggcacgtgcatgttcgtccccatcgctccactcctgccaggcaggccttgctgatgccccgttacatttcataggcccaggcactgagatccctcacccactcaaaggaaggaccaggggtccgacccctctgttctgcttcctggggacggtgggtgagcatctagagcaagtggggctggggtccagagcactgtcccggaggtcagcgctgcccaccccagggaggaaagacggagccagctccatgaggctggtttgccgcagcccgggctcatggcggggacctgggggcagaaagctccagctgcctagggaatctctgtgtgggtgcccatgtggggggcgggcccttctgcctgccagggatgctgtgccaggaggccacggtggctggatggaggaagcagagccaggcagcaggctgacttcccccagctcccaaaagcccccagtagcaggtcaccgactgggttttcagcctttttccccaaggggcgtgcagccttgatcttttctccaggagtgtcccggtgaggatcccaagaggccagcagcaatgagggggtatgaggtatgagagaaagagggaaatccaggcctcccacgagagacccaagtccctgttctggcagtgatgaggggtccttccctgctccagtagagtatggttgccccttcacctcttgagtggggttcccaactgtgcacatcagcgtccgcagcccagtgctcagcaaggcattgttggaggggccaagcagggccacagcaagccggggggggggtggggggcctggaccgacagctgccacctcctcaaagggcgctctgtgcatgtctggcacgtggccctgcccgtgcccacccgcccgcatccagctggcacaggggctcctgagctgggagcagcagctctgcctggcgcccgggctcctggccacacgccctgctgtctctgatgcccccacccaccaccaccctggccctctcctttgctcctcgcccagaccccacctccctcccttgctcctgcttggggcccactgttcctgtctcctttcccatctcccccatatctaggtgccccagccagaatggggcgggcggtggagaaagatcccttctacctgcctgggcacagggaaaggagagcccaagggaggggcgcagatggagctggaccctccaatccatctcatcctgcctcttaccgccccaggggctgcttatttagggcatcagtaactcagcccttagcagggagagaggggaccctggctagagccctcacttactctgaggcagggatccttgggtgtgggcctggggg

SEQ ID NO: 1242631 - DNA, 4001 bp, Homo sapiens
ggcctggccggggctgagaagatgcagctctcggcccagggccaagcagaggcacagacttgccgccctgccctcccaccgctgcgcaccccacacctacctcctggccatactggctgggaagcagcccccgaaccgggggcacatcatagatgtcctgtggccccggggccagcaggtgtcgcgggatgtcgtactcgtcctgctccggctgggcggcctcgtatacatagccctgccccacgcgggtgggcaccaccacctgggggcagagagccgacttcactgctgccctcaaaccagcccttagggaggctccactcacacctgggagccacgtccttttaggaggtgggcagggcacaccaggtggaagggacggggctccccaaggatgccagttctcaccccctctgcaccatctgaccttcctctagcagaacgcagtgccaggtacggcaagaactctgggttttattcagagctgcctcgtcctgggccaggacaccaacgtctctacagcctgctgacccagaaggctccacagaggagcatgggtatgagctgatgacaccggtggggtgaggggctgaggccctggctctggagggcactacccacaggcaaggaaccccccgttactggggcgcctagccccacaggacaagaggccacgtcggaggcctgggagtctgctgcccacaccacctagctgtagcctcctcagaagggttggcccagcaggggactgcatccggcccaggaccagatagagcctagcaccccctgccccacagcacagcatggggagactctggaggacagggccagaggggcaggttgggtgtgtgctggggggcgcagcagctgggaccaaggccccctccctgccgcgcctgccccgggggagctgcctgcagcaggtaagatccccagcgacctgaaaggatgaggcctagtgggggaagtgggtccagggccagccctcccctccccaggtgctcttaccatgacccagagcccagggaagccaaggcccgcacagtgggtgaagaggcaggcagcacaatggcctgcccagggccacaggacccctcaccagcaccagcctgaagcgggtaggggccatgccaggcagcctccttccctgaaggtctccctgccttggggaggtcaaggcctccctggtgggattctccagcccccgggcacactgcgcccacacgcctccaccaccaggctccctgttcagctctctccactgaaagaccttttgttccttcatcaaaggggatgtctgggacagggttgactcagggcctccccgcacatcccccagggcagcagcgccaaagcagcccctcccccgggcccagtgcccctgaacccctagaggccctcccaatgcaggcaggcagccagccctgcttgctgagggtgctgtgaggggggcgctgagcatgggggtggcagaggcgccagcaccccccagcagccgcaggcctggcagagccccccgcagcgcagcagaactgggcccactaggtctccagcacgcctggtagcagagtcccggctgggggcctccgtggggtgtccccgcccccttccagtgcgtctgggagtggatttggcggctgcctctccagactcatctccctccacgcgccccagacttgagtctcctccagaactatttttagatgcagggacctgccaacagcggggcaggcggggcggagggacgtggcaggttggctgggcctcgaggcacggcctgaggcttctccaggcctcccagcctcccaaaggcaggtggggacccagcctcaaggctcagccaggacccagcaccagcaggagggatgagcatcctccaaaagcaccctgccggtggccatcccaacctcacgcggtgaggcccaggggtgcagctggacccaggcctgcctccccaggcaaatggccgcctgccactcttggagctgagtcgggtggcagtaggcagccacagtgaccaaatgtttctgttagaaaaacagagcaacgcagccaccagggggaaaagctctttaggggaatgactcagccccactgctaatcacaggccaccctgctgcacacctgagaccccactagcaggccgtggaggtcccccgggggttaggggaacacagccagagcccaggaggagagaacagaggcacagtcactgacataagacccacacggtctctgacacacatgcctcatacaatgcagagaaaacacagcacaggcccactgccaggtgcacgcacagaacccaggcagccccagggccagggtgccgcccctctcctcccctactatcaggcatcaagcggggggacaagcgaactcaggaatacatcccagcctcccggtaagggccccagaggcaggtgtcaggtcggaggaaggggacaaagtgggcccccgccctggagctcagtggctggtctcccccttctgcaaaatgggtgtcgcccctgacctgggttggctcccggctctggcacccccaggtcccaatccaggagcctcgtttcctccttgggaaatggagcaccacaggagcgctgcgaccacggccaccaggacacaccccagcatgaggggctcacccgacctgggtcatggtggcctgaggggccaccaccatagcccgctcccctccctccccagctccaggcaccccagcctgaggtcccagcacaggggagcctggggcaagatgaagcttctagggcgaggagggtgaaacacaggcccgacaggaccacgtgcacgcctgacctcacgccatggctgtctccttagacactgaccaggggcactacctgagcgacctcccacagacgccttcccccgggggtcccatctgaccatgaaagagcctctgccctcagattcctacagcccacacccggcccaaagagtctcggtgccagtgtggccctcacctctccctcagccatacgggccaccaggctcccaccttagcaaccactggaccctgctccagggcccagggttctgaccctcctggccaccatccttgtcactcaccctcttggcttcctgagagccagtgtccctcccgcccacgtgaagtcctggcaagggctccttctcagcccagccaaccactaccctggaactgggagactcagtttcccaggcatttgaggggcaggcctgaggcttggaggggagcacctggaggttcagacacagatgtcccgcagccaggtgttaccgccgtgccaccgtaatgaaggcatgagcaatcggaaactgcccagggcccgccccagcagagggggcaacccagcaaagtccaaggcggctcagggacaagctttaagaattcaacaaaatgcttttgatatctaatgttggatttacaactttgaaatgcaaaactgcatgtataaatctgtgaaacacagggcagatactagacaaaatatgccagaatttcccagtgattaccgcgattggaaaatttcatctccagactttcccatacattatgcattttctacagcaaacaagcattgcttttgtgatcataaaatacaagcagacacaatcaagactgggggaggtttcctgggggagagcagccaggcccaggacacagggctctccttcctgggccatcagccaggtcagggcccttggggcacaggtctgggcagctctaccagtgggcatgggcagagaaggacccagctggctgagcccctgatgcaattgagagcaggccccctgccggagacggagacagaacagctgccaaaacacagcctcgaggccgggctctgtctgggggtctcgctgctgctccccagcccacagggcttccagccgcaccaggacaagcttcactgcaaaggcgggagaggaggggtggggatgtgcctgaccttggggcatgtgcagtgtggactgtgtgtgcgtgtgcatacgcacat

SEQ ID NO: 1242632 - DNA, 4001 bp, Homo sapiens
ctctgccaagagggtcaccacatccttgtggtcatccagcagctgtcgcaccagctggcagtactgggcctcgtccgcctggtccttgatctgcaggtcacagagtcatgaggaagggtggtccaagcccaacctctcagcccctcaccctgctctggcccagcactcaccggagggaagtctgtcagcttctggaaggcacggatatatagctcatgctgcaaggaagaggtgtgggaattcacaaagccgcatgggcactgagcagagaacagccacccccacctacccatggggatcaccacccagctggtcgaccacgtgatcaaacccccacttcgacccttccaggctccgtgaatacacacctttggcttctgaaggcctggggttgaatcctgtgtggccctgacacctttaggcaagcaatcgtctgccactctgggccccagactccccacttgcccccggggcagggtggcccgctgacctaaggtcctctctaccttaccacgtgcagtatggtggggttgcagccaatgatgaaaggaaggcagcggaagcccttgatgcggtgagcaatcctcactggaagttcttgctgcaggtaccgagcacttttctgggagaaaatgagaagggaaggcggggctggagcctgagtgtctgggagagctccaggatccacgaggaaaatagagggcgtgaatcttaccagaaggtggctgccgtcctgagagcggccagcgtagagcatcatggtgggcgttaggcggactgagggctagagagggagagaggccttgagcagagaacccccaacactctccctcccgcctacatcccggaccctgggctggctgcccccttgcgcaccttctccgctgccgcgtcgatggccgactggttgtaaaaggaggtgacggtcttggagcgctcccgagccatctccacgtggtgtgtgtcggtggccgacgtcgagcgggcccggagcgcgagtgcgggtcccaggaggggccggagcggaagcccgcccccgggaccgctcctcagcaccgacgccaggatcatcgtcttgctcctttcagacccggtggccgctaggactgaggatccgctaggactgaggacccaggcgacccaaaatggggcaagggggtgtgggtgggtaggggctcttctccgacttcagggaccagggtgcgtcgaggatgctgacaggctcagcccgcggagagcagctcccatctaccggggcggggaagaggaagttgtaaggatccgaatccacagaacccgcaccatctctccacctgtgcatcggtctccccagacccgggcgacctctccccaccactcccaccgtctccccagatgcacacaggccgcgcccaaaggacctagcctcccgggggcttctattccccaacccgaggctctactggcggtgggagggctgtcgggggaggagcccctcagacccttccagcccgaaaacctcgccccagcgccccggggtcccgggtacccttctcagggggcggggctgcccctgcctgcccagcgccttcaaacccgggccctgggagcgcggccagcgaacgtgcgacaccagccctgggcccctggggccggcttgggagggtgcggcacggagtccccagcgggaccccccacgcgggtcacttggttcggcccggatgccccccatatggtagatgccagccccgtctgcgcgcccgcgctgtgatggaggctgcggacgtgcgccgcggggcctccgcggactgagtaggctggggtcgccccacttaccgcggggccggagccagggcccgggtcccagcggaagggctcgaacagtccactcgccaggcgcccagccgcctgcgccctccgccgccgtgacgtcgcgtgggcggcagcgcccgctgggtcctgggagttgtagtttggtctgaggacgtgccgtcccgggcgcccgcgcatccaggccacgcccttgctcccggaccccaaacagcaccgcttcctccacacggctctcgaggctctccgtgtccctcccagcctctatctcctgctctatgaaacgggctccctgggagctggaagatcttagatgtaaagcgcacagatcacgccctacctgactccttctcggagctcttgtcctccttccagttcttggttcatttatgggtaaccaggcttcaaaccccagctcgaccccttaatatctggagcaagttatttaactgctcagtgcttggtaagatgaagagatatcatcagttttggggttgtgtggattacatgaatttatatgagtgcctagaacagtgccaggcgtggaattagcactatataagggttaggcattattattattcactcatgcctgcagataatgcaagtcgctgactgggtgtcttttctgcaccaggagaggagattgggcagtgagttgaatagatctttccgtgccctgcataagaaaacagtttcagtatcattggctgtgatgaggactttcagaggaggctgcgggagcctcagatagaaactgagacagctgtgtaggtgcagcctgagtaggacttgcaagggagcggggtgggaagggtgtgtggcaggacagacaacagcccagatggtctgaggatatggctggagccatatgggatctgggaaggagaggggcggcagcagagagcgaaggataagtctgcatttgtcctagggtagttaggaactactgaagggttttaactggtgggctctcctccttagacagaaccccttgtctgcagtgatttagagtggggcgtttggtgagaccaaaggcagagaaaccaataagaagacaattactttaggccaggcgcagtggctcaggcctgtaatcccagcactttgagaggacgaggtgggcggatctcaggagttccagaccagcctggccaacttggcaaaaccccgtctctactaaaaatacaaaaatcagccgggtgttgtggctggcgcctgtaatcccagctactcgcgaggctgaggcaggagaatcgctcgaacccgggaggaggaggttgcagtgagccgatatcccgccactgctctccatcctgggcaacaagagcaaaactccgttgcaaaaaaaaaaaaaattatccaggcaggaggcgctggaagggacacgtttcagtgtgtgcacgtgcatatgtgtgtagtgtgtatttgtactaattgcaattttctttaccatggttatatatttcctaaatatgttcaataaaaagtgctaagtgaagcaagtgacatctttggaggctatctttatttatttatttggagatggggtctcgctctgttgctcaagctgtaatacagtcgctccatagtagctcactgcagcctccgacttaaatgatcctcccacctcagcctctcaagtagccgagactgtaagtgtgcaccactacccccagggtgattttttccccctcaggcaatccttttgccacagcctcccaaagtgctgggattacagacgtaacccaccgtgcctggcctatttttcttagagccggggtctcgctatgttgcccaggctggtctcaaattcctggcctcagcctcctgagttgttggggttacaggagtgagccactgggcctggcggctgtctttaaacttggaggttagccaggtgcagtggctcatgcttgtaatcccagcactttgggaggccaaggcgggcagatgacctgaggtcaggagttcgagaccagcctggccaatatggtgaaactctgtctttactaaaaatacaaaaattagccggatgtggtggcatgcacctgtaatccctgctactcgggaggctgaggcagaagaatcgcttgaacccgggaggcggaggttgcagtgagccaagatcgtgccaatgcactccagcctgggcgacagagagaggctccgtctcaaaaataaataaataa

SEQ ID NO: 1242633 - DNA, 4001 bp, Homo sapiens
atcaatatgggcccaacattcaggaaactgacatgagagtgaggagaaagataaactagtaaaaaattaatttacatgaaaatctcagacagtgatatgtctgtatagattctaagagaccagaggaatgagactgtagctacagggagattctgcaggagtcggaaggcgccttgaggagggtgcacaagacggggagcaggtatagggatgagctggtaggttagactctggagaagacaggacttagaggagagagctcctgggaggtacctggtcctacctctctcttggcccagccgtgggggctgagcctcctcagggaccccttctgggggtccggcaggtgacacagggcggctgggctggggggtgcccccaggactgggctctgtgcccttttgcagggaaccttccgaatggaaactctggttgctgttctcatctgcgggagcaagagccgagatggttggcctgagatccctagtacactccttcagtccccacagccccccgcgtttcaggatccctacctaccattaagatccagcaggatgagagggccaccccctcggggactggcgcccctgccccgacgttcccggccacgggatctctctgccccgccacctgcccgccttcgctcctgggggttagaggattagggtcagagctcttggaaagccccaccatacacctaaggaaactgaggcactgagaagcaaaagggctcaaactcagggggtgtggagcagaaaagagggcaaaaggggaggagctgctaatgatggttcccgtctgtcctgctgcatctgaggtctcggggagctggaggtagaggtcagcgtggggaggaacttgcctgaggttgcacagatgcagggccttgtgggaatgggggttgctcacctcctcctggggatccaccactggcacccacttgaagatacgaagggaagtgtcgcccacagtcacccatcgcttctccctgtgggagggtggggggctgggtcagagaggcctgaggggagacccacccccctaggagctggacacatctgggggtacctgcagaggttgaggaggcacaggaggatagcaacagttttgctaatggggcatagttacatggaggaagagagtcctgcaaaccccagggcataggcggtgggtgcctctagagagaggatatgatttggggccctggctctgcggacccctggggcacacatggggggcgtggctatgggcctggcccgggatcagagccctgcagatcctggggcgcacctgcaggaggggtgtcaaagctttagggggcggggcacaagagggggctcccgctctgggaggacacggctggggatcacgctttgtagacccccaggagtagccaggcgaacggggacagagccctgtggatccagggcaaagctagtgggtggagatacaccgaacacccggggcccagagctggcgagggcagcgtagacgcctttggtgctggtggtcccgctgtgtcccgtccctggcccccgagcagcgctcaccatctccggaccttctcgatggtcgccatcaccttcttgatgtcatccttggcccggctccgggtctcggcccgtacagtccggccggccatgctggcggggctggggccggggccgagcccgcggcggggccgcctcccgtccggcgggctcaggctccgcgccaggcccgggcgccgcgctctcggcctgccgtcccccctggagttggccgcgccctctctcgtccccaacgcctccgcaagtccccgccccgtttcctgccgccgcgccccgccccggcctgtccccggagcggcccggtggcgcgggcggccagagcccaggcctggaagcccggccggccccgccccgacccgggcccgcccccttggagcgcctggacgctcagcgccccctgcccgccgccgagagcgggagttggggacggacgcgcgagttggggacggagagcgggagttgcgaccggacgcgcgaggcagggccgaggccgtgtgttcagaccacgtgggcgcggggtgcgcgacagggtctgtgtcctgcgctgcgtgagccgcggtgggtgtccgcgaaacgctgtgtgtggagtgcgtgcgtgtgtccgccctcgccaggctgttggtctacaccgcccaacttactcagtcatccattcattcaacagtcttgttaactgagtgccaattacgctccaggcgctgcgaatacgagtgggtctccaccaccagaatggctaaagtgaaaaagaccgcaccgtgtggaggcgagaaagtagagcgactggacctctcttgtatttctgggggagtgtaaattggtagagacattttggaaaactggcagttttctaatgaagccgaacatatgccacctctgtgatccagcagttccactcctaggctgtcaacacccagcagaaatgtgtaggtgtgagcatcaagagggtgcatgggaatgttcagagccctttcataacagccccaaactggaaataacccatcaacagaatggaaaatgaatgatgccctactcactaccatgcacatagacacagcaacgggattgacatgcccggctacacacagcaacatagacaagtcgcatgatgaaatcttgagtgacagaagccaaatgcaacagtacatactagatggttccaggtgtattacgttcagaaccagacaaaactaatttatagtgcaccaaagtcaagatagtgatcgcccttagggttgggaggggacgaggggagagcttctgggagctgatccagttctgttgtgtaatctggtgctggttccctgggcatatgtattctgtgaaaatccatcacatgacttaaataaaatgtacattacttaaataaaatgagtgtgtctttgttgactttatttgaggctggcttgtcagcagataagaccatgtcaaaatttgtgctgctgttgtgtgtgtgtgtgtgtttcaaggtgtggctgttgtgtctgtgaatttgggcgtgaccatgtccagaggttaagggtataaggggttaggagcatggttaagacagcatttttttgagccaagctgcttaggtaaaatcccagttgtgccacacctaactgtgttaccctggacaagtcacttctctctattccgcatctataacacaggagttagttaatgtgcatatggctcttagaacagtgcccagcacatggtaaatgcccaataaatatttacagttaatacacatgtgattgtgggccctaccaattgtctggctcaattctatctgctgtgccctctccagttaaactctttcttcttttattccagcaattgctcacggcaatacacacacccactcacacgaacacacgcacacacatgcacgcgcacatgcacacacgcgcacacctgcacactcacacgcacacaaatccactcgcacacacgcatgctcacacgcacacacgtccgcatgcacgcacacacgcagacacacgcaagcgcacacacacacgggcctcctcgtcttcattcacaaaccccattagcttctgttgtctatgggcttcctcgacagaccgcgagcccctcgcgggggccagaaaccaagtatggatcatccctatgtgccttcctttccgtctacaccaggttaatggggttgacgtatgggtgtgacttcctgtccaggtctctgtagcttgttctcctgggggtggggggcggggtgtgattgttactaggcctgctaagaagaggagagcagtgtatctgtctccctcctggtgggtgtgacaatgagattggaagccatctaagataggccaggagatgtatgtctggacaaacatgccccaagcctgacggcccccatcgtagcctccctcgcaagccgcgccccagactagagagagggcctgcgcattcctgtcctgccagtccggcagttccctctcctgt

SEQ ID NO: 1242634 - DNA, 4001 bp, Homo sapiens
tcactcttgccaaggccagagtgcagtggcacgatctcagctcactgcaacctctgcctccggggttcaagcaattctactacctcatcctcctgagtagctgggactacaggtgcatgccaccacccctggctaatttgtgtatttttagtagagagggatttcgccatgttagccaggctggtctcaaactcctggcttcaagtgatccaccctctttggcctccgaaagtgctgggaccacaggcgtgagccaccgcacctggccgtggggtgtctttttaaaaaataaaatatgtacagatgaacagtcaaattgagaaaaaaaataaaaatgtaatagtatacatttgctttttgaaaaactgtttacaaatatagtaatctatcaattgatctacctatgttttaaaaagttaaaggaaatagacccaaatattaatagtggttaagagatttcaaaatacagctgattttatttccttccatgttctcatttgcactcctaattaatttatatataatttaatatacatacagctatatatatatacagattgatagctatagattgtgccttacctttgtaaccaggaaaatatatacataaaagctattttttttttgtttcaaaagactcccaaggcaattgctcagttgaaaagcttcaatctgatgttctcacgaaaatcactcacagttgtcctctccttatgaacaattccagtccatctagcagatgaaaatgcctgcaggcctgagctgactcagctgttcttaaaactgagcgagcaccactctggggacccgggagtccagaaccaggaactgccctttagagtcgaaatggtaccaggaaagtggcaactcaaaagaggaggaaaaagagatataaaagattaagcgaaacacagagcctctaaaggatagaaggtcctactcctataggctctgcaggagctcacacctgtgagttcctgagagaaaatcacatcagactctgcaatcccctgcaagtgtgcgtggtggatgtgcatgcgtgggagctcatgcacgcccctctaagcattttgaaactaatttagaatgcatacatttgcacaaatacatcatgcatctgagacaggcagcagtttgcagattaatcccattgtctatgtacccactggggcattccaatgcttttttcctgggaacagtgagactgactctcctccctttgcaaacggagttataatgtgtaaaagaatacctagattttcacagaaaatgtgtcccctctctgtactgttttccagactttccaaaagtaatttacaattagtattacttatatcatcaggaaaaaatagtgtccatctaaacacaaggaagaagccaggtgcagtggctcacccctgtaatcctagcactttcggaggccgaggtgggtggatcacttgaggctaggagttcgagaccagcctggccaacatgctgaaaccccgtctctactaaaaacacacagattagccgggcttggtggtgggtgcctgtaatctcagctactcgggaggctgtggtgggaggatcgtttgaacccaggaggcagaggttgcagtgggccgagatcaagccactggactccagcccgggcgacagagcgagactccgcctcaaaaaaaaaaaaaataataaaataaatagaagaaagagcccagtgtttatcagaatgctcacctgtcactttggccctcacaggctccagctgttctttcctattcctgccaaatattatatccattgctcagggtgccgagggagatcgattttaacagcaaacaggtgctcctctgtgttcacaggagatgctgctccctcctcctgcgtttccttcctgctctcctgctccttccctccttcacatctctgtctctcctgatgccgtttctgcctttgctttttcctttttggctggctctcacttgtccctctccaagagccctggatctctttacattcacaagggaagctgcgctggcgttacttataagatgtttggttaaaggttaatttccaagccatgtgtcatagctaatctttaatcctcttattgttccctcagctttccctctccagtttcacttttgacttaaccaaaaaaaaaaaaaagcttgcttcagactaggttctaaataagcagagagaattccgtgcctgctgttatgttgcccgacgtaatccaagagctggagttgtttatgatcagaacaagaagagatgctgggaatcagaggtgctgggaattaggagaaacttgagctaagctctgtgatcactgaatgtctgctgcacagcagggaaccccttcagcagagacgggaaaggttttacattttgttttgtttttagtaaaggccccgatgctcccctctaataatcatacataaagagccacttaattcattattttctttttggaagaaggagacataaaatgtttcatgtacctatttaaaaaataacgaacgggaaccaaaggcttttctcagaaactataaagaatagtaaaaaagacgggccaggagtggtggctcatgcctgtaatcccagaactttgggaggccatggttggcgggtcacttgaggtcaggagttcgagaccagcctggccaacacggcgaaatcctgtctctactaaaaatacaaaaattatccaggcgtggtggaagacgcctgcaatcccagatgctaaggaggctgaggcaggaaaatcgcttgaacctgtgaggcagacattgcagtaagctgagatggcaccactgcactccagcctcggccacagagtgagactctgtctcaaaaaataaataagtaaacagaatagttaaaaagaaacttcaacttcctggcctatcaagagggcaaaacaatgcctgaatttgatctgagcttccctattattcgtgtatcttcgtgtgttgccattgcctgaaattcgtattcaacttgctatatgcactgattgaagttaatgaactcatcttaacgtattttgcttaaagaaagaaccagtcatttgctctgtgggtagagtaagaaaaggcagtggcactggcctttatgcaacccagctgagaataatgatggtccggtctgggctgagagcacatgccagcaccttgggccgttcattcctgacagctgtgtggtctggctgtgcttccgccctggcacacattggaatcacctgattggcagtactaaatgtatcagtgctgggcctcactccagacccactgacgcagaatctctgaaggtggatctcagccatcagttttttttttttatgttggccgggtgtagtggctcacacctgtaatcctagcactttcggaggccaaggcgggaggatcacttgagcccaggaattaagaccagcctaggcaacatattgaggctccgtctctaccaaaaaaaattagctgggcatggtggtgcgtgcctgtagtcccaactacttgggaggctgaggtgggaggatcacttgagtctgggaggttgaggctgcagtgaactgtgatagcagcactggactccagcctgggcaacaaagcaagcccttatctcaaaaataaaacatacggaggcagaggcgggcggatcacgaggtcaggagatcaagaccatcctggctaacaccgtgaaaccccgtctctactaaaaatacaaaaaattagccgggcgtggtggcaggtgcctgtagtcccagctactcgggagcctgaggcaggagaatggcgtgaacccaggaggcagagcttgcagtgagccgagatcgcgccactgcactctagcctgggcgacagagcaagactccgtctcaaaataataataataattaaaaaaataataaaaagtacctacatgtgtgcagcaggagttgagaagacctgacccagaggaaagatgctacatgcctgagttgaaactaaatttaaattatagctgattggctaggc

SEQ ID NO: 1242635 - DNA, 4001 bp, Homo sapiens
ccccgacatccttcatttctggtgcctcatggcccagttgcctggacgaatacatcatagtctgcgaagaatcaaggctgggacccctcagacctctaggctgtctccctggtgcttcttgctgcctgtctgaaccgtcaccatcggtgtgtccaagccacctgacagcctgatggctcctcagggaaagcaatcctccacccgggagtggagggaggtgttaaattcccttgtacggagctcgagcaatgggtgggtgcccctctctggggcagcggacatcagctaagggcaaggaggaaaagggtgcaccttacagtcagatgcagccttttcaccctggagagagatgggaggtagcaggggagaactgggctgggcggtagagagccttggaggagggagcgtctgagaaagggtgggccctaaggagaaagttttgctttgcaattaaatgtcaacagcttggggaattcaaaggcctccttggagggggctgggagcaccacttcagattcagaggcactgaatctcagcatctactggtgctggacacctcaggacacctgtagcccaccacaattggccactggctgcgtgccaggcaccaggctacataccctcaccagcatcatctcatttaatcctcccaactcaccttccccatgttccagatggggaaactaaggctcagagaggtttgtgtcttgcttaaggttgtacagccaggaagtcagccaagcccaccttctggttccaaatcccttaaacatcccgctcacaacagactcctgcttactttcagatgaggaaactgaggcacagggtggtgaagtctctcgttccagcagagcagttatgtttgaggagtgagtccagagcggcatgctctcggcaggggctcatcggaaatcgtggctcaagagcaaggatccctgaacccctgcctctcacaccagttacttgcgccctccctttcccagcctgcgccccgccacccacgccggcacccgcccgagatggacagggcagtccctggtcctcaccgctctccagcctccagaccgcagagcccgatagggaaggaggaagggcagcgagagtcagccgggtgtggggtgggccctgcccctggggagcggcggcggtgccactcagcgctgcgcagccagcctgagctgcctgccgcctcgcctcgtactcagcctcgggtccctctgacagcgcaagggaaagtctgtcccaaagtgggagaaggtgcggagggcgcgctctctctccgacgctcggtgctgagacagaggcacggagacaggggcataccccaggcgacctgctcgtcgaagggtcaaacttcctagctcaaaggggtgcgggtgggttcaaactccaaactccgtgaagccccagcccctttcctctcccaccccgaccgagagtgcgccctagttttcccttcttggttgggttgttcaggggtccccgaaaccgagggcaagctgctggggaggctgtcttgggttccccaaatgcggttgatgctcgtcggggactcgagtcaggcagaaaacctggatacctccccttccccgaggcccgagggcgcgatcagggtcagcctcggctcgcgcagatcccagtggccagcccggggtcgagggtccgcgggagacccgggatcccgctccgttccgagcgcgctgcggttccgttccggaccgcgcatccgcccgccccgcgcaccgaggctccgcgcggcgcgcccccgggtgtgtcgttcgccggtaccaccgcagagcgcgggggaatggggccgggaccccccgcccgcccctcccccgcgccgcccagccccacgccccttactcggcttggctgcagcgctccgctccgtgcgccgcagtgccggctccagcttcggctccagctccggttcccgccccggctccggctcccagtccggttcccgctcggaggccactgcgctcgggctcgggcgtcgcggggggcgcgccgctacgcttcggcctgctgggcgcgcaggggcggggcggggcgggccaggcggggccaggcgagccgggccgaccagccgcccgcgatcccgggccgaggcagcggcggcggcggcttcccaggccccggccctggccctggccctgccctgccgcagccccgcccggccgcccgtcgtccccgcgccgccgcccacgccaccgtcaccggccccggcccccctcggcggcggcgcggctcccgggcctcagcaccgcggcgccgcggcccgggtcactccgagatgcggggcggggggcgcgggtgcgggggagggccgagccgcgcccctttgcgcacagccagcccgacacccacacagcagcaggcggggcagggcggcgaggaggccgggaaatgcgggaggccgacgctccagtcagacgtgtgaagaggacacacaggcgtgtgtagggaatgacacacggacgcgagcggggagccactgacacgtgcagagaagggtagacaaacgaggtgtcagggaaggacagccagacaggttggaccgaggctaggctgggcatttgagcaggggacccctgtcgcgggcaaagagcaaagtgcgggatggagagggggacccagcgtggctgggccgctggcaggggcaggcgagcctggcagggcttcccgctcgcggttgctggcaggtgagttttgggattccagctaggcctggcccaaaccttccttcggagccaccagcaggcctgtttccttcaccccgtcaccctccctgtgcccccgttccccgctgcccaaacgtcagggcatagggctcagccctggcaggtggaagccggccccgaggggatgcctggctcaggccggggttccaggcttccaggacctgctctgtccccaccctgctttggggccttggacgaatcccagcccatctctcaggcctccctgtcctcattaggatattgctcccaatgattgcacccctactgtgttggggtgctcgccagcgtggaggagttatttatttaacctccgccacttgcctgggagcgccaggagggcagcgtctgggtagggctgcaggggtctgcacagagtgggcactcagtgaatttgctgcaggaattgatgaaatgtgttgttgctaacactctctgaaccactactgttgatgaggaaactggggcttaggaggcaaggggagtcaaaagctgggttcgtttcaaaacccaaaggcttgtcactggcgggaaagtggttctcaaaaataaagcatggtgacaaagggctgaacatgttgatgctaaaccttggggaagcagtgaagccatggggatgttgtggaagggaaagttggccagggactggccttgcagggaggatggggcagagcaggctccggtggagaaaacaaaccccagccctgccagtcatcacgtcttgggcttccctggggccaggcaggggaagctgcgtggtctagggcttgggtgcttgaggacatctcccagcctcctctggtaactgttcattctgggctctgctccctgcactatttaccgccccccccccgcccccactccccgccctcctgcaggctggggctgtcacggggacatcagctctgagtaagggatgaggctagaataaagggaaacaattctcagagaaccgaggaaggggacctgagagaccctttgtccaacctcatgcatttattttatgaatgaataaatgaaggatcagagaaaggaggggataggctagggtcaaagaggtaggattggaggctctacaactcccaagctagggctgtgcccacggtataaccttgatctctctgaggacacctgctgacccttccaggatggatattctagttgttgagtggttttgcctgtaagctgccccctttggcaagactctgtgtgtttgtgtgtgtgtgtgttgtggtgggggtggggggaccagggata

SEQ ID NO: 1242636 - DNA, 4001 bp, Homo sapiens
agtatggtcttaggagtgacactgatctgggttccaaatcgcgtcacgatttattcttcctaaacttcctatttcccactgatccgtctaggataatcatgtcaacttcgaagggctgttgggaggtttactttaaaaaaatttttttaagagacagcgtctccctatgttgcctaggttggtctggtctcctgggctcaagggatactcccacttctgcctcccaaactgctgggattacaggcgtgagctgcggagccccgccctgctgtgaggtttagatgacaaactatctacaggtactcaaagtttgctgtgtggggctgatcggcattattaacagaattatcaatagcagcatttattgagtgatggctacctacttagtggcactgccaaacgctggaaccaaaaagcaaacaaaaagaactgccctggagaaatacaatgtctccatcaagtttatggatatagggaaatgcagagcacacctgtcaggatacacccaggctggatgttgagaaaacagcagcgacaagaacaaacaaaacaaccccatcagcacgtgcagtccctgccggctcgggggtgtgtcctgggaagagagtaaagctctttcctattggcgatttggagcatgacatcaagaccaccccccttgcaaaggaccgaccaatgggcttcggcggggaggacccaatggcgacagttgagggcttaacagcgtctaggctctcactctgttttccgcggaagctgggatgctgcctcctgcccctccaaaggtccccgtttagacacaacctgactctcatctgtcgccccctcccgccggcttttttaataaaagacaattctcggccgggcgcggtggctcacgcctgtaatctccccactttgggaggccgaggcgagtgggtcacttgaggccaggagttcgagaacagtctgaccaacatggtgaaaccccgtctctactaaaaatacaaaaatcagccgggcgtggttacgcgggcccgtaatcccagctactcagaaggctgaggcaagagaatcgcttgaacctgggaggcggaggttgcagtgagccgagattgctccaccgcactccagcctgggcggcagggcaagactccgtctctaaaaagaaaaaaaagaaaattctcttttgcctaagttatttccgagccgcaagtcgcagaatcagaagagccgagttcttgcctggccccagtgtgactttgggatttcactttctcccttctgcgcttcggtcaccctactttaaagaatgggcacaatcgctccgccttaggccaggaacgtgcctcgacaattagaccgtaaactcagcgtggcgactatcagaagcctcatcaattctggtccggctgttgcagggtgtggcaagcgctcctggcgggcaggcgccccgtggttcccctccaaggtgtttggaagcgacccctcctccttcccgccctagggagccccaggagggagtggctctgaccctgacccccgaaaggacgcaggcgaggcccagcgaccggctgtgcggacgtggggctctcgggaagggatagcgcagttggccaagctggggtccgaaccccgcggccaggagtggggatgctcaggactcgggcctgcgtgaggagaggccccgcgcgcctcctacgacccggctggggaggctccgcagaagggattcccgctccgtcttccacatcactccccgatatcaagcccgagtcgccccctcagcaccccccagccgtgtcgcggcttaccattccactcgtcccgggccaaccgggccattattctcagcacagaccccgcgggagcagaggaagagggagaggcttcgctaccggaagtaacaagacagagtgggggaagcgtgccccggccccgtgaccatagaggagaggccgctctcctttcacaacccccctcaaccccgcgacctccccgctgcctagagcggccactcccagccggaggaagtgggcgcatgcgtaataccgccggtcccgccccttcctcttcacccagagaccgagtacccgggctcggcagtcacagcccaaggggtgacgggtgtgtgtcagtttccgctcctcctgggcggctgttcttgtatccggaggatacaagctttgcctagaaattaaaatattacaaggccgcaccgtactctctacagttattttttgccttcacattttatgtagaaaatcacaggactatacgttcaatttacggtgttaagaatcggaattaaatgacttttatttctattaaaatattttttttttcgtagagatggggtctcgctgcgttttccaggctgatcttgaacatatggcgtcaagggatcctcctgcctcagccttacaaagtgctgcgattacaggcgtgagccacctcgtacagcttgaaatggttttcttatcaccacgtttcgccccttcccagcgtctaggtcacagcgtctagaacttatgctgattatttggttttgttttgttgttgttgtttgtttttgagacagagtctcactctcacccgccaggctggcgtacagtggcacgatcttggctcactgcaacctccgcctcccgggttcaagcgattatcccacctcagcctcgtgaatagttgggactacgggcgtgcacaaccacgcctggctcattttaaaatttcattttatttttatggagacagggtctcgctcttttccccaggctggtctggaactcctgggttcaggcgattctcctgcctcagcccccgaaaacgctgggattacaggtgtgagtcatggcgccaggcccccattaaacagttatttatacagatttattaatacgctgcttcccagttcacattcattagcaccactgagcctcaatacaatcccaggaaattgaggtttaggaaggtttaatgcattccagaactaataagtggctgagatagattttgaaaataggtcttctaatcaactttccttttgttcgtttgtttgttttggagacggagtctcgctctgtcgcccaggttggagtgcagtggcacaatcttggctcactgcaacctccgcctcccgggttcaagcagttctcctgcctcagcctcccgagtagctgggactacaggggtgcgccaccacgccaggctaattctttgtattttagtagagatggggtttcaccgtgttgcccaggctggtctcgagctcctggcctcaagcaatccgcctgcctcggcctcccaaagtgccaggatcacaggcgtgagccatcgcatccggcactaaccaacttttcatagttggcttttgtgaaagaccaacctgaatgtattcattcaacccatgcttattgagtgtctactacgtgtcagcccagtgctaggcattggagaacagcaaccccaaaccaacatacaattccattagggccgggcctcatatgttgcactcgacatagtattcccagaggctaatgcagtagctaagggtctcagctttgctttccgtgatcacctaagtaacaacccctattattcttttaatttaatttaattttttttttgaaaacaagtctcgttctgtcacccaggctggagtgcagtggcgtgatctcggttcacagcaacctccgcctcccaggttcaagagattctcctgcctcagcttcccgaatagctgggattacaggcgcgcaccactgcacccggctaattttttgtatttttaatagagacagggtttcaccatgttggccaggctgctcttgaacttctgacctcaggtaatccgcccgcttctgcctcccaaatcgctaggattacaggcatgagtcaccaagcccagccaatttttatatttttagtagagacagggtttcactatgttggccaggctggtctcgaactcctgatctcgtgatccgcccgcctcggccttccaaagtgctgggattaca
